United States Patent Application Publication US 2005/0208558 A1 - sequence listing, part 3

SEQ ID NO: 1996 - DNA, 11164 bp, DROSOPHILA
aatacactacctacctgatgatgatctttcatttgatggcgattttgggttcgcattggaaatatatagacacaatacataaatctatagctacatttttcatttcagtcccaaattattgggggtttcttggtggaaatcagtggaaacagcgcttgaagttatttttaaaacttgtttgtttattctttttgccatttttgttacgatttacgtttcaattaaatgaattatttaatatacatttagttaagattcccgacaaaaaaaattagaagtgtgtgtttggggatgtgttgtctttaaaaacgtggacgtgaacgtgtgtcgtaccattagatctgcaagagttagagtcccatctacatttaaatacgattatccgattatccattaattattgctattgtaatcgttgtttaattgttatctgccgtcgatattagttaaccgccgccccccgtttatcctccttcccacgttcccaaaagtttgctatgctaactaaaagagccgagcattgtgaggaaatctcaagttaaaaaaaaagtgcgtttacacaggcgattatttttgaaataaccggatggtggagaggatggagccgcgcaggagaagaggctgggggttccgctaacaatgctgatttacaggatcgcacatatagctttgtatgtacacgaatatgtatcgttatattatatataataaggcaaatctgacgaggggcaatcaaaagtgtggcttcctttcgtgtttttatggatagtggtaagtgcagtgcgtttcggccgtgtaaggcctcgttgttcggtgaaccgtagtgcaaaatgtagcgtcatcagaaaaggcagtcgttagactaggtgagttggtcgtaagtacaaaatattaggaggggcgttaaactaatccattgctgctattacacctatgaaacgcactgcctgaacgcattcatgtattgtcacagaaaccagtcattcgtgtgtgtgtgtgtatatttttgattagttttaaacagcgaaaaatcgttaagtacttaaatgttaagatcaagtcatttacaaaatcatttgcatgttttcacaatgcaacacatgtcaagttggggctttcacttaggaaagttcgtttaagaatttaaatattctggcttgtgtacaagtacaagtaaattgaggacaattctaaagaagtttgcccagaaggcttcctcgcttgggaaaaaactattagtttgaaaacctaagaacacttcgaatcaagtattttttttttttcgtttaaaacaattacatttttatagcctactaggaatagttccaaaataccgtccttttcttttccgtaacgtaaataagagctctgatatctaagtaaaattaattcatacttgtcccatctataaaatcgacccagcctaaggtgtgtgataagcgtttcgttgtcgtcaaactctcccttcgtttccattttgttatcaagttatttggtcgtcttgtcttttaggcttcggctgctccactcatgtgtccacttcggcatcgcttgaagctgctcctgcctccagctgggagccactgcgtcagggcagcagaagcgggcggaagtaagcacgacagaagatcgtcgatgccgagggcggcagatcctgattgcgatagtacatgttgcactcccgctccgtcagcttgtcgaacacggctgcatactcgcgatggaatgtggccaggtccacgttggacctaccgatggcggtcagggccaggaagagtatgtcgcgatagaacgagtgcgatcgctccacgccgttgctcttcagcttgtgtcgctcattggccaagcgcttgagaggagtggcgaagtcattgcaccggatggccgaaatgatttgctgaatgacactgggtgacacagagacatcattggtataagcactaactactatcttgtttgcatctactcacttcttgttgagctgcgcctgatcggtgagcagcgccttgatgagcggactcgtcggctgggtctccctgtacagcaagtacatgggtggaccactggcctccgtatgcaggctcagattgtcccacaggcactggatgtgcaccgtcttcaccttgctcagcggatcgatgtgctccttgtcgctctaaccagttgagaaatcaaacaatggtaatcaatggtacatcatcataaggagccacattgaatgacttaccggcacgggcagacagagctcgggcaggtgcgtcttgctctcgatgcgctccatcagccagagcaagttccaatagatgatcgggtgctcatcgacaaattccggttttatcagcgcaatgtcgccctcctgcgtgagtatgttctccagctccttgcgcagcaccagcggatttagatacggcacggtcaggctggtcttgtggctattgccgttggctatttgctccttgccgtcctgcagcggatccgactgttccgactcctccacctgccgttcgatctgtacgctgaggaaaggcaccgtgagcttgttgcaggcatggcaggtggtgttcaggttagagtcctccgccgtccagccgctcatgatctcctcgtcgtagacgagcaccgagcaattgtggcactgcgagcaggtcgtcagctggatcagcacatcgcagtcacgatccgcggcgttctgtggatttaaaagtgcaaaagtggttgaggatacaatcacattccaggctatcagtactaacctcgcttgttagactatagaggttgtcgggcacagcgggaaaggcgtgcatgtgaagggcgccggtggagctgttctcgccgagcggcacgaggttattgtagctggatttacgcgactcgctgagcctgccccatggatccaggtcgcttgagacgcgacgcagcttgccctcctcgtggacggcggcatcgtgctcctcctgctccgcattgccgtgctgcgaatgatgatgatggtggtggtgcggatgatggtgaccatgatgcaggccatgcggatggtgtccattgttcgttttcgtcggcgttgaattggccgatatcacgcctttgatctcgtcgaactttttggtcagcgaattggccgccgatttgatgctgctcagactgccctggatcaactcgttcgacttcttgcccgtcaagctgggactggatggtacaaaagtcgagaattaattgggttgattgggcttaaaggctaaacaataatgaattatcatatttctatgtacaacgaaacgagaatgagttaatgtcattagcagctgatttctctggttttatcttagcaataactggttaatattattcttaagtcttacggtagttttaggaaatccctaaagttaatccaaaagttatatacatatatgagatcggggaaatcagctgctggtggtgctgttatatatcgcatggtggtgcggtgcttgtgaatggccgttagttagttagtttgttcgatttaatcgagttagtgtgaatgctttgcgtggctttagtcaaaccttgaattgcccgccaccaacgaagttttttttaaggagattataaaccataaccataactgtaacggtaaccgtacccagaacacaaaacgaaaacaagaggttaagactctgttgtgtgtgtgggtgtgtgtgttttgttgtgccgctgtgtgttaattgccgctgtccacttgtacattgcaaattattagtattgtcatgttttacaaaacataaaacaaatttaagtacaatatagtatttagaaattaagaagacaagacataggaacatctctgaaaaactgaaacatataacataaacttaagatttacatttgaacacaaggaacagatcaaagtgggaaatgagattatcttaacttatctttcaaataaaaaaaaaacctccatcaccgagagagcacaatttgaattccaggtgaaatagcgtggaaagcaacacaacacacaagtgggtgtagttttcgggtgtttgtttgtcaagttgttctctaagaaaggtctccacttaccttatgctcgatatattttctataatattggcgggcaatttcaagtctttcttaagggacaatcgtgcgggtgaataacgtctaagatataattatatatatatatatatgtaaataaatcataaacgaaatgtggcacagaaactggttcgattcagaaagaggtagtagaaatacatggcttctccagttttccacaccatttgattgaattgaaaaattcagagcattatcaaatggtttaagcttataacaagtgatgtgaaaaaggtgaaaagccatgttagttagggaagaaaattcgaaaaaaaaggggaaactaatccgcttgttttggtgattggactgtggaatgcttgtggaatagtgtgttcagatgatttaagggagatacagaatgagggatcggaggaggaaaggctgtggaacgccggagttacccgaacgtgaacttcagcgaggatccgatgttggccaggctgttggtcacaccgctgctggccaccggcatcgtttccgaacggtgcatactcttcccgatctgcgtcgactcgtcgaaagtggcgctcctctggccccggaacaggatcggcttgtcgctgtatatgctgctgtcgatctgcgactgtgagtgctgctgctcctgctgcgtctcctgcgtgggcgtggcactggcggcggactcctcctcgttgagagcacccagtggatcgttttgggtcacgggcgtgcgtggcgagattctaaaatataaagtcttaattcgatttcgataagctaagtagtattcccaaactcacttggttggactctgcactcgctgacgtgcccgctgtgcggccacatgctcgtcgacttcatcttcgtcctcctcgtccgcctcgtagtctcctccaccggcgtattccaggtcatcggcgcccgcttccagttgcttttgcggcgtgctcggcgatccggccgtgtattcatcttcgtcctcatcctcatcatcgtcatcgccgccgccaatgctcatgatctgtttgcgtggctgctgttgctgaagtgccttggccaggatttcggtgtcaccgccataggtcggcgtattcggggcgctgagttcgccgggtatgagcaacccagtgttgttgaccgcatcgcccattgtctcgttattgccgcccgtcaccgtctgccgcacaatgctgcccaacttgttcctgagccgatcgaaggcggcaaaatcgagcagtccatggccaccgccatcgccggaggaggaagccaaactggtgcgcgactgtccgtccaccgtttccagggtgctgaggttctggtcctgggacgcactgagcgacttgttcaccttggaggcggccctttgtttgccagccttgcggaactgcgccgctcccaacaccacgttcttaatgcgattccagcggatctggctgatcgtggtactgtcctggggccactgcgactcaaggacgcagcggttgtagaagccataggtgagcgcattggcctgcacgccagagcgtttcatcaggtagtgcagacggacggccagcacaggcagattgtgaataccgcatagctgcatcatgatcctgtagcagaactcgtcacaggtgatctttagacgactggctcgcacgaggacatcgtaggcggcgcgcagtatctctggctccttgccggcgtgccgcggatccaagaccatggatggcaggatgaggaagtacagcgagtaacaggtggccaacaagtatttggaccacgcctccggatgctgctgacaacggctggccatcttctgggacagcttaatctcgtgtttggttcgccgggcaatgggtgatcctggcgagagggaagcgttcagctgcagctgcagaaatttcgataaagccgtcttcttcgtgctctgcaacagttccggttgcagcgtaaagttctcgtagttgtaggctaatcctcctcctccgccgccaggctgagatcccgccggagttacgctgtccggcggaaagatgtacttggtgcgctcgctgttctgccccgtgtcccagtccaccaaatgcagctgggcgggcgtttcatcgtagttgcccaccttctccgcacactcgtcgaagaagctgagaccatgatcgccatcggagacaaaggaacgctcctcaatgaaacggatgaacatctgggtcttcatcatcagctcgaagaacttctggtgcgactgttcgtgggcagttcaaagtgttttgtctgactgactaagcaaacaatactaaaacagttttcttaccttatcacgcgatcgcaaaaaagccttcagctggaagagggcacttggatcggtggctcccaccgatggtgccttggatatgggcaccagaaagtctctgtagccgcgcagaatgctggccatgaagagcagaaaggcctcctggatgcgctgctccagcaccagttctcgtttccgctttcgaatatcgcgatccaaactgtttgtggagtcatagctaatgggcttggcattctccagttcggtgagcgtctggcgaagtaggcgggctgcccgtttcggcagcagcttgggtgacaagtgacgctgcgactcacatagctgcaagtatggtaataggtgcgatattgattcattaggaacacatttccaatcggaaaactaggcccaaacgtacgctaatgttgttggtgtccaaatcgatgcaggtgacatccgtgggcggctcgtacaaatcgaagaagcgcgagtccacgccaatgagataaggcaatggggcatggagcacctccgccaagcccagcggacaaagtgggatgtacggacactgccacttgaacggaaacagcagggagacaatggcttcggccacagcagtcaacgtggcaggtctgcggcgcgaataaatcgatatgtaggatacggtaaggatattcggtacatgtgatgcacatacctgagtgagtggatgagtatcttctgttcggtgagggccagcagcagcacatgcagacagttgtcggtgcccaggttctggagcagtatgtggaaaccggcgccacttcgcggcagcggggaatcttccggctgtgtgagcagtatgcgatcgttggactcgctggacagctgcaggtgaatgctgggcgccggaaacggtacttcgtccagcagctgggtgatgtagcgctccacgggaatgggtatattaacgtcatacagaaccattcgctataacgataaaaccagatatggattagattctatcaaagttatggggagtgtaagctcacatgaaggtacttcagccatttgtcgaaggtgtcgccaaagggatgatgcgacagcagacatatagccttgatcatgtgcagcgagtgctgggcgccgaactcctcgtcccaaccgagcagctccttctgctcagccgacaactttgactcactgaaagtgtaaatccttagtgtatataatttttgaaatatattcaattgcaatttactcgtaatcctcgtagaaagttaacgccgatccgtaaaccttgtaggtgccatcgctcacggtgagcacaaaagtgctgaacaccggactgatgggtttccgcttctccgtgccgttgacgtgtggccaggcctccagggaggcgcccattggcaggcagaagagcggcacgctcgggcacagattcagcgggaagtcggtgtggtcgaaggtggggtagcgcagcaggatctccggcttgtagctgatgtgcttaggccggtacatggacttcttgtagcacaggtagacgtcgctgccaacatagcccttgttcagggtcttgtagattaggcaaaaggcgtgcggagcccgctcacccttgctctggacaatgacgcacagttcggtgaccaccagctcgttgcagggcatgtccgctcgggcgcgtcggtacgtgaggaacgtcttcgcggacgagttgttcacattggccaccctgccgccaggcgtctccgcaacgatttccgcatccgacatgatccgctcgtggccatcgtacaggactcctgcaagagtggaaaagattaatataaaagtcaagttttattacttagaaatgacgacgcaagcatttaatcacctataactgtacattttatattgactgtgaacgattttatttgatttaaataagcaacaatttgttggctttatcacgagtcgtgtcgagattacaatatttaaatttactttcgttatcaagaaataaagcccagtctttcatttcgatttcttaaatctaccaaaaataacttggagttcttagaaaaaaaaaaaacacaaccggcagaaatgcacccacctatgtccaccagcggcgggcgatccttgccacgccggaagtagatgtagcagtcggtggtgcggaccgatccgtgattgaggttcgcctgtagacccgtgggcgtgtgcgagaggatctcgtatccctcgggcacctcctcgcccagcagcgggaaatagacgccgatgtccgtgatcggttcgatggtggtggccgctctcaatcttcccgagtcattgaagctgttctcctgcagcagctgcggattctccggcattccggccaccacaaagtagtcggcgatgcgcttttcctccatggcggcgccgtttcctctgcaagagacagcaaaagaccccgagtgagtggttaatttcttggcatggcgggactggcagaccagataagataaggtcgacagggaacaccagttctactagttgcggtggctcccaatttcacattaattaatattttgttaagtaatcatcacctggggccaaagttaatagttcttcttccgagggtaagattcagataagcggcacgcacaagtaatcgtgtgattcccttggttcgtgcaacggacatgaggaaacatatataaatctttatgtttttaagatttcatgaaaagaaacatgtttactttgcggtttttcgaacgatgtgaaaatgatgttatctcttgaaaaccaaatggtaaaaaagctgagaactgatatctttaatatttcatcacatccgatcgcattacccacaaagaagaaccgcaagatattatgattattttgtgggtgacccactggagtactggttggtgacaccaagcgcatgcttcactgtatctttgcccgctgggcgcaaaatgcttttgtttacatatcatataatgtcggcgtccgattggaattgcatgcattaactgatattctgattggactttgtatgctggcgactttttttttatgcttcgcgcggcagcagcgacaaaagcaacagcaacaacagcgacagcaagaacaaatggagctggggaaaacaagttccgcttgatgattcaacttccttcacttccgctttacagcacaatagcaccaacgcattttgtttgtgttgattgctgatgcgatgtttttgtttacaggagtccaattggcaggtgtgagtggaagacgtagggcacagggcgcaggggaagaggggctggctggttaacttactgcactcccgttagttgtcctccaagggggcgcggggacgaagggggcgtgggcaaccttcagttgcttttgctgttcgccttggactgcaattgtcgcttttccttcgcttttcttcttcacactacgttaatttccacacaccaacactcaccgcacgcacacacacacacacgcacacacagttggactacttgagagttttcctttacatcattttcacagttttccaattggactgcttaactgggccactttgactaagacgcgccaagtgcgttgaaatccacgaatttagctactttaaaagctacgcaaatacgtgtggagtgcagtggacagaaaagtaaggaataatgttcatttaactggcctgccagccgtgtgcgcggctcggtgtgactggcggaatgtgccaatcgcctgtatgcgctgcttggcgaactatataattaacatgcaatacgaaacacgcgactattattatcggatttactattattaataactatttggcctttgcttcaggccattttcagcgttgccagataagactagcttttggtctatcgataagcctaaatgctgattactttgaaagtatatcatcgccaatcgcaaactttttccgcctggttgaattataattttcaaagactaatttcaaacaatttgaacggagtaattacagaggccacttacatggatgcgtaataatttattctttattctttaattttgacagctgtttttttatttctatttgatatatttaacgcttatcaaatcgataacgatgcctttggatgcctactactctcgatagactcaccgtggcataagttgccatctctaaatttctggccatctcaattgcaagcttgaaacgtgtgaaatatggaacaaaatgcgaagcctaaacgctcctttaagcgtccgtttacctttccaaagaactgtgtttaccgccctctacgtcagataagcaacatggagcgtagccagaagctgtccgccgaacaacccacctgtgagtaagcaatgaatgtggattcgcaacggcatccatatgtgtacttcacattgcagacttcacgctcaatgcaccgccctcgttggttccggccaagaagtactcggatatcagcggtctgcccgctccttatgccgatccgcacacgaaactaaggttcgccagcgccgacgagtacgcgtccatgcagcacatgccctcggacatcgtcaatggctacctcatggtgcgcggctataccagcgccgtgggatagtttgttcgatccatatactgcatacatcccaagtactcgctgtgttccgcacctggaggccttgcgttgcaactaccactcataataggcaattagagcgctgctgaccttactcttactggcattgcgtgcgaggctgttgctttcaagtgattcgatgactgtttcctgcctggaacaccgcgttcaaggggagttacatccacaattaccatatatatatatatatgcatacactgcctaaaaggag

SEQ ID NO: 1997 - DNA, 6078 bp, DROSOPHILA
ctgaaaatggcctgaagcaaaggccaaatagttattaataatagtaaatccgataataatagtcgcgtgtttcgtattgcatgttaattatatagttcgccaagcagcgcatacaggcgattggcacattccgccagtcacaccgagccgcgcacacggctggcaggccagttaaatgaacattattccttacttttctgtccactgcactccacacgtatttgcgtagcttttaaagtagctaaattcgtggatttcaacgcacttggcgcgtcttagtcaaagtggcccagttaagcagtccaattggaaaactgtgaaaatgatgtaaaggaaaactctcaagtagtccaactgtgtgtgcgtgtgtgtgtgtgtgcgtgcggtgagtgttggtgtgtggaaattaacgtagtgtgaagaagaaaagcgaaggaaaagcgacaattgcagtccaaggcgaacagcaaaagcaactgaaggttgcccacgcccccttcgtccccgcgcccccttggaggacaactaacgggagtgcaaggaaacggcgccgccatggaggaaaagcgcatcgccgactactttgtggtggccggaatgccggagaatccgcagctgctgcaggagaacagcttcaatgactcgggaagattgagagcggccaccaccatcgaaccgatcacggacatcggcgtctatttcccgctgctgggcgaggaggtgcccgagggatacgagatcctctcgcacacgcccacgggtctacaggcgaacctcaatcacggatcggtccgcaccaccgactgctacatctacttccggcgtggcaaggatcgcccgccgctggtggacataggagtcctgtacgatggccacgagcggatcatgtcggatgcggaaatcgttgcggagacgcctggcggcagggtggccaatgtgaacaactcgtccgcgaagacgttcctcacgtaccgacgcgcccgagcggacatgccctgcaacgagctggtggtcaccgaactgtgcgtcattgtccagagcaagggtgagcgggctccgcacgccttttgcctaatctacaagaccctgaacaagggctatgttggcagcgacgtctacctgtgctacaagaagtccatgtaccggcctaagcacatcagctacaagccggagatcctgctgcgctaccccaccttcgaccacaccgacttcccgctgaatctgtgcccgagcgtgccgctcttctgcctgccaatgggcgcctccctggaggcctggccacacgtcaacggcacggagaagcggaaacccatcagtccggtgttcagcacttttgtgctcaccgtgagcgatggcacctacaaggtttacggatcggcgttaactttctacgaggattacgatgagtcaaagttgtcggctgagcagaaggagctgctcggttgggacgaggagttcggcgcccagcactcgctgcacatgatcaaggctatatgtctgctgtcgcatcatccctttggcgacaccttcgacaaatggctgaagtaccttcatcgaatggttctgtatgacgttaatatacccattcccgtggagcgctacatcacccagctgctggacgaagtaccgtttccggcgcccagcattcacctgcagctgtccagcgagtccaacgatcgcatactgctcacacagccggaagattccccgctgccgcgaagtggcgccggtttccacatactgctccagaacctgggcaccgacaactgtctgcatgtgctgctgctggccctcaccgaacagaagatactcatccactcactcagacctgccacgttgactgctgtggccgaagccattgtctccctgctgtttccgttcaagtggcagtgtccgtacatcccactttgtccgctgggcttggcggaggtgctccatgccccattgccttatctcattggcgtggactcgcgcttcttcgatttgtacgagccgcccacggatgtcacctgcatcgatttggacaccaacaacattagcctatgtgagtcgcagcgtcacttgtcacccaagctgctgccgaaacgggcagcccgcctacttcgccagacgctcaccgaactggagaatgccaagcccattagctatgactccacaaacagtttggatcgcgatattcgaaagcggaaacgagaactggtgctggagcagcgcatccaggaggcctttctgctcttcatggccagcattctgcgcggctacagagactttctggtgcccatatccaaggcaccatcggtgggagccaccgatccaagtgccctcttccagctgaaggcttttttgcgatcgcgtgataagtcgcaccagaagttcttcgagctgatgatgaagacccagatgttcatccgtttcattgaggagcgttcctttgtctccgatggcgatcatggtctcagcttcttcgacgagtgtgcggagaaggtgggcaactacgatgaaacgcccgcccagctgcatttggtggactgggacacggggcagaacagcgagcgcaccaagtacatctttccgccggacagcgtaactccggcgggatctcagcctggcggcggaggaggaggattagcctacaactacgagaactttacgctgcaaccggaactgttgcagagcacgaagaagacggctttatcgaaatttctgcagctgcagctgaacgcttccctctcgccaggatcacccattgcccggcgaaccaaacacgagattaagctgtcccagaagatggccagccgttgtcagcagcatccggaggcgtggtccaaatacttgttggccacctgttactcgctgtacttcctcatcctgccatccatggtcttggatccgcggcacgccggcaaggagccagagatactgcgcgccgcctacgatgtcctcgtgcgagccagtcgtctaaagatcacctgtgacgagttctgctacaggatcatgatgcagctatgcggtattcacaatctgcctgtgctggccgtccgtctgcactacctgatgaaacgctctggcgtgcaggccaatgcgctcacctatggcttctacaaccgctgcgtccttgagtcgcagtggccccaggacagtaccacgatcagccagatccgctggaatcgcattaagaacgtggtgttgggagcggcgcagttccgcaaggctggcaaacaaagggccgcctccaaggtgaacaagtcgctcagtgcgtcccaggaccagaacctcagcaccctggaaacggtggacggacagtcgcgcaccagtttggcttcctcctccggcgatggcggtggccatggactgctcgattttgccgccttcgatcggctcaggaacaagttgggcagcattgtgcggcagacggtgacgggcggcaataacgagacaatgggcgatgcggtcaacaacactgggttgctcatacccggcgaactcagcgccccgaatacgccgacctatggcggtgacaccgaaatcctggccaaggcacttcagcaacagcagccacgcaaacagatcatgagcattggcggcggcgatgacgatgatgaggatgaggacgaagatgaatacacggccggatcgccgagcacgccgcaaaagcaactggaagcgggcgccgatgacctggaatacgccggtggaggagactacgaggcggacgaggaggacgaagatgaagtcgacgagcatgtggccgcacagcgggcacgtcagcgagtgcagagtccaaccaaaatctcgccacgcacgcccgtgacccaaaacgatccactgggtgctctcaacgaggaggagtccgccgccagtgccacgcccacgcaggagacgcagcaggagcagcagcactcacagtcgcagatcgacagcagcatatacagcgacaagccgatcctgttccggggccagaggagcgccactttcgacgagtcgacgcagatcgggaagagtatgcaccgttcggaaacgatgccggtggccagcagcggtgtgaccaacagcctggccaacatcggatcctcgctgaagttcacgttcggtcccagcttgacgggcaagaagtcgaacgagttgatccagggcagtctgagcagcatcaaatcggcggccaattcgctgaccaaaaagttcgacgagatcaaaggcgtgatatcggccaattcaacgccgacgaaaacgaacaatggacaccatccgcatggcctgcatcatggtcaccatcatccgcaccaccaccatcatcatcattcgcagcacggcaatgcggagcaggaggagcacgatgccgccgtccacgaggagggcaagctgcgtcgcgtctcaagcgacctggatccatggggcaggctcagcgagtcgcgtaaatccagctacaataacctcgtgccgctcggcgagaacagctccaccggcgcccttcacatgcacgcctttcccgctgtgcccgacaacctctatagtctaacaagcgagaacgccgcggatcgtgactgcgatgtgctgatccagctgacgacctgctcgcagtgccacaattgctcggtgctcgtctacgacgaggagatcatgagcggctggacggcggaggactctaacctgaacaccacctgccatgcctgcaacaagctcacggtgcctttcctcagcgtacagatcgaacggcaggtggaggagtcggaacagtcggatccgctgcaggacggcaaggagcaaatagccaacggcaatagccacaagaccagcctgaccgtgccgtatctaaatccgctggtgctgcgcaaggagctggagaacatactcacgcaggagggcgacattgcgctgataaaaccggaatttgtcgatgagcacccgatcatctattggaacttgctctggctgatggagcgcatcgagagcaagacgcacctgcccgagctctgtctgcccgtgccgagcgacaaggagcacatcgatccgctgagcaaggtgaagacggtgcacatccagtgcctgtgggacaatctgagcctgcatacggaggccagtggtccacccatgtacttgctgtacagggagacccagccgacgagtccgctcatcaaggcgctgctcaccgatcaggcgcagctcaacaagaatgtcattcagcaaatcatttcggccatccggtgcaatgacttcgccactcctctcaagcgcttggccaatgagcgacacaagctgaagagcaacggcgtggagcgatcgcactcgttctatcgcgacatactcttcctggccctgaccgccatcggtaggtccaacgtggacctggccacattccatcgcgagtatgcagccgtgttcgacaagctgacggagcgggagtgcaacatgtactatcgcaatcaggatctgccgccctcggcatcgacgatcttctgtcgtgcttacttccgcccgcttctgctgccctgacgcagtggctcccagctggaggcaggagcagcttcaagcgatgccgaagtggacacatgagtggagcagccgaagcctaaaagacaagacgaccaaataacttgataacaaaatggaaacgaagggagagtttgacgacaacgaaacgcttatcacacaccttaggctgggtcgattttatagatgggacaagtatgaattaattttacttagatatcagagctcttatttacgttacggaaaagaaaaggacggtattttggaactattcctagtaggctataaaaatgtaattgttttaaacgaaaaaaaaaaaatacttgattcgaagtgttcttaggttttcaaactaatagttttttcccaagcgaggaagccttctgggcaaacttctttagaattgtcctcaatttacttgtacttgtacacaagccagaatatttaaattcttaaacgaactttcctaagtgaaagccccaacttgacatgtgttgcattgtgaaaacatgcaaatgattttgtaaatgacttgatcttaacatttaagtacttaacgatttttcgctgtttaaaactaatcaaaaatat

SEQ ID NO: 1998 - protein, 1534 aa, DROSOPHILA
MSDAEIVAETPGGRVANVNNSSAKTFLTYRRARADMPCNELVVTELCVIVQSKGERAPHAFCLIYKTLNKGYVGSDVYLCYKKSMYRPKHISYKPEILLRYPTFDHTDFPLNLCPSVPLFCLPMGASLEAWPHVNGTEKRKPISPVFSTFVLTVSDGTYKVYGSALTFYEDYDESKLSAEQKELLGWDEEFGAQHSLHMIKAICLLSHHPFGDTFDKWLKYLHRMVLYDVNIPIPVERYITQLLDEVPFPAPSIHLQLSSESNDRILLTQPEDSPLPRSGAGFHILLQNLGTDNCLHVLLLALTEQKILIHSLRPATLTAVAEAIVSLLFPFKWQCPYIPLCPLGLAEVLHAPLPYLIGVDSRFFDLYEPPTDVTCIDLDTNNISLCESQRHLSPKLLPKRAARLLRQTLTELENAKPISYDSTNSLDRDIRKRKRELVLEQRIQEAFLLFMASILRGYRDFLVPISKAPSVGATDPSALFQLKAFLRSRDKSHQKFFELMMKTQMFIRFIEERSFVSDGDHGLSFFDECAEKVGNYDETPAQLHLVDWDTGQNSERTKYIFPPDSVTPAGSQPGGGGGGLAYNYENFTLQPELLQSTKKTALSKFLQLQLNASLSPGSPIARRTKHEIKLSQKMASRCQQHPEAWSKYLLATCYSLYFLILPSMVLDPRHAGKEPEILRAAYDVLVRASRLKITCDEFCYRIMMQLCGIHNLPVLAVRLHYLMKRSGVQANALTYGFYNRCVLESQWPQDSTTISQIRWNRIKNVVLGAAQFRKAGKQRAASKVNKSLSASQDQNLSTLETVDGQSRTSLASSSGDGGGHGLLDFAAFDRLRNKLGSIVRQTVTGGNNETMGDAVNNTGLLIPGELSAPNTPTYGGDTEILAKALQQQQPRKQIMSIGGGDDDDEDEDEDEYTAGSPSTPQKQLEAGADDLEYAGGGDYEADEEDEDEVDEHVAAQRARQRVQSPTKISPRTPVTQNDPLGALNEEESAASATPTQETQQEQQHSQSQIDSSIYSDKPILFRGQRSATFDESTQIGKSMHRSETMPVASSGVTNSLANIGSSLKFTFGPSLTGKKSNELIQGSLSSIKSAANSLTKKFDEIKGVISANSTPTKTNNGHHPHGLHHGHHHPHHHHHHHSQHGNAEQEEHDAAVHEEGKLRRVSSDLDPWGRLSESRKSSYNNLVPLGENSSTGALHMHAFPAVPDNLYSLTSENAADRDCDVLIQLTTCSQCHNCSVLVYDEEIMSGWTAEDSNLNTTCHACNKLTVPFLSVQIERQVEESEQSDPLQDGKEQIANGNSHKTSLTVPYLNPLVLRKELENILTQEGDIALIKPEFVDEHPIIYWNLLWLMERIESKTHLPELCLPVPSDKEHIDPLSKVKTVHIQCLWDNLSLHTEASGPPMYLLYRETQPTSPLIKALLTDQAQLNKNVIQQIISAIRCNDFATPLKRLANERHKLKSNGVERSHSFYRDILFLALTAIGRSNVDLATFHREYAAVFDKLTERECNMYYRNQDLPPSASTIFCRAYFRPLLLP

SEQ ID NO: 1999 - DNA, 4540 bp, DROSOPHILA
tgcgttttatcagtgcaattacgcacacccagctgccgacaggacaaagcaccgaatgtcctggccagcagacatcttcattaaggtggcagccatgtaggtgttctgcggatatagtatatatccgtatatattactgtttaatttattgctcctatagacgtacacgcctttcaaatacttcgctccgcttgtcttttgacaacattctgctcatccgcacagcaggcagccagggtatccccttgtttgccttctacaaattactttaatactttgcgccccatgttacgcggaagtgcctcccagcacacacatttcgtggaactttttctttcaatcataaaatcagaactttccaccctttatggcataatcagtgcgagtatgccagcacacacgacggctgcgaaagggggccaaagtggaatgggtggagccagtgcctccggctgcaattgtcttgtcttttatagttccgccagttgccggcactcaccagagatgccaggacaacacaaaaaagtactcttgagatacaggaagctcggtagaaagtttaccattttggcataaaatcgatagtgggaaaagtacgggtctctctccataagtcgaatggattttgtgagataatagagcttttagggaattaatctctgatatctgagattagtttcaaaacaaataaggcgtagtgaaataattttacaaatattacacactaataataagtttttgcacactctcgcttttgctttagtggcctcacttacgaacgttcttttcagtcatgtcatatctggggatattgcgcacggaggtcttatgatcgccccagggcaactccaactgccatttaatttggcacttaagcccggggcagggactgatttttattataaaagggttgtgctgtagtcgcagcagatcccgtgacctcgtaaagcgactgagtcggcggcattaaatggtatatagttttattgctaattcaatgctaaccgaagatattgtcatagattttgtgccagatactgctgcgccggaagagggcgttggcgttgccctcctgaacgaacagttggtaccgcttgagggtctgcgggtcgctgggtccccagttgggcagtggctcaaaggctttgcggatgcgggcccagagacccaagtgcgagggctgcttccgcacggcgggaatggcccagaagagcacctgacccacgccaaaggcactgaggcaccaaccgaaaactaaaaaaagtaacgattttattagccatgatattgtgattctggggttaatccctcttgcttaccgtaaacacccgattggtaggtgtaatccttgtacttgaggggctcgtacagaaccaaggtgtagatgagaatggtgagcattagcagaggagtgacgaccgcccagcagatgcgatagtacagcgaagtcttgatgccaatcatgaactccacgtcacggcagagtcgcttcacaccgtagatccaggcaatggtcaccagctcgaagatggccagcaccagggccacgaacgtgacgccaaagtagtcgaccaggttgagcaggaactggccaccgggtgtgatgtacagaaggcccagaaagtagcctacaatggctataccaaccaccacagtccagttcttcaggtgtccgaactgatccttgatcacggtggacatgcaggaggccatgcccacattgctgccgatgcccaggacgaagagcatgaggaagaacagcacggagaatagctgcggcagccacttaaacttggcaatggcgtccgggtaagatatgaaagccaggcccggacctccattgaccacactagcgatgtcggtggtgttgttctcgtacgccaggttgcccagaatcccgaagataatcacaccggacagtagggaggtgaaggtgtccagcgtggtcacgatattggcatccctgaggagcaggaactcaggtaaggaactccaaaccggatatctccactcacctgtaaatgttgtggccgaagcggttgtacgaggcgtacatgatgatgttcccgaagcagatggccagtgagaagaacacctgggtgacggcggcgtaccagacctgcggttccaggagcttgtgccattgcggccgcaggaagtacagcacgccgtcgaaggcgcccggcaaggtgagtgcccgcaccaggagcaccagcatcaccacgtagggaaagagggcgaggaagtaggaggccttgcccgaactcttcacacccttgaacataatccccgcgatgacgatccaggccacagccagtgccagcgccaggctccagctgggatatccgatgccatcatcgatgctcgccttctcgcgcagaatgatgttcctgtggggaaatgaatgagtaccgcatcctgtccacctgctggctacccactcacgtgaaatagaactccgccgaggtggttcgcactcccgaccctgccaaactggtggctctgctggcctcctgcggtcccgagtccaggcattctgtaccccactcctcgcggcagtagctccacggcaaggtcgggtagaaggagtccacgaagtagcgtagggtgagcgccattaacgtggcgtagtaggtggtaacgatgcccgtggccaggacttgtccatatccaatgcctgtgttggttggagatattgattgagttttgatatattatggcaaatatttcggaatcttaaatggaagtacaaatataaagaagcaactaaataaccctcatctgtctgtaaatgtatcaaagttcatctccagaataactaccatattcaaatgctacttatgcaaggcattactataaactaacataaattaacggcgactttcggcctaacataagttacataattatctgtatctatattgtgaatactttgattaaaataactagttgatagaaactagttaagcagtgtcacgaaatctttttaattaggccgaaacttgatttacgatgtcagttatgcatcattagtgtaagattgaagagcgattaagttaccgcaaactaagccaactcacctctcatgatgggtgaaaagtcgtagaccttcacactgccgcgactcgagaactggccgagcagcatttccaagtagtacacgggcttgcccactagaatcaggacgatcaggtagggtatcacgaacgctcctcctccgttctccagtgcggtaaagggaaacctccacacattgcccagacccacgctcagtgcgatgcaggacatgaggaactcgatgtcgttgttccaactatctcgctttttacccggctgaccagcctccactccagacgggctatctccatgtcctggtggtggagctgagcctgatccttcagagagcgtcttcttgccattggatgactcattgggcttgtatgcccctggtattgagatagttgaggcattcaatgaacccacatacgcctggttcatatatccgttgtcattgttgttgttattgattgtggtttccatgttgcagctgcaaatcaatcagaaatgtggttacactaaccttcaacttaaggcgccccaacttaaggttacgtccggttacgagcggtggtcaagttttaagccaccaattatggccattgacggacaacggacaccaatcacgatcgcttaccggctcagtgggacaaagacaaagacaacgacaaagacaacgacagaggcaagctggcaagtcactgacccactgacttagacgattacacattgcataacaatggagaggtggcgctgcagtcgacgccttgatgcagccaaaactgcatcgaactggtaactgcagccgggccgggccaaaacgttggcaatttggatgccaagccgcagggcgaaaccagtttccagttacagggaaaggtctccaagcgtttagctttttgccatttgggctccatttataacaccacctttgggcatcttgtttgctcatttgttaccgatgcgggacagccactttcccggtgtctcggatttcagattgatttattgcctcatatggaatatggcatttctcgggctgagtttgtcgcgggtcttgccaatctttctggcaacaaagctcgatgaaatcataactgctcaataaggcttctaacgcagctgcatttagtcgctattttttttagatttgcaattttgaaagtgaaaacaattaacgaaccacttgtgctatcctcttcctgattcaaaaccagttgccagccaagacattggccttgttatcgcagaaaccagttaacaagcatttacagacagtttttatgttcgattgatatggatattctgtgagtcacaggaacaactaggcacttttggacagaatgctgaatcagataagatctcgggaattccagacagtcgaaattaaaattaggaaccgaaatagctagggtattgcctcatcgactcttttgcgccgaaaccccggcttgtttaccttttggatgactctagattgtgc

SEQ ID NO: 2000 - DNA, 1956 bp, DROSOPHILA
atggaaaccacaatcaataacaacaacaatgacaacggatatatgaaccaggcgtatgtgggttcattgaatgcctcaactatctcaataccaggggcatacaagcccaatgagtcatccaatggcaagaagacgctctctgaaggatcaggctcagctccaccaccaggacatggagatagcccgtctggagtggaggctggtcagccgggtaaaaagcgagatagttggaacaacgacatcgagttcctcatgtcctgcatcgcactgagcgtgggtctgggcaatgtgtggaggtttccctttaccgcactggagaacggaggaggagcgttcgtgataccctacctgatcgtcctgattctagtgggcaagcccgtgtactacttggaaatgctgctcggccagttctcgagtcgcggcagtgtgaaggtctacgacttttcacccatcatgagaggcattggatatggacaagtcctggccacgggcatcgttaccacctactacgccacgttaatggcgctcaccctacgctacttcgtggactccttctacccgaccttgccgtggagctactgccgcgaggagtggggtacagaatgcctggactcgggaccgcaggaggccagcagagccaccagtttggcaggaggatgcggtactcattcatttccccacaggaacatcattctgcgcgagaaggcgagcatcgatgatggcatcggatatcccagctggagcctggcgctggcactggctgtggcctggatcgtcatcgcggggattatgttcaagggtgtgaagagttcgggcaaggcctcctacttcctcgccctctttccctacgtggtgatgctggtgctcctggtgcgggcactcaccttgccgggcgccttcgacggcgtgctgtacttcctgcggccgcaatggcacaagctcctggaaccgcaggtctggtacgccgccgtcacccaggtgttcttctcactggccatctgcttcgggaacatcatcatgtacgcctcgtacaaccgcttcggccacaacatttacagggatgccaatatcgtgaccacgctggacaccttcacctccctactgtccggtgtgattatcttcgggattctgggcaacctggcgtacgagaacaacaccaccgacatcgctagtgtggtcaatggaggtccgggcctggctttcatatcttacccggacgccattgccaagtttaagtggctgccgcagctattctccgtgctgttcttcctcatgctcttcgtcctgggcatcggcagcaatgtgggcatggcctcctgcatgtccaccgtgatcaaggatcagttcggacacctgaagaactggactgtggtggttggtatagccattgtaggctactttctgggccttctgtacatcacacccggtggccagttcctgctcaacctggtcgactactttggcgtcacgttcgtggccctggtgctggccatcttcgagctggtgaccattgcctggatctacggtgtgaagcgactctgccgtgacgtggagttcatgattggcatcaagacttcgctgtactatcgcatctgctgggcggtcgtcactcctctgctaatgctcaccattctcatctacaccttggttctgtacgagcccctcaagtacaaggattacacctaccaatcgggtgtttacgttttcggttggtgcctcagtgcctttggcgtgggtcaggtgctcttctgggccattcccgccgtgcggaagcagccctcgcacttgggtctctgggcccgcatccgcaaagcctttgagccactgcccaactggggacccagcgacccgcagaccctcaagcggtaccaactgttcgttcaggagggcaacgccaacgccctcttccggcgcagcagtatctggcacaaaatctatgacaatatcttcggttag

SEQ ID NO: 2001 - protein, 651 aa, DROSOPHILA
METTINNNNNDNGYMNQAYVGSLNASTISIPGAYKPNESSNGKKTLSEGSGSAPPPGHGDSPSGVEAGQPGKKRDSWNNDIEFLMSCIALSVGLGNVWRFPFTALENGGGAFVIPYLIVLILVGKPVYYLEMLLGQFSSRGSVKVYDFSPIMRGIGYGQVLATGIVTTYYATLMALTLRYFVDSFYPTLPWSYCREEWGTECLDSGPQEASRATSLAGGCGTHSFPHRNIILREKASIDDGIGYPSWSLALALAVAWIVIAGIMFKGVKSSGKASYFLALFPYVVMLVLLVRALTLPGAFDGVLYFLRPQWHKLLEPQVWYAAVTQVFFSLAICFGNIIMYASYNRFGHNIYRDANIVTTLDTFTSLLSGVIIFGILGNLAYENNTTDIASVVNGGPGLAFISYPDAIAKFKWLPQLFSVLFFLMLFVLGIGSNVGMASCMSTVIKDQFGHLKNWTVVVGIAIVGYFLGLLYITPGGQFLLNLVDYFGVTFVALVLAIFELVTIAWIYGVKRLCRDVEFMIGIKTSLYYRICWAVVTPLLMLTILIYTLVLYEPLKYKDYTYQSGVYVFGWCLSAFGVGQVLFWAIPAVRKQPSHLGLWARIRKAFEPLPNWGPSDPQTLKRYQLFVQEGNANALFRRSSIWHKIYDNIFG

SEQ ID NO: 2002 - DNA, 6138 bp, DROSOPHILA
aattgttcgatttacctatagagatagagatatagccccaggatccacctgtcgggcaactcgagtacaaaatgttttctcaacgcttgcagctacaaaggaaaaaagaggagaaaacataacaatgaacaataagcgaacaattgcagttcgattcgggggggtgctgtctcgaaatcgattataccttagactttctgaaactctacgtattgctgagaaccctcgggttatctcataaaattgaatcgtgacttcaatgagctcccccgaatgtcgttgaatacaggtgtatactcgtatataatataatatatctaattgttagccaaagcgataacataacattaacaacagttggccgcagtcgcagccgcacagcattgccatatatagacgatatctaatacaatatccatatatgtatgtgatccactcctggttctctcgaatatacaaaacgtataaatatgccactgcctgtatataatataatcggtatatccatgtatatccattgtataagtataaatagtttatcttttacgttgttcgatttccacttgatttactttcttgtgtgttttcaggtcactacaatttccttaattgtgttaaatttctttaagcgattcccagccgtttccaaaaaaaaaaaaaccattgcggattacgggaggcgtcccaaaaaaccacagcgagatcctcagctaattgcaatctctagggttattcatatgttatgcgttatttgttatctatgtatgtatgtatgtattgtatatatgttgtagggtatatgttagagggtatagagggtggtatgcatatgcttcgtggttggctatatacccctaagcgctttctaactgcgattctacgattctacgttctaggtgctaacaacttagtacgtcgcatgctcaatactgatccggcaactgaggtctccaggaactgacgatggcttactgatggctgacgatgtggccctccccgtctacttgttctcgatgatggtctgaagctgaaggaccaggctcctggacagctgcaggatcgactgggcgttgtggcgctccgccatttctgcaaggatcgtgaaaacacagaagtatcacaattagggctacatcttttacaaataggttaaagatatattaataaataatagagtagaatgtaacaaacaactgtatggctatatagttaactaagtaaaagcatatagtaataatatttcctgttactaattattacttgttcgaactaatctaatgttcttggaaaaaccattaccattgaagaacttgatgacatcggtgaagtccatgctgttcgagagaatgatgtcgcgataggtctccagcagggcaagggccaggaagagtacgaagtggccggaggcgatgtgcttggccgcccagatcacctcccaggtggcgaagacgtcgtcgtagacgagctccctcttgaagtccagcaggaaccatctgtagcagaagtagaagtgcgtgtagtcgccgttcgagtccatcagatcgtacatctccgagtcgaggatctggatgagggacctgtgcgaagtgggttatttatttagttagtccgactgaaagtgcccgcactcaccctcatgttcgcaaagtgcatgtccatggccccgccgctgggaaagttctcgatcatgcgctccatgagcttgcagaagcagctgtagctgagcgattcgtcgtcgaagatgaccaggaggggagccaccaggtcgcacatgccctgcatgtagcccacgtccaggtgctcccacacgtacgtggagatcacgttgcgcagcttgtccaggttctcgttggcgaagtaccagtaattcctgtcgcacctctgcacatccttctcgatccgatgcagattcagaccaaactgctccagcagctccacgctgtagacacctccgttcgagctagctggcgagacgcaggcggacttgggttcctgcagagcatccagggaggctaccaccgtgatgtcctcgttgaggggcgacatcagactggtcttccttgaagtaaactcctcggtgggatcgtcgtccagggcgtccagcgaagccgcctccgttattatgaccgcagtggccggctgggatgattcctcctcatcctggttatccagcctcacgtcgtcggcgctgtggaacttgcttagctgcccagggggttcctcctcctccagcttggcctctgccatgtcgagaaactcgttgccaaccgtctcatagctgctcgtcgacggggagctcttgatgctcagcatcagtatatttccgctgctgtccagtcctagtccaagatcgttttcggtctcggaatcggcgaagcagttctcctgcagacgcaggggttccatattgtctatgttttggaactccaaaacaagtttctcgctgagtcgtggcatttcgcgttgatcatggtcctcctgatcctcctcatcctcctgcttttcaaagacctcctcctcgaggttactttgctcctgctcctcagcctcttggcccaattccggctcatcaaacagatcccctggatcggaaatgtccgaaaagtcattgtcatcgaacacatcattctcgccctcgtccaggacaagattctcctgatcttcctcgccgttcccatgctcaagttgcaactgttggctgccgttggcgagtttctggtggggattcgaggagctagtggcattggccgctaggcgcgcctgctcagcactcaatttggccacggccagggccgtcttctccttttcccgctgacgcacgatggcctccacagctagccactcgctcatcgtcgtctcatagtagtgcttgcaggtctcgtcctgcttctttcgctcctccggcgtggatccgaagtcgtaatgccccaaaaggtagggccacacctccttgcgcagctccggctccacgccgccgaagtaaacgagtcgatagagctccagatcgccggtgaccaccccgtcctcatgcatcgccagccactttccacgggtcagaccctcctcgtccgcggccactggagagggatgatacaacattttagtttaaaatacgcaattaatatagtccggaattattttatatttcgatttcgaaatatctaacttaaacggaaaccacaactcacaatctggcatgatgcgaccgttgaccagcccggacaagtgagtgcgaactgtggagaggtggcgacagtaggccagccagccgtagaaggccctagagatgatctgccggcgcatggtggagcataccagctcgatgctggtgctctggctggcctggatcagcggcgtttcacagctgctctggtcgatggagagactcttgctggaacagtcgctgctgccggtggtggagcagctgccgaggtgcttccgccgcggactcgatcgccccagctccaggatggggtggctggccactggaaagtacagcacagaattacattgggggaccaagcgcaatcgaaagtatgaaacaattcttacagaactcctcgtgctggcacttgctgacgacacggaacacatagtcgattggcgtctcgtcggtcacggagcctccggcctccatcacggagggcaggatgtgtcgccttacgctcttgggccacgggaacagctttccaatgccgcgctgcgaccagagcggcggatccagctgaccatgtggcaggagacccgtttccaggcagctgaggaaagcctgaaggtgtccaccttcgggaaagtgaatgggcggccgctggacgccatcctgacccaccaggatgatggtgccgccggtgtcgccgccgcgattctggtgacagtgcacatagacaatctcgtccacgttgatgttcagggcgtagctccagtagaagctcttgtcgccgccgtcgccgtcattgtagccattcattagctggttgggcgtccacttgatcgtcagggactggatgctctggtgcaggctgaggtatcccggcatcggctcggacacgtccttaggcagcaccagtacgttgttcttgccgtagagcagcgtggtccgcgagttttggtgcagcgattccacgtagtccttggccacgctcgccggcgagcaggccttaaaggagccactgctcgtgtcctccgaactggtgtgcaggctgcgcttgaagttgatgatcggccggtgggtggtgggtggcgtccggttgcccgagctgatcctgtggcgctgcacctgcgattcggggatgacaaagaaataaatagtgatttttaggtatccacttttaattctaatacaaaaaaattaacattcaaaaggcaaaactgcatcctagccattgaataacgcatatggtcgatcaaacaaggtttgtgctatgttattttatactcttatactttcgggatgagcacactcaccagctcatcggcacagggatcggaccagtagtggtcggcagtcttggcccgggtgaactcaagggcacaaggacccaccagcagggagctcagaatggaaccgtagtcgggatcggcgaccagcgcctcacgatcgtagtaactgtttgcgttgctgaccaggtgttcgatgatcttggccagccgtttctcgtgcagggccagccggatccacagatacttgcccagcggtgcactggctccgcctccgccaccgggacccgctcctgctccattggtgaccgtgttgatggtggtcaccgagttgctgctcccgctgcccttgctcaggagcttgggcttgatgatgctgtcgctgctgcaggaggatcgcttgccgctcaccgcgtgcgactcctgcgcgagttccagctcgaggagccggcggctcacgtagtccgcctccgggcagatcttagctatcttctggatcagcgccgtcgtcgatgaggtcttgaacagacccagagcccttctgcgcagaccgtgactcaggcaggcctccacggcgccgcataacgaggtgaccgagctgctctcctcgtggacgtacttcttggtcaccgcctcctccatcagctgcttcacctccttcttcacgctggctatcagccgctcctttagttcggtttccgctaaagaatagataacaaggaaaaccgtaggtaaattttgatatattgtatagtagttaggaaagtacattcgaaaagttatatcctagttaagatttcaaacaataaattgttcaaaaactaataaatgtgaaaccaatttaatttaaataaagtctaaacgaacgaagtcgggacgcaaagggttgccaaagaagagcgtcattttgtccaccaaatgggaaattacttatttgccttcgtgcggttattgataatcccaggacctcccctaacgaccgacatgacacttccactcccactttgtatttccccaaagagcactcgtaacggaggcccgataaatgtgctttgattgattgtacatgccgccatggaaccatcccagtccttggcattagcctacccagttttcacatgccccaccactcaggacccagtacccagtactcagtgcccagtgcccagtgtccgatgtccgatgtccaatgtcctgcccccatctcgtctgggattgcgtttgcttttggagtctaccgaccgacgtcaatcattttgtcatcgctgtcaatttttgtttcgtttgcttctgtgcacaaaatcgtccctatgcttcactgctcccatataccagcatttattagtacatatgtaaatatatggacgaacacagtgcgtatgcgtaatttattaactgttcgttcgatcaattaaatggaaagaaacaaattgttattttacatattttagacgttaatataaaatctgtttgatgagttgaagtattctataaactaaatatgatcgcttttattaaatgaatgtatagaagaacacagtgcgtatgcgttatttttcaatcaatttcatggtaggtgggaaattattgattttaaatattacgaagcagtgtaacgcctggttgaatataatattgaatgactaaaatgaatcatggttagtacatatatttcttactgaagacactgtgtatgcgtaa

SEQ ID NO: 2003 - DNA, 3167 bp, DROSOPHILA
cggaaaccgaactaaaggagcggctgatagccagcgtgaagaaggaggtgaagcagctgatggaggaggcggtgaccaagaagtacgtccacgaggagagcagctcggtcacctcgttatgcggcgccgtggaggcctgcctgagtcacggtctgcgcagaagggctctgggtctgttcaagacctcatcgacgacggcgctgatccagaagatagctaagatctgcccggaggcggactacgtgagccgccggctcctcgagctggaactcgcgcaggagtcgcacgcggtgagcggcaagcgatcctcctgcagcagcgacagcatcatcaagcccaagctcctgagcaagggcagcgggagcagcaactcggtgaccaccatcaacacggtcaccaatggagcaggagcgggtcccggtggcggaggcggagccagtgcaccgctgggcaagtatctgtggatccggctggccctgcacgagaaacggctggccaagatcatcgaacacctggtcagcaacgcaaacagttactacgatcgtgaggcgctggtcgccgatcccgactacggttccattctgagctccctgctggtgggtccttgtgcccttgagttcacccgggccaagactgccgaccactactggtccgatccctgtgccgatgagctggtgcagcgccacaggatcagctcgggcaaccggacgccacccaccacccaccggccgatcatcaacttcaagcgcagcctgcacaccagttcggaggacacgagcagtggctcctttaaggcctgctcgccggcgagcgtggccaaggactacgtggaatcgctgcaccaaaactcgcggaccacgctgctctacggcaagaacaacgtactggtgctgcctaaggacgtgtccgagccgatgccgggatacctcagcctgcaccagagcatccagtccctgacgatcaagtggacgcccaaccagctaatgaatggctacaatgacggcgacggcggcgacaagagcttctactggagctacgccctgaacatcaacgtggacgagattgtctatgtgcactgtcaccagaatcgcggcggcgacaccggcggcaccatcatcctggtgggtcaggatggcgtccagcggccgcccattcactttcccgaaggtggacaccttcaggctttcctcagctgcctggaaacgggtctcctgccacatggtcagctggatccgccgctctggtcgcagcgcggcattggaaagctgttcccgtggcccaagagcgtaaggcgacacatcctgccctccgtgatggaggccggaggctccgtgaccgacgagacgccaatcgactatgtgttccgtgtcgtcagcaagtgccagcacgaggagttcttggccagccaccccatcctggagctggggcgatcgagtccgcggcggaagcacctcggcagctgctccaccaccggcagcagcgactgttccagcaagagtctctccatcgaccagagcagctgtgaaacgccgctgatccaggccagccagagcaccagcatcgagctggtatgctccaccatgcgccggcagatcatctctagggccttctacggctggctggcctactgtcgccacctctccacagttcgcactcacttgtccgggctggtcaacggtcgcatcatgccagatttggccgcggacgaggagggtctgacccgtggaaagtggctggcgatgcatgaggacggggtggtcaccggcgatctggagctctatcgactcgtttacttcggcggcgtggagccggagctgcgcaaggaggtgtggccctaccttttggggcattacgacttcggatccacgccggaggagcgaaagaagcaggacgagacctgcaagcactactatgagacgacgatgagcgagtggctagctgtggaggccatcgtgcgtcagcgggaaaaggagaagacggccctggccgtggccaaattgagtgctgagcaggcgcgcctagcggccaatgccactagctcctcgaatccccaccagaaactcgccaacggcagccaacagttgcaacttgagcatgggaacggcgaggaagatcaggagaatcttgtcctggacgagggcgagaatgatgtgttcgatgacaatgacttttcggacatttccgatccaggggatctgtttgatgagccggaattgggccaagaggctgaggagcaggagcaaaacaatatggaacccctgcgtctgcaggagaactgcttcgccgattccgagaccgaaaacgatcttggactaggactggacagcagcggaaatatactgatgctgagcatcaagagctccccgtcgacgagcagctatgagacggttggcaacgagtttctcgacatggcagaggccaagctggaggaggaggaaccccctgggcagctaagcaagttccacagcgccgacgacgtgaggctggataaccaggatgaggaggaatcatcccagccggccactgcgcgtggagctgctggagcagtttggtctgaatctgcatcggatcgagaaggatgtgcagaggtgcgacaggaattactggtacttcgccaacgagaacctggacaagctgcgcaacgtgatctccacgtacgtgtgggagcacctggacgtgggctacatgcagggcatgtgcgacctggtggctcccctcctggtcatcttcgacgacgaatcgctcagctacagctgcttctgcaagctcatggagcgcatgatcgagaactttcccagcggcggggccatggacatgcactttgcgaacatgaggatcctcgactcggagatgtacgatctgatggactcgaacggcgactacacgcacttctacttctgctacagatggttcctgctggacttcaagagggagctcgtctacgacgacgtcttcgccacctgggaggtgatctgggcggccaagcacatcgcctccggccacttcgtactcttcctggcccttgccctgctggagacctatcgcgacatcattctctcgaacagcatggacttcaccgatgtcatcaacgccacaacgcccagtcgatcctgcagctgtccaggagcctggtccttcagcttcagaccatcatcgagaacaagtag

SEQ ID NO: 2004 - protein, 1035 aa, DROSOPHILA
MEEAVTKKYVHEESSSVTSLCGAVEACLSHGLRRRALGLFKTSSTTALIQKIAKICPEADYVSRRLLELELAQESHAVSGKRSSCSSDSIIKPKLLSKGSGSSNSVTTINTVTNGAGAGPGGGGGASAPLGKYLWIRLALHEKRLAKIIEHLVSNANSYYDREALVADPDYGSILSSLLVGPCALEFTRAKTADHYWSDPCADELVQRHRISSGNRTPPTTHRPIINFKRSLHTSSEDTSSGSFKACSPASVAKDYVESLHQNSRTTLLYGKNNVLVLPKDVSEPMPGYLSLHQSIQSLTIKWTPNQLMNGYNDGDGGDKSFYWSYALNINVDEIVYVHCHQNRGGDTGGTIILVGQDGVQRPPIHFPEGGHLQAFLSCLETGLLPHGQLDPPLWSQRGIGKLFPWPKSVRRHILPSVMEAGGSVTDETPIDYVFRVVSKCQHEEFLASHPILELGRSSPRRKHLGSCSTTGSSDCSSKSLSIDQSSCETPLIQASQSTSIELVCSTMRRQIISRAFYGWLAYCRHLSTVRTHLSGLVNGRIMPDLAADEEGLTRGKWLAMHEDGVVTGDLELYRLVYFGGVEPELRKEVWPYLLGHYDFGSTPEERKKQDETCKHYYETTMSEWLAVEAIVRQREKEKTALAVAKLSAEQARLAANATSSSNPHQKLANGSQQLQLEHGNGEEDQENLVLDEGENDVFDDNDFSDISDPGDLFDEPELGQEAEEQEQNNMEPLRLQENCFADSETENDLGLGLDSSGNILMLSIKSSPSTSSYETVGNEFLDMAEAKLEEEEPPGQLSKFHSADDVRLDNQDEEESSQPATARGAAGAVWSESASDREGCAEVRQELLVLRQREPGQAAQRDLHVRVGAPGRGLHAGHVRPGGSPPGHLRRRIAQLQLLLQAHGAHDRELSQRRGHGHALCEHEDPRLGDVRSDGLERRLHALLLLLQMVPAGLQEGARLRRRLRHLGGDLGGQAHRLRPLRTLPGPCPAGDLSRHHSLEQHGLHRCHQRHNAQSILQLSRSLVLQLQTIIENK

SEQ ID NO: 2005 - DNA, 3207 bp, DROSOPHILA
atatatagggagtttagagagccaaatcactaattatacgagaaccgagttagtctgagaattgagaaatcgtggcacatcatccgaagcatcacaggatattcaggatattccgggcagcagcagaggaattaggcgagagacaaaaagaaacacgtgaaaacggcttccatagttaatgttatttccaaaagcataaatacaccactctaaactaaacaacaaaagcttgcacacgcccttacccctaaccccacccttatccacttgttcttttgatcgtattgtacatttataacaatcaatatttgtttatttattgcaaggaaatcgagaaagatacgtgtatgcgatgttgttaattttaagtagttgatagcaaatttgttaaactgaagagtaatgaaataaataagaaagggaaagggaagggaaaatcagaaaaagaattacaaaaataaaacaaaatcatgcaaaatcaaaaataaaaaatgtgttttctttgatctgccgtttgaatttggcgctccctttccgttctacagaacttcgtcgcttaacagattgctagtaagaacctgttagtgcgaatatgtgctgttaagcgcacaaataatgaatgaaagcagcttatgcttactagacatcagcgatttgatactctatttggatgaatattatgacattaagaaaaatgattagcacgataaagatttaaattaaatcgattctgagagattaatctattgaaaccaatagttttaatttatagacatacaaaataattattctatttgcatgaactactattttaggagtaatgtagcttagaagtcattacattggctttcaaaccaattgattacatttaactaattatctgtacgctcctctgcagtattgattacatatatgaacaaatgtactccgacatgtagggtaatagcactgcgctgttagctgcctctttgaggttatgtctctctgtcgacaaaaacagcaagttgacgtgaaacagaaacgcagcagtatttacgcaacgcaactggtaaggagtcgccgggaatccagatcgccttggctggaagaagcagaaaaccatatttaattcgaattcacacctcatttagcaaaaccgagtccatggccaccgccgcagctgtagcaaaagtcggaaaatcagtgcaccgcattttcgtgggcaatctaccgtggacagtgggccaccaggagttgcgtggctacttccgcgagttcggacgcgtggtgtccgccaacgtgatcttcgacaagcgaacggggtgctcgaagggctacggtttcgttagcttcaacagtttgaccgcgctggagaagatcgagaacgagcagaagcacatactggagggcaactacctaaacatacagaaatcttagattccccactttaattgtcatttagtttataagctcagcagattttttttttttttgacatgtcggacagcgatacggacaccgtggacgagcttttccaccttgccaccgagcatgtggccaagcagtcaaacagcattggttccgcggaccttttaatattttacggatactacaagcaggccacgaatggcccctgcaaggagcaaagtccgggtctgcttcaactgcaggccaagagcaagtggcaggcttggcgcaatctgggaacaatgtcccagtccgctgcccggcaggcctacgtccagaagctgcaggagcttcaacccaactggcggtcccggcgcaacccaggctgggtcgttcattccattgagtcggtcccactggaggaccaacgtttggacagtgaaaagaccctgtttgaccacgtgaaggagaacaatctagacaggctgagggaactgctgcagccaagtgacttggttaagctggacgagcatggcatggcgctcatccactgggctaccgatcgcaatgccgtcgaaatcatacagttcctggtgcggagtggggccagtgtaaatcagcgagatgcggagcaacagactccgctgcactacgccgccagttgtggacacttggaggcgctccaatgcctgttggagctacacgccagcctggagctacgcgattcagatggacagacttgttacgacgtggctgacgatgagcagatctgccaggtgcttcaaacggaacgggaacgactcgctggatccgcgtcctaatgtcaaaatcttaagttgttcggtgctcatttgctttaaaaacagcaaggtgttgtgaaccattgtaaatctccgacaagtcccctgtaagttctttggaactataataaacatacatacataaatgtaattttggaagtactttcctttcggatttttaggaatcattgagatcgaaaaaacataaaaaagaaagagatggataacctctctttttttgttctgatcaagcagccagttgaaaacactgcaatgtactttttacaaagctgctactgtaatctgataatctattcaattcttcagatatcattgaacgaaagttatctgtgaagatcataattgggttgtgcgtactgactaaggagtaaatccaatgacacaataatgcatttatgttactaactgatgtatttattgaaaataatataagggttcttttgcaatggccgatcaacgcctacttccacagcttcttgatagacatgttcttctccgagtccttctgcatcaccttggccacagccatctcgaagtcctcctgggtgacatggacgcgtcgttcgcgcagcgcatacatgccggcctccgtgcagacgcccttgacttccgcacctgatgcgcctggcattagctcggcgatcttgcgcagattaatgccacgcgtgaggttcatcttacgggagtggatcttcaagatgtccagacgcgcctcctcgtttggtggcgggaactcgatcttgcgatcaatacggccgggacgcagcagagcgggatccaggatgtcaatgcgattggtggccatgatcaccttgatgttcttggtggcctcaaagccgtccagctggttaagtagctccagcatagtacgctgcacctcggaatcgccgccggaacctgactcaatacgcgacgagccaatggaatcgatttcgtccatgaaaataattgatggtgcatgttcccgggccattacaaagagttctcgaaccatgcgcga

SEQ ID NO: 2006 - DNA, 940 bp, DROSOPHILA
caagttgacgtgaaacagaaacgcagcagtatttacgcaacgcaactgcaaaaccgagtccatggccaccgccgcagctgtagcaaaagtcggaaaatcagtgcaccgcattttcgtgggcaatctaccgtggacagtgggccaccaggagttgcgtggctacttccgcgagttcggacgcgtggtgtccgccaacgtgatcttcgacaagcgaacgggcgatacggacaccgtggacgagcttttccaccttgccaccgagcatgtggccaagcagtcaaacagcattggttccgcggaccttttaatattttacggatactacaagcaggccacgaatggcccctgcaaggagcaaagtccgggtctgcttcaactgcaggccaagagcaagtggcaggcttggcgcaatctgggaacaatgtcccagtccgctgcccggcaggcctacgtccagaagctgcaggagcttcaacccaactggcggtcccggcgcaacccaggctgggtcgttcattccattgagtcggtcccactggaggaccaacgtttggacagtgaaaagaccctgtttgaccacgtgaaggagaacaatctagacaggctgagggaactgctgcagccaagtgacttggttaagctggacgagcatggcatggcgctcatccactgggctaccgatcgcaatgccgtcgaaatcatacagttcctggtgcggagtggggccagtgtaaatcagcgagatgcggagcaacagactccgctgcactacgccgccagttgtggacacttggaggcgctccaatgcctgttggagctacacgccagcctggagctacgcgattcagatggacagacttgttacgacgtggctgacgatgagcagatctgccaggtgcttcaaacggaacgggaacgactcgctggatccgcgtcctaa

SEQ ID NO: 2007 - protein, 292 aa, DROSOPHILA
MATAAAVAKVGKSVHRIFVGNLPWTVGHQELRGYFREFGRVVSANVIFDKRTGDTDTVDELFHLATEHVAKQSNSIGSADLLIFYGYYKQATNGPCKEQSPGLLQLQAKSKWQAWRNLGTMSQSAARQAYVQKLQELQPNWRSRRNPGWVVHSIESVPLEDQRLDSEKTLFDHVKENNLDRLRELLQPSDLVKLDEHGMALIHWATDRNAVEIIQFLVRSGASVNQRDAEQQTPLHYAASCGHLEALQCLLELHASLELRDSDGQTCYDVADDEQICQVLQTERERLAGSAS

SEQ ID NO: 2008 - DNA, 4918 bp, DROSOPHILA
agtatgcgatgtaaattctaatcagagttagccctttttaatacaatactttacaataaacgaattctgccggttaatctgcacacaactcacacacacacacacacacatgtaaatttatgcgagtgtcagggttgcgcggcttcgcggtttgttttctttacgtttctgctttgatcgccacaattgttgatcgagaggaaacctgacgcacacatacgaaaaaactgaatagcgggttcttgcactttcgccggcacaaagtacacagtttttctcgtttaagttaaatttactatcactctttcggaccgtttcgctttgttactgtgttttcagcctatgctttgccgcttcttcggcgtatcgcgaacttgcgttgcaagtaagtgtgtgtgtggatgcgacgcttattaaatctgcaccggattgttcagctaaccgtgtcaaaatcatgtagaactcaacaattttgttttaatttttgagcttacctttgtaaaagaaataaaaagttcacttgaaaagacactgaacacgacaacttctttcggaaatataaaacgaacctacaagcgtacttaacttgtcgacttccactcacacaattattcggttagatggaaaatctcgacaacgattattcaatactatcgaatgagttgtaggattttctaacacatgtaaataccaaattttagcatatgatatgttttaaaacttaccggcatatacattcactgagatcacagattttattcaaacgaatgtcttaacatatatttatatatatatttatatttatctcaacacttaaatactaaaagacacgtttatcgaaattgccatttttggagacacctaacgggttttccatcgcacagtttcgttccatgtgctgtcatcgatagtccaacaacaaaatatcgcgtgcaatcatccctggcgacacaactggttgtacatatgtatatagcgacattacacacctacatatatacacctacatattgccagctctgcacgtgaaatccgagggcggctgttgtaatctgtgatcaaatcaagtgagtccaagcgctaaatgcaagtactataggccatacaatagcatctctttatccctatgtgttcacagacatgtccaaggccaagggtaagaagaaggagcgctttgatgacgacgaggagcagctggagaaagtgcaggagaagaagccaccgacaagcaagaagggtggtaagaagggaaagcgaggaggtggcggcggcgactccagcgacgaggatgtcacgaccaggaatcgggacaacgaggatctggagagcatagcctcatcgaatcagagcaaacagcagactgccggcaaaaagcaggccaagaagggtaaaaagggcaagaggaataatgactggagcgacgaggatgagaagccagagaagagtttgcctgccaacgacttggacgatgaagatgacgacgaggcgcctctggcatccaagccagctgctaaaaagccacagcccagcaaaaagaacaagaagaacaagaagaagaacgacgatttctcggacgaagataaaccggagctggacttggacgacctggacaatgaggaggatgaggtggaagtggttgctgtcaagccagcctccaagaagtccaagaagaagcagcaggctcagcaaaagaacatgttcgccatgagcgatgatgaggaggatgaggttgccgatgatctgccaaatgacagcgaagaggaggagaaggaacagctgtccaacaaggcggccaaggagtcaaaaaaggaacagcagaagcagcccgaaaaggaagtggaggagcagaaagtggagcaagtccttagcgaaaaagtggcggcagtaagtctcaaggaaaagacacctgagccggtacccaaggccgagcccgaacccgagtctgaaccccaacccgacgaggaagccgatgctgaggtagattccaagttcgaggagagcaaggaagccaaggagaagaaactcactcacaaggagaaaaagaagcaaaagaagcagcaggagtacgaacgccaaatggagctgatgacaaagaagggtggtgccggtcactcggacttggacaacaatttcaccatgtcgcaggtgcagaagagcgctggtcaaaaggcggctctggagcaagccgtggatatcaagatcgagaatttcaccatctcagccaagggtgagtcatcattgctataacttttcgttgtgcattatcaattttaaatccaaacatttttttttttttcaggtaacgatctatttgtgaacgccaacctattgattgcacatggacgccgttatggtttggtgggtcccaacgggcacggcaagaccaccctgctccggcatattgccacccgtgcctttgccataccgcccaatatcgatgtgctgctttgcgaacaggaagtcgtagctaccgataaaacggccatcaatacaatcttggaagctgatgtgcgtcgcacagagatgctaaagaaggccgatgaactggagaaacagtttgtcgctggcgatttgacggtgcaggaggagctaaacgataccttcgcggaactgaaagccattggagcctactcggcggaagccagggcacgaagaatccttgccggtttgggtttcagcaaagagatgcaggacaggccgacgaacaaattctccggaggctggcgcatgagagtgtccctagcaagagctctctatctggagcccacgttgcttatgctcgacgaaccgaccaatcatttggatcttaatgctgtcatttggctggacaactatctgcagggctggaagaagaccctgttgatcgtgtcccacgaccagagtttcttggacaacgtctgcaacgagatcatacatttggatcaaaagaaactgcaatactacaagggcaactattccatgttcaagaagatgtatgtgcagaaacgccgcgagatgatcaaggagtacgagaagcaggagaagcgcctgcgcgagctgaaggcccacggtcagtcgaagaaggcagcggaaaagaagcagaaggaatcgctcacacgcaagcaggagaagaacaagtctaagcagcagaaacaggacgaggatgagggacctcaggagctgttggccaggcccaaggaatatattgtcaagttccgcttcccggagccatcgcagctccagccacccattctgggtgtccacaatgtcaccttcgcctttccgagccagaaaccgctgttcatcaaggttgactttggcattgatctaactagtcgagtggccatcgtgggacccaatggtgtgggcaaatcaaccttcctcaagctgctgctcggtgaattggaaccgcaggagggtgagcagcgcaagaatcaccgacttcatgtgggccgcttcgatcagcactcaggtgaacatctcacggcagaggaatcggctgcagagtacctgcagcgtctgttcaatctgccccacgaaaaggcgcgtaaggcattgggttcctttggtttggtcagtcatgcacacaccatcaagatgaaggatctgtccggtggtcagaaagcccgtgtggccctcgctgagctatgcttgagtgcgccggatgtactaattctcgatgagcctacgaacaatctggacatcgagagtatcgacgccttggcggaggcaatcaacgagtacgagggtggcgtgatcatcgtctcccacgacgagcgtttgatccgtgaaacaggttgcactctctacgtaattgaggatcagacgatcaacgagattgttggagagttcgatgactacagaaaggaggttctcgattcgctcggcgaggtggtcaacaatcctagcgtggtggccaatgcggctgtgctgcaataaccctcaagttgcatacggacttggagtccatgcaactggtcatcactcgtcagctggctcgccctatgttaattgttcaactgttgaattgattatctgctagttagtctttttataccaacatatatacaataacaaattgtggaagtaaatgttattacacaagagcgtttaagaatgtgttgtttatgttattaaattgtgggtattaagtatttgttgtagaatatacgtggaactggttaaaacacccgtaaattgtactcgtaatatatgtagatagatgatttatatttaaagttaatgccagctctgagtgttctccaaaaaaatggaaaaaataacattagagtacataatattaattcttagatataattgtggacatcctagccgctgcgatagaaggccttgacattgttaatcaggtggctcaatccattatagccatccttatcgaagtcgatgttctcgccgccaaactcgatgacctgcaaatgaatagtgggcaaatggtttgggatcattgaaataaatgactccatggattgagtgcacccacctccttggccctgagggtgtccgcaccatggggcactccaatgacctcgacccaggccccttcggcggcgcccagctcacccggcagattgatctttagcttgtggttgtctgtggaactggccagcaaagtggatcccgcgacgctctccacgcgaaccattatgctcacggtttggccggaaaactgcttcagcatgccgccgttgataatcgagcgtggatcaaaggcatccataataactcctcagttaataacgttcaaaaaacagccaatttcagcagaaaatgaaatgccgtaaacaagaaagagcgccaatagttatcgagcgtgctaatcgataataaaattgcatgacgtctgctatcgaaattattcgaattttgtagcaaaaatatttatggatttattgtaacatcaaaagttattacattatta

SEQ ID NO: 2009 - DNA, 2775 bp, DROSOPHILA
cacctacatattgccagctctgcacgtgaaatccgagggcggctgttgtaatctgtgatcaaatcaaacatgtccaaggccaagggtaagaagaaggagcgctttgatgacgacgaggagcagctggagaaagtgcaggagaagaagccaccgacaagcaagaagggtggtaagaagggaaagcgaggaggtggcggcggcgactccagcgacgaggatgtcacgaccaggaatcgggacaacgaggatctggagagcatagcctcatcgaatcagagcaaacagcagactgccggcaaaaagcaggccaagaagggtaaaaagggcaagaggaataatgactggagcgacgaggatgagaagccagagaagagtttgcctgccaacgacttggacgatgaagatgacgacgaggcgcctctggcatccaagccagctgctaaaaagccacagcccagcaaaaagaacaagaagaacaagaagaagaacgacgatttctcggacgaagataaaccggagctggacttggacgacctggacaatgaggaggatgaggtggaagtggttgctgtcaagccagcctccaagaagtccaagaagaagcagcaggctcagcaaaagaacatgttcgccatgagcgatgatgaggaggatgaggttgccgatgatctgccaaatgacagcgaagaggaggagaaggaacagctgtccaacaaggcggccaaggagtcaaaaaaggaacagcagaagcagcccgaaaaggaagtggaggagcagaaagtggagcaagtccttagcgaaaaagtggcggcagtaagtctcaaggaaaagacacctgagccggtacccaaggccgagcccgaacccgagtctgaaccccaacccgacgaggaagccgatgctgaggtagattccaagttcgaggagagcaaggaagccaaggagaagaaactcactcacaaggagaaaaagaagcaaaagaagcagcaggagtacgaacgccaaatggagctgatgacaaagaagggtggtgccggtcactcggacttggacaacaatttcaccatgtcgcaggtgcagaagagcgctggtcaaaaggcggctctggagcaagccgtggatatcaagatcgagaatttcaccatctcagccaagggtaacgatctatttgtgaacgccaacctattgattgcacatggacgccgttatggtttggtgggtcccaacgggcacggcaagaccaccctgctccggcatattgccacccgtgcctttgccataccgcccaatatcgatgtgctgctttgcgaacaggaagtcgtagctaccgataaaacggccatcaatacaatcttggaagctgatgtgcgtcgcacagagatgctaaagaaggccgatgaactggagaaacagtttgtcgctggcgatttgacggtgcaggaggagctaaacgataccttcgcggaactgaaagccattggagcctactcggcggaagccagggcacgaagaatccttgccggtttgggtttcagcaaagagatgcaggacaggccgacgaacaaattctccggaggctggcgcatgagagtgtccctagcaagagctctctatctggagcccacgttgcttatgctcgacgaaccgaccaatcatttggatcttaatgctgtcatttggctggacaactatctgcagggctggaagaagaccctgttgatcgtgtcccacgaccagagtttcttggacaacgtctgcaacgagatcatacatttggatcaaaagaaactgcaatactacaagggcaactattccatgttcaagaagatgtatgtgcagaaacgccgcgagatgatcaaggagtacgagaagcaggagaagcgcctgcgcgagctgaaggcccacggtcagtcgaagaaggcagcggaaaagaagcagaaggaatcgctcacacgcaagcaggagaagaacaagtctaagcagcagaaacaggacgaggatgagggacctcaggagctgttggccaggcccaaggaatatattgtcaagttccgcttcccggagccatcgcagctccagccacccattctgggtgtccacaatgtcaccttcgcctttccgagccagaaaccgctgttcatcaaggttgactttggcattgatctaactagtcgagtggccatcgtgggacccaatggtgtgggcaaatcaaccttcctcaagctgctgctcggtgaattggaaccgcaggagggtgagcagcgcaagaatcaccgacttcatgtgggccgcttcgatcagcactcaggtgaacatctcacggcagaggaatcggctgcagagtacctgcagcgtctgttcaatctgccccacgaaaaggcgcgtaaggcattgggttcctttggtttggtcagtcatgcacacaccatcaagatgaaggatctgtccggtggtcagaaagcccgtgtggccctcgctgagctatgcttgagtgcgccggatgtactaattctcgatgagcctacgaacaatctggacatcgagagtatcgacgccttggcggaggcaatcaacgagtacgagggtggcgtgatcatcgtctcccacgacgagcgtttgatccgtgaaacaggttgcactctctacgtaattgaggatcagacgatcaacgagattgttggagagttcgatgactacagaaaggaggttctcgattcgctcggcgaggtggtcaacaatcctagcgtggtggccaatgcggctgtgctgcaataa

SEQ ID NO: 2010 - protein, 901 aa, DROSOPHILA
MSKAKGKKKERFDDDEEQLEKVQEKKPPTSKKGGKKGKRGGGGGDSSDEDVTTRNRDNEDLESIASSNQSKQQTAGKKQAKKGKKGKRNNDWSDEDEKPEKSLPANDLDDEDDDEAPLASKPAAKKPQPSKKNKKNKKKNDDFSDEDKPELDLDDLDNEEDEVEVVAVKPASKKSKKKQQAQQKNMFAMSDDEEDEVADDLPNDSEEEEKEQLSNKAAKESKKEQQKQPEKEVEEQKVEQVLSEKVAAVSLKEKTPEPVPKAEPEPESEPQPDEEADAEVDSKFEESKEAKEKKLTHKEKKKQKKQQEYERQMELMTKKGGAGHSDLDNNFTMSQVQKSAGQKAALEQAVDIKIENFTISAKGNDLFVNANLLIAHGRRYGLVGPNGHGKTTLLRHIATRAFAIPPNIDVLLCEQEVVATDKTAINTILEADVRRTEMLKKADELEKQFVAGDLTVQEELNDTFAELKAIGAYSAEARARRILAGLGFSKEMQDRPTNKFSGGWRMRVSLARALYLEPTLLMLDEPTNHLDLNAVIWLDNYLQGWKKTLLIVSHDQSFLDNVCNEIIHLDQKKLQYYKGNYSMFKKMYVQKRREMIKEYEKQEKRLRELKAHGQSKKAAEKKQKESLTRKQEKNKSKQQKQDEDEGPQELLARPKEYIVKFRFPEPSQLQPPILGVHNVTFAFPSQKPLFIKVDFGIDLTSRVAIVGPNGVGKSTFLKLLLGELEPQEGEQRKNHRLHVGRFDQHSGEHLTAEESAAEYLQRLFNLPHEKARKALGSFGLVSHAHTIKMKDLSGGQKARVALAELCLSAPDVLILDEPTNNLDIESIDALAEAINEYEGGVIIVSHDERLIRETGCTLYVIEDQTINEIVGEFDDYRKEVLDSLGEVVNNPSVVANAAVLQ

SEQ ID NO: 2011 - DNA, 12741 bp, DROSOPHILA
cttctttgtacctctgtacctgttgtacaaaaattttagggctgatgatccccattttggtgccttaaattattggctttaaattctgttaacctttttttccacccacaaaattgttttttgatgaaccaatttttttttttttttgtattatttatttggagaatggtgctggcggaaatgcatgatataggtgcagctacaaagctatgaagtaggggatacattttcccgattatcccgacaggcgactagaagagggatggcgtgttcgaaattaggtttgattgataaagcgactatatgtttaccatgtgacgcacgagaaacggcataaatttacatttacatatataatattatatatttttgtgtagtttgtatatgatttaagtttggaaaatacaagaacgcataaaagtacatgcaaatgcatatgattaagcgattagatagtagttgtatagtattcctcccattttttttgctgtatatacgagttaatttttttgatttcattcacaattatgatttacaccacccccaaaaaggatatatatatataaagattatatattttgtacgcattttgttttgttacccgatggcagaaaatgaaaaaaatcgagaaggcggaagtaaagaagtatatagaaagtacccaagcgcgtaacgttgctatataaatattatgattaactaaaaacaattttttgttagacgttaggtagttattttttaaaaattgtattttctattatacatgtatacatctatatatattttatttgtattatgatttttttgaacaacaagtaaatgtggattttctataatgctgacaacacaataaaaaagaaacaaccaatattacgaataaattgtacaagtataaaccagcgacaagctctgttttattatcgttttgtttatcaactacatataagtacccagcaatgataatgatctatgtacagaatggctttgtgaacgttggagtttatagcttggcctgtggacccgttccggagattttgtagacgaactcgtgggccacatcgtagtacggattgcagctctggcgcactctcttcagccacgccctgatcttggggtacttgatcctgacatcgtagtcggccattcctggattgcatgagtgaataataagaaacctgtaattatctcaaactgaaagtatgctcacgtgtctgttcgatttcacaggctgcaaagatgtccgcaacggtgagggaggatccggtgaggaagtccttgccctccagccagacctcctcgactacgtcgaggttgcgctccatctgcatgcggaacgtctcgattttggcttcggagggtgtgcgtcctgtcagaagcggctccagccacacggtgcggaagtacatggcgcaggtgagccgcagggacatgtgctgccattcgaggaactcgtcgacgcggctctggtcaacgaagtacttgggatagaggtgctccggtatcttgcccttggcgctcaaatagcgcaggatggccacgctctccgctagcttgtagccattgtcgtggatgcagggcacacgctggaagcggttaatctccttcttgaagtcttcggtcaagtgctcgcctgtggggcaaagaccgtagtcgagattagattgcacccataaatggtggtggcggtggcagtggcgggtggagccatacaaaaaaaaaagcacagatgttaccaaaactattaaactaacagttgtatcaacgtaacgcacttattcacaaactaaataatattttatggataaatccttttatcaaggtacaattgttaaatgtggctaaagcgcaaaatgattgtgtattgatcagtgaaaaagacgttacgttctgtacttcgtttgagatacgtgaggtattggcactcctgtccaccacatggacacactttgacccgcacaccggttacccttaccattgcgcagggcaaccacgcagtcttcgaagggcatgttgctcagccggaagataatgaacaacgccctcgagggctgcgacatcaggtcatagtagtagcgaatgggagcggacatcctcaggttggttggctgtctggagggaactgcaaagagaaggtgcttgcagtggttagaggaggcttcaaaacaaataaatgggcgccggtccaaagatcaccgaagaatctccacggaaagccgcatagcagcactacacccaacacacccctgaactcaccacaaacacggtcggtgggcaactgcagctattccactgagccaacaacttggatcgaatctaaatcagctggcggcggggcaagaagtcgtacgtagtgaagtggtgaattgtggggagagcgagctttacgtagtggatttcatcaacgaaaagctctgcgcgctcagtagtgatacgcgttagtgcgaaaatcaagtaacggacttataaacaattaagaaaaaaaatatttctgacttaatatttattatttatctaaaagttttttagatcactgcctggccaaagaaatcggattagatatttagttttagatatcgtgtgatttttagatatttagatattttagatatcgtgtgatatgttgggagtaagcacttcattttttaaataaacaaatgaaagtttccaagagagtttatcagatttataaacttctcccgtccttcattatgttcttttttttagcatagaatagaactagaataattcgagttccttacacttactaaacttacaactttgtctactgcttttaaaatatatatttataaagaagaaattaattaattatcacaattaaattaaatttactttactcttataattcaactttcaaaacattgattttaaactaacctctacgtttgagcacctcatcaaaggccacctgcagctgatcctcgtcattgctgagtcccagtaaactggccaaaaacgacaccgacatgacgagatccgaactccactgaattaagccagtgaatgaactggatgatgcagctgctccaacttatatactctaggtcgtggatgcgtagaaaatgtgaatgcgaatgcgactgggagtcgaataaacaaaaattaaagagaataggcgcaaggtattagaaaccctcgagataaggcggcgtagttccctcgttgcaccagctacactgcaaatcgaaaaacgaattattgtgaatattgagtaggtgctaccctctgataatattgcgaaagatataggaaagagagaattccataatgcaataattaaataattaaaaattccagtgcaactgcgcttcatacatccgccggccaatcggaaatatgtatattgtagagtaaataatcaatctatctaatagttctgagccattggcaacggcggaaggccaggaatagaaactccccagggaaggtccgtcttatcgctcgataaggagagattgtttaccccattgccagttctgtggcaacaggtgcaccattcacctgaacagctgatggatcgggatttatttatctgcatatatctcgaaatagccatccgccacgcaaacttcgttttcgattaggtatatatcgtatgtgtatttattaattccgattcaaacataccgacgtcttttgctttgtacttgtatacattttaactatatatatgtatatatatatattcatatacaatttgcgtgggcgtgtatatatacacagacgtatgtatgtatatacacacacgtatatatgtggtttttttttttttaattgagataaagtggagccaaggtgtcatccacctcctctttggccgggaaaaggtacatttacaaagagtataaattagggtataaagataatccacaacatttatactcggtgtagagagagagatcacacagtgggggaaatagttattcgtacgctttgtaaatatacgtatataaaaataaaatacaattaaataaaactgggaacttgatttggcttggcttggcagcgcataatatatgtagatatagtagacacataagatcggacgatatgccgcccatatatgtacatacagatacatatgtatgtatatatggtagtttaggtgtacttgacttattgttgacttgattgttacacacaattggatatttttcgctggtactgagtttactttgcaacgaattgtaatttataatttgatgcatgcgtttttttgtgtgatgtgcgattgcaaatacagcccctttaaaatattattaggctttttttctttttttttttgttgcaaatttttctggtcagtgtcataatataagaacttgaaattttgataatatacatacaatagagcgttgaagacatagacatctaaccaaccactcagtccaacgttttctaatacttaatattgaaagtttcaagttaggtaaaatgtatattttccttcaattcaatttttttgttgtgtatattgataaactagggcgaacctttgatataacgtgataaatacattgcaccctcctgattttctctacataataaaacatactatatgtacatatgtactatatgtttttcgcgtatgtataccaatgcactgaaaacaaattgttcgagtgcaaagtgtgagtaacagatgtctatacagttgtataaggttttagatttcatatatgatttcattcttttaatcagagtcttatgcatttgctgcccctgttttctggtttcctttactttggggatatgcttgaggagtttgggaagaacttactagacctactatggttaagttaccattaggattacagttacaggattagtggttcaggttcagtggtttctggtcgcatacaaatctaatttgaatactttatagcgaagacatcgatcgacacatacttattacttattgtttgtttgttagtctgcgttttcatagtgcgtttctgtgttatttggcaaacgaaatttgactgaactactgaatctagattctataataacgctctatgtagctacatatacggctgggttctgcccatccatttctctacttgttctcgatgatcatctgcagttggagaaccaaactccgggccaattggagcaccgattgggcattgtggcgttcggccatttctgaaaccacaagaaccatatagcaattggtataattttacttataagttgtatgccatgtatcgcaccattgaagaacttgatgacatcggtgaagtccatgctgttcgagagaatgatgtcgcgataggtctccagcagggcaagggccaggaagagtacgaagtggccggaggcgatgtgcttggccgcccagatcacctcccacgtggcgaagacgtcgtcgtagacgagctccctcttgaagtccagcaggaaccatctgtagcagaagtagaagtgcgtgtagtcgccgttcgagtccatcagatcgtacatctccgagtcgaggatctggatgagggacctgtgcgaagtgggttatttatttagttagtccgactgaaagtgcccgcactcacctcatgttcgcaaagtgcatgtccatggccccgccgctgggaaagttctcgatcatgcgctccatgagcttgcagaagcagctgtagctgagcgattcgtcgtcgaagatgaccaggaggggagccaccaggtcgcacatgccctgcatgtagcccacgtccaggtgctcccacacgtacgtggagatcacgttgcgcagcttgtccaggttctcgttggcgaagtaccagtagttcctgtcgcacctctgcacgtccttctcgatccgatgcagattcagaccaaactgctccaggagttcgctctgcaaagtatacgaaccaaattattaccacggaaaataagaagtatatctgaaatgtagtgaaaattgattgctcaattgcaatgatgtagtataacaacattaagacaatataaaagtatgttttgatgggtgtgattcaatcttatttaagtatacctcaattgagccatttttcagaaataataatcgaataatagaattcggtagacttccatttatacccgtttcttgtagagtaaaagagtatactagattcattgaaaagtatacaagtactacaagcaaagctatattagcagaacacgtagtatatgcgatttctgtttacctattcccaaaatactaatttattatcaaatggtattcacattcacactagctaaggaaggggtatctgatagtcggggagctcgactatagcattccctcttgtttattatatgtatatgcctagttgaaccacttcctaggtggaaactgtacaaattaaatttaactcttgttcaaatgccttacggaaattgtctcaaaagtggactgcacgctacttacactgtagacacctccattggagctggctggcgaggcgcaagcggacttcggctgctgtagggcatccatattgacgcctgctccgccggattctccagcctgctcctcaaggggcgacatctggtcgccctctgccgccttcggactgcgctcccagttggtaatgtccaccgatgccttggtaatgatgacagctgcggcggctggtggtggtggcggcctcactgcatcttcatcgtccggcagctggagatcgtcggcactcaagtactccgggctgagaacactgcgcgtgtcgctgttcgggcgttgatgcacctcgccgggtcccactgtctcgtacgaggaagctgtggatgccgagcagctgggctcctgattgatctgttcctccagcttccggtagtccggtagcttgctctccgactccgaaatcttttcatcctgctgctgcttttgcttgttgtcctcctcatccggttcgtccagttcattgaagctctcgtccacgtgacccgaatccgtgctggtcttcatggctctcggaatgggtttcacagtcaggtgattgccactcaccgcgcactccgcctgctgctgctgctgctgctgctgctcatcgaactccagatcgccgggatctgaaatgtccgatatgtcctcgaatacctcgttttctagatcgccaccggcttcgagatcggctgcccgcacggttctgtcgttgccggagttgctgccggaactcagcttggccaccgcccgcgctgtcttctccttctctctctgctgcacaatggcgtccaccgccagccactcgctcatcgtcgtctcatagtagtgcttgcaggtctcgtcctgcttcttgcgatcctccgttgtggagccgaaggcgtagtggcccaagaggtacggccacacctcctgccgcagctccggctggacgcccccgaaatagaccaggcggtagaactcggttgcgttctccagcaccccattcacattcagaagctgccagcgctcctttgtcaggccctcctcatcggctttcactaatggacgtgaaagctacaatatgtgaaaaatcatcgagtcttgctcacttactctcaggcgtaatcctcccgtgcaccagaccggacaagtgggtgcgaaccgtggagaggtggcgacagtaggccagccagccgtagaaggccctggagatgatctggcggcgcatcgtggagcagaccatctcgatgctggtactctgcgcctggagcagctgttgctgttgctgctgctgctgctggaggatcagcggcgactccatcgggaactggtcgatggagaggctcttgttggagcagtcgctgctgccggtggtggagcagctgctcagctgcgccctccgcggagtgctacgcacaaagtccaggatggagtgggtggcagctagagatgtagaatcatgggtcaaatcaaattcaaagtggttttcagccacgaagaatggttgcaccactcaccgaactcctcgtggcgactcttgctgacgatgcggaagacgtagtcgatgggcgtctcgtccacggactccatgaccgagggcaggatgcggcgtcgcatgctccggggccacaggaacatcttgccgatgccccgctgcgaccacagtggcggatctagctggccgtgtggcaggagacctgtctccaggcagctgagaaactgctgcatgtgtccaccttcgggaaagtgaatgggcggccgctggacgccgtcctgtcccaccaggattacggtgccgccgctgtcctcgccgcgactctggtgacagtggacgtagacaatctcgtccacgttaatgttcaaggcgtaggcccaaaaggcgtccttgtcgatgtcctccgcctcctccgcctcggtgtagccgttcatcaactggttgggcgtccacttgatggtcagcgtctggatgtgctgatgcaggcttaggtatcccggcatgggttccgccacatccttgggcagcacctgcacattgttcttgccgtagagcagcgtggccttcgcgttctgatgcagtgactccacgtagtccttggccacactagccgaggcgatcgacttgaaggatccagtgcccgcctcgtcggagcttgtgttcaggctcctcttgaagttgatgatcgccggacgcgagcacgtcgacgaggagcggcgacacgagctgatccgatggcgttgcacctgtttttattgatggaaaatcaaatatttacttatctcaactaaataaatattatattataatattattatattatatatacattgggaattaagatcagtattcaaattgaattaaaagagccatacacaccagttcatctgcgtgcggatcggtccagtagtgatcggctgttttggcccgcgtgaattccagggcacaaggacccaccagcaaggagctgagaatggatccgtagtccgaatcggccaccagggagtcccgatcatagaagctgctggcattgctcaccagatactcaatgattttggtcaggcgcttctcatagagagccaaccgaatccacagatacctatgcgaagatatgactttagcccagaaattgatttccgctgaaggaactcacttcatgctggccagggacatgctggaggtgctcgcactgacgctaatggaagcggacgcggaggacgtgctggccgctgcgttggtgcctgtggacatcgagttgctgctgctcttcttgagcatcggcggccgctggaaactgtcgctgctgctggaggagcgcttgctgggatcgctggcctcgatctcctgcaccagcttgctgatgtgctccgcctccgggcagctcttggcgatcttgtgcagcagcgccgtcgtcgaggaggttttgaacagacccagcgccctccgccggaggccctggcttaagcaggcctccacggcgccgcacaacgaggtgaccgagctgctctcctcgtggacgtacttcttggtcaccgcctcctccatcagctgcttcacctccttcttcacgctggctatcagccgctccttgtagtcggagccatctgggaaaggatgcaaaataaatgtaatggaactgagtagagtaacttttactcgtcactccaagagtaaatgagtatactacaatagattcggtgaaaagtatgtaacaggcagaaggaagcgtttccctatataaaaagtatatatattcttgatcaggatcagtagccgagtcgatctagcaataaccttctgtccgtatgaacgtcgagatctcaggaactataaaagctagatggttgagattcagtcgtcatttttggaaaattgttggacatttttcataattttattagttttgtaaatttctatcgatttgccaaaaaactctctaacgcccaaaaaccaccaaaacagtcacgcccacactttggaacaattttaaaaattttgtctcattctatcggtagaaaaattatgaaatttcgcgttcgcattcacactagctgagtaaggggtatctaatagtcggtgaacttgactattgcattctctcttcttttgatcaggattaactttcaagctagaaaatttcgcattttaactgagatatggcaacaatgttgagcttcaaattgattttcgatctcgactatagcattcttgttttaatttattttgtatgtttgctaatataattacataagaaggcatccttagaccaaatgcatttatttataagctccattatatttctgaatagggcagagaaataaatgctgtccttcgtcattcgccaaatcaagtgttcagcaataaaaaaaagtgtcaaaaaggtgtcgcaaaaaggtaatcatgtccactataacaacgtagatccgtaaatacaatcttatctgcattgataaaggtcaccgaagactgatagtcaatcagagaaaagtcattaaacagatagcggaatataatagttgtgtaatttttgttcaattataatagttttctagttttggtattcaaccagtatataaaccaataaacataactttcgcatcaaatgaactattttcagtgtgtaatcgatcgttgcgcaagttgagtaatttaaacgaatataaatagtagtgagtgatgtttgacaaacccctgctattacatttcgcagagtgagacgaaggaaaagtaaaccccgccgggtcttaaaaccaaatcacagcgccaacgcccagtaaacatttgccccaagcgccacattctctatatatacatatcccccatgtcctgttcgtcctgttcgtcctgcagtctctgaaactcaatatgtccaacatgtgttgactgccgcccctcaaacactttcccaaccaaaatgctaatggcatttgcactcaaaactcacgatggccagcggccacgtataatttcattttcattaattgttttccattcggagcgacagctagtggattgcctggttgcctggctgtcggtggcgtggccaggatataagcgttgaccaggaaccactgcgaacgcagatacactcacagatccattcggttgatgaatgtgtgagcaatggtcaagggaagcatatgcagatatatgcaagggtatatgtatgtgcaagtacgatggacagacaggcaataaacaaaagccaatcaaaagccataaattctaagaacttattgtatgataattgaagttcaccaatggtgtggtcgcactgaactagttattccactcatcggtatcccatcatgatttgtgcacaatggtatttattatatcattggtcacagctgtcaacttttcattatgattattgtaaacttaaacttatgtatctggctaatgtaatgtacatatgtgtatgcagccaagctgtggagatatgttatatatttctaagatgacaattgggcgtcgtaaaacagccacatcaatattccatcaaattgacttcggattggatattggtttttggggtttcccggatgcacttcccactgctaagctgatggccgccgcccactgagcttgcttcattatgctgggcgcggatggggacgaggacgcgtacgtggacttgtaggcggggcagctgtgaactgtgtggcactgttgctctgtggcgacaacaaagtgctcgccgtctggaacgccgaccgcgttgtcgccatgccacgtccttgatgggtggagttgggtggcaaaggcaaaggcaaaggcagaggcagtggcagtggcaatgggcaatgggtggtggtgggacataatggggcgtccccattttaattgctactcctttgttgcaccatttccattttgcatttgacacttgttgttagttttccatctcccttcgaccagccattgcatgtaattagcatttaaatgtacgcagcaccggccttggcaacaagttttaataactgcactttccgtcagccgagaaatgcaaatatgctgacgagaaagcggagaaagtttttcatcccgccatttgccatttgctatttgcgtttgccttttgctgatgctgtgatttgtttattttgtttatttgtttgcctgacctccgtggacgcggccaaatgaaagtaaatattaaaagatactcagataattatacctttatgtatatgtgcattaagtccccacgggctatgtaaattacattagatgtattcacatctgctatttcttaaattgctttaaattcattattgccaacgattattaacgaatactgcttttgaaaactagaccatgatcggaacgttaatagttttgaatcaacagcgaatatatattgaaatagaatttttgtttggcagaatttagtagcttcaaatttatcactcatacgtactgttgtctgcgatagaatattttttgtttgtttgttttttttttttgtccaatagaaacactctaggttaaatgcgaaagatgacgaagttcaatgtcttaagatttagtttgcaaactgcccctgcaacaatttagccagcttgtgagcaacattgtgtaaagttcgcgttaaagtcgatttaaaaaaaaaaaacaacaaaaaacttaaatgagcatatggacacagttttctcccagtggagtggtcttcatctctatcgacattggcactggccacgaaaccctttgggatcgcccagccggagcagcttcagcaacggcatctgaatgaaaaaggggcgttgctggtcctttgggcgggtcacctacacagcgaccttgacgagctgcatggtcttgg

SEQ ID NO: 2012 - DNA, 4587 bp, DROSOPHILA
atgtcccaccaccacccattgcccattgccactgccactgcctctgcctttgcctttgcctttgccacccaactccacccatcaaggacgtggcatggcgacaacgcggtcggcgttccagacggcgagcactttgttgtcgccacagagcaacagtgccacacagttcacagctgccccgcctacaagtccacgtacgcgtcctcgtccccatccgcgcccagcataatgaagcaagctcagtgggcggcggccatcagcttagcagtgggaaatggctccgactacaaggagcggctgatagccagcgtgaagaaggaggtgaagcagctgatggaggaggcggtgaccaagaagtacgtccacgaggagagcagctcggtcacctcgttgtgcggcgccgtggaggcctgcttaagccagggcctccggcggagggcgctgggtctgttcaaaacctcctcgacgacggcgctgctgcacaagatcgccaagagctgcccggaggcggagcacatcagcaagctggtgcaggagatcgaggccagcgatcccagcaagcgctcctccagcagcagcgacagtttccagcggccgccgatgctcaagaagagcagcagcaactcgatgtccacaggcaccaacgcagcggccagcacgtcctccgcgtccgcttccattagcgtcagtgcgagcacctccagcatgtccctggccagcatgaagtatctgtggattcggttggctctctatgagaagcgcctgaccaaaatcattgagtatctggtgagcaatgccagcagcttctatgatcgggactccctggtggccgattcggactacggatccattctcagctccttgctggtgggtccttgtgccctggaattcacgcgggccaaaacagccgatcactactggaccgatccgcacgcagatgaactggtgcaacgccatcggatcagctcgtgtcgccgctcctcgtcgacgtgctcgcgtccggcgatcatcaacttcaagaggagcctgaacacaagctccgacgaggcgggcactggatccttcaagtcgatcgcctcggctagtgtggccaaggactacgtggagtcactgcatcagaacgcgaaggccacgctgctctacggcaagaacaatgtgcaggtgctgcccaaggatgtggcggaacccatgccgggatacctaagcctgcatcagcacatccagacgctgaccatcaagtggacgcccaaccagttgatgaacggctacaccgaggcggaggaggcggaggacatcgacaaggacgccttttgggcctacgccttgaacattaacgtggacgagattgtctacgtccactgtcaccagagtcgcggcgaggacagcggcggcaccgtaatcctggtgggacaggacggcgtccagcggccgcccattcactttcccgaaggtggacacatgcagcagtttctcagctgcctggagacaggtctcctgccacacggccagctagatccgccactgtggtcgcagcggggcatcggcaagatgttcctgtggccccggagcatgcgacgccgcatcctgccctcggtcatggagtccgtggacgagacgcccatcgactacgtcttccgcatcgtcagcaagagtcgccacgaggagttcgctgccacccactccatcctggactttgtgcgtagcactccgcggagggcgcagctgagcagctgctccaccaccggcagcagcgactgctccaacaagagcctctccatcgaccagttcccgatggagtcgccgctgatcctccagcagcagcagcagcaacagcaacagctgctccaggcgcagagtaccagcatcgagatggtctgctccacgatgcgccgccagatcatctccagggccttctacggctggctggcctactgtcgccacctctccacggttcgcacccacttgtccggtctggtgcacgggaggattacgcctgagatgaaagccgatgaggagggcctgacaaaggagcgctggcagcttctgaatgtgaatggggtgctggagaacgcaaccgagttctaccgcctggtctatttcgggggcgtccagccggagctgcggcaggaggtgtggccgtacctcttgggccactacgccttcggctccacaacggaggatcgcaagaagcaggacgagacctgcaagcactactatgagacgacgatgagcgagtggctggcggtggacgccattgtgcagcagagagagaaggagaagacagcgcgggcggtggccaagctgagttccggcagcaactccggcaacgacagaaccgtgcgggcagccgatctcgaagccggtggcgatctagaaaacgaggtattcgaggacatatcggacatttcagatcccggcgatctggagttcgatgagcagcagcagcagcagcagcagcaggcggagtgcgcggtgagtggcaatcacctgactgtgaaacccattccgagagccatgaagaccagcacggattcgggtcacgtggacgagagcttcaatgaactggacgaaccggatgaggaggacaacaagcaaaagcagcagcaggatgaaaagatttcggagtcggagagcaagctaccggactaccggaagctggaggaacagatcaatcaggagcccagctgctcggcatccacagcttcctcgtacgagacagtgggacccggcgaggtgcatcaacgcccgaacagcgacacgcgcagtgttctcagcccggagtacttgagtgccgacgatctccagctgccggacgatgaagatgcagtgaggccgccaccaccaccagccgccgcagctgtcatcattaccaaggcatcggtggacattaccaactgggagcgcagtccgaaggcggcagagggcgaccagatgtcgccccttgaggagcaggctggagaatccggcggagcaggcgtcaatatggatgccctacagcagccgaagtccgcttgcgcctcgccagccagctccaatggaggtgtctacagtagcgaactcctggagcagtttggtctgaatctgcatcggatcgagaaggacgtgcagaggtgcgacaggaactactggtacttcgccaacgagaacctggacaagctgcgcaacgtgatctccacgtacgtgtgggagcacctggacgtgggctacatgcagggcatgtgcgacctggtggctcccctcctggtcatcttcgacgacgaatcgctcagctacagctgcttctgcaagctcatggagcgcatgatcgagaactttcccagcggcggggccatggacatgcactttgcgaacatgaggtccctcatccagatcctcgactcggagatgtacgatctgatggactcgaacggcgactacacgcacttctacttctgctacagatggttcctgctggacttcaagagggagctcgtctacgacgacgtcttcgccacgtgggaggtgatctgggcggccaagcacatcgcctccggccacttcgtactcttcctggcccttgccctgctggagacctatcgcgacatcattctctcgaacagcatggacttcaccgatgtcatcaagttcttcaatgaaatggccgaacgccacaatgcccaatcggtgctccaattggcccggagtttggttctccaactgcagatgatcatcgagaacaatgtagctggtgcaacgagggaactacgccgccttatctcgaggtggagttcggatctcgtcatgtcggtgtcgtttttggccagtttactgggactcagcaatgacgaggatcagctgcaggtggcctttgatgaggtgctcaaacgtagagttccctccagacagccaaccaacctgaggatgtccgctcccattcgctactactatgacctgatgtcgcagccctcgagggcgttgttcattatcttccggctgagcaacatgcccttcgaagactgcgtggttgccctgcgcaatggcgagcacttgaccgaagacttcaagaaggagattaaccgcttccagcgtgtgccctgcatccacgacaatggctacaagctagcggagagcgtggccatcctgcgctatttgagcgccaagggcaagataccggagcacctctatcccaagtacttcgttgaccagagccgcgtcgacgagttcctcgaatggcagcacatgtccctgcggctcacctgcgccatgtacttccgcaccgtgtggctggagccgcttctgacaggacgcacaccctccgaagccaaaatcgagacgttccgcatgcagatggagcgcaacctcgacgtagtcgaggaggtctggctggagggcaaggacttcctcaccggatcctccctcaccgttgcggacatctttgcagcctgtgaaatcgaacagacacgaatggccgactacgatgtcaggatcaagtaccccaagatcagggcgtggctgaagagagtgcgccagagctgcaatccgtactacgatgtggcccacgagttcgtctacaaaatctccggaacgggtccacaggccaagctataa

SEQ ID NO: 2013 - protein, 1528 aa, DROSOPHILA
MSHHHPLPIATATASAFAFAFATQLHPSRTWHGDNAVGVPDGEHFVVATEQQCHTVHSCPAYKSTYASSSPSAPSIMKQAQWAAAISLAVGNGSDYKERLIASVKKEVKQLMEEAVTKKYVHEESSSVTSLCGAVEACLSQGLRRRALGLFKTSSTTALLHKIAKSCPEAEHISKLVQEIEASDPSKRSSSSSDSFQRPPMLKKSSSNSMSTGTNAAASTSSASASISVSASTSSMSLASMKYLWIRLALYEKRLTKIIEYLVSNASSFYDRDSLVADSDYGSILSSLLVGPCALEFTRAKTADHYWTDPHADELVQRHRISSCRRSSSTCSRPAIINFKRSLNTSSDEAGTGSFKSIASASVAKDYVESLHQNAKATLLYGKNNVQVLPKDVAEPMPGYLSLHQHIQTLTIKWTPNQLMNGYTEAEEAEDIDKDAFWAYALNINVDEIVYVHCHQSRGEDSGGTVILVGQDGVQRPPIHFPEGGHMQQFLSCLETGLLPHGQLDPPLWSQRGIGKMFLWPRSMRRRILPSVMESVDETPIDYVFRIVSKSRHEEFAATHSILDFVRSTPRRAQLSSCSTTGSSDCSNKSLSIDQFPMESPLILQQQQQQQQQLLQAQSTSIEMVCSTMRRQIISRAFYGWLAYCRHLSTVRTHLSGLVHGRITPEMKADEEGLTKERWQLLNVNGVLENATEFYRLVYFGGVQPELRQEVWPYLLGHYAFGSTTEDRKKQDETCKHYYETTMSEWLAVDAIVQQREKEKTARAVAKLSSGSNSGNDRTVRAADLEAGGDLENEVFEDISDISDPGDLEFDEQQQQQQQQAECAVSGNHLTVKPIPRAMKTSTDSGHVDESFNELDEPDEEDNKQKQQQDEKISESESKLPDYRKLEEQINQEPSCSASTASSYETVGPGEVHQRPNSDTRSVLSPEYLSADDLQLPDDEDAVRPPPPPAAAAVIITKASVDITNWERSPKAAEGDQMSPLEEQAGESGGAGVNMDALQQPKSACASPASSNGGVYSSELLEQFGLNLHRIEKDVQRCDRNYWYFANENLDKLRNVISTYVWEHLDVGYMQGMCDLVAPLLVIFDDESLSYSCFCKLMERMIENFPSGGAMDMHFANMRSLIQILDSEMYDLMDSNGDYTHFYFCYRWFLLDFKRELVYDDVFATWEVIWAAKHIASGHFVLFLALALLETYRDIILSNSMDFTDVIKFFNEMAERHNAQSVLQLARSLVLQLQMIIENNVAGATRELRRLISRWSSDLVMSVSFLASLLGLSNDEDQLQVAFDEVLKRRVPSRQPTNLRMSAPIRYYYDLMSQPSRALFIIFRLSNMPFEDCVVALRNGEHLTEDFKKEINRFQRVPCIHDNGYKLAESVAILRYLSAKGKIPEHLYPKYFVDQSRVDEFLEWQHMSLRLTCAMYFRTVWLEPLLTGRTPSEAKIETFRMQMERNLDVVEEVWLEGKDFLTGSSLTVADIFAACEIEQTRMADYDVRIKYPKIRAWLKRVRQSCNPYYDVAHEFVYKISGTGPQAKL

SEQ ID NO: 2014 - DNA, 4462 bp, DROSOPHILA
tgacatccttccggacggaactcgccgccaggacggatctccgcgcccctctgcaccgcgtcatggtaatgggccaggtggtagacgaaccggttttcggcaatgatctccgagtaggtgcattcgaaaacttcctgctgggagacatttctggtcacctgcggcaccagagccccctcgatctttgattcctcgatgtagtcgtagtgcgatgcgaaccggaagggcagacacaggtacacgatgagagtgatcagtccgatggcgatgagaagatcatatttatggaagctgcggacccagagccgcacgaacattgttggcaggaaaagttgactcagtgcgatctttggaaactccgcatcctaatttcggacgcaatcttcgcggccggttggcgaataacagctgacgaccagggacgcaacgcataaaccaacagacagtgaaacttcaccagctcgaattgttttttttttggtttattttctcacataatattcattaattttttaaatggtttttacgaacaactaaagtctactaaccaaaaagaaaatgtttatgaaatcaatttttaggatgcctttaatacaaaatagcataagaagttgtttttataaaaagtatgcaaccgattgggcatccatggttctttaaaacggcatgactctaccccacccttattaattaaacaataatttgataaaaagttgtgtttacttatactagattgttgagacttctattgataaggatgcatagttataaatgttgactcattaaagagaaggtaattgaactgaagaaggttgtagccatatgtatgtatggttaatacatgagagacataatcaaagtttttaatttataacatttaaaatgtcaatctttgtttattatcgggttgtactgttcgctcaacaagtacgtactgtataaacaaagcaacagcactctggcaacgccgtgacagtttcccatccctgaaccggcgaagaactcttggtttccttttacaatttcttaaacaaatgcaccggtggtttaattggcaaaaatgacctccattatcaagctgcacactatatctggggcgatggacgagtccccgccatgctatatcctacagatagacgatgtgcggatattacttgactgcggatgggacgaaaagttcgatgccaactttatcaaggaactgaagaggtgacaattgtatacatatttcaggaaaacaataacctaaatattttgtgtattcccaggcaggtgcacaccctggacgccgtgctgctatcccatccggatgcatatcatcttggagccctgccatacttggtgggcaagctggggctcaattgccccatctacgccaccattcccgtgttcaaaatgggtcaaatgtttatgtatgacctttacatgtcgcacttcaatatgggagacttcgatctattttcgctggacgacgtggacacggctttcgaaaagataacccagttgaaatacaaccaaacagtttcactgaaggacaaaggatatggaatatccattacgcctttgaacgctggacacatgatcggcggcaccatctggaagatcgtcaaggtgggcgaggaggatattgtgtacgccaccgacttcaaccataagaaggagcgccacttaagtggctgcgagctggacaggctgcaaagaccttcgctgctcattaccgacgcctacaacgcacagtaccagcaggccagaaggagggcccgcgatgaaaagctaatgaccaacatcctgcaaacggtgcgtaacaacggcaatgtcctgatagccgtggatacggcaggacgagtcctggagttggcccacatgctggaccagctgtggaagaacaaggaatctgggctaatggcctactccctggcccttcttaacaatgtgagctacaacgtgattgagttcgccaagtcgcagatagaatggatgagtgacaagctcacgaaggctttcgaaggtgcccgcaacaatccctttcagttcaagcacatccagctgtgccattcactggcggacgtctataaattgcccgctggtccaaaagtggtgttggccagtaccccagatctggagagcggattcacgagggatctcttcgtgcaatgggccagcaatgccaacaatagcataatccttactactcgtacgtctcccggcactttagccatggaactggtggagaactgcgcaccgggcaagcaaatcgaattggacgtcaggcgaagagttgacttagaaggagctgagttggaggagtacctacgcacacagggcgagaaacttaatccccttatcgtaaagcccgatgtggaggaagagagcagttccgagtccgaggacgacatcgagatgagcgtcatcacgggcaagcatgatattgtggtcagaccggagggtcgccatcactccggttttttcaagtccaacaaacgacaccacgtgatgttcccctatcacgaggaaaaggtgaagtgcgatgagtatggggagatcatcaatctagacgactaccggattgcggatgcgacaggctatgagtttgtacctatggaggagcaaaacaaggagaatgttaaaaaggaagaaccgggcataggagcagaacaacaggctaacggaggaatcgtcgacaatgatgttcagttgctggagaagcccaccaagctgataagccaacgcaaaacaatcgaggtgaatgcccaagtccagaggatcgatttcgaaggtcgctctgatggcgagtccatgctaaagatcctctcccagttgaggccacgaagggttatcgtcatacacggcactgccgaaggcacacaagtggtggccaggcactgcgaacagaatgtcggtgcgcgcgtttttactccgcagaagggggaaatcattgatgtcaccagtgagattcacatctatcaggtacgcctgacggaaggacttgtctcccagctgcagttccaaaagggcaaggacgcggaggtggcgtgggtggatggtcgcctgggcatgcgggtgaaggccatcgaagcacccatggacgtaactgtggagcaggacgcttccgtgcaagaaggcaagacattgactcttgaaacactggcggacgatgagattcctatccacaactcagtgctcattaacgagctgaaactgtccgactttaagcagactctcatgcgtaataacatcaactcggagttctccggcggcgtgctctggtgcagcaacggaactctggccttgaggcgagtggatgccggcaaggtagccatggagggatgcttatccgaggagtactacaagatcagggagttgctgtacgagcagtatgcgatcgtttaatattcaaaatgacgtttgtgtaagcccctaatgttttacttgttaagattagaaagtttttatataagagaatcagttgtactttattgcctacataaattgcagcatgggatcttctgcccttggccgcttcttcttccactcctcgatctcgtcctctgtgggcgccttcacatcatacatgctgttataggctcgtttgcgatcgtccagttcctcgggaatatctttttcctttgtcttatctttgtccttggtctccttgttcttgcctttttgttttcgctgctccttagccttctttttcttctcgcgcttcttcgacttcttcttggtcttcttcttctcaggttttacctcctcctcttcggatgaggagggttccgaactcgatgctgagtccacttcggaagtgggcctttcaggtggcacttctggtaccttgaattggctttgagctgcaggttctgtagtagccgctgcagtggagctcgtagaatgatgttccgagtagccctctggctcctgcatgcccacgcagtaggagttcttgatgaaggacttgcagcacttgtaaccccagcgtccggcgttccagaaactgccccaaactgttgtgtgattgttgatatacacatcctcctcgtagatactgcgcgctttcggtttctccacgcccttgataaccttgccgctgcgagagtactcgatgtactcctcggtctgcgccagcaatagcgactttggtggaacctgtagatgctcttcgccaccatatttctccacaatgtgtgttttggtctggaaaaataaaggaaatggatatagtaatgtttccaagaaatttccattttcaattacttacacttgacttgaactgttccttcttctgctcgtactccttctgaagcagctccaacttagtgggctccgctagcagatgcacatcaacccccttgccatgagcttcccaggcaaacaactgggcggtggcttgggctgtagtgtctccagaaaagcgtacaaagttctcgccagcaaactcagctctgcaagaatgagtagttaagaa

SEQ ID NO: 2015 - DNA, 2403 bp, DROSOPHILA
aactcttggtttccttttacaatttcttaaacaaatgcaccggtggtttaattggcaaaaatgacctccattatcaagctgcacactatatctggggcgatggacgagtccccgccatgctatatcctacagatagacgatgtgcggatattacttgactgcggatgggacgaaaagttcgatgccaactttatcaaggaactgaagaggcaggtgcacaccctggacgccgtgctgctatcccatccggatgcatatcatcttggagccctgccatacttggtgggcaagctggggctcaattgccccatctacgccaccattcccgtgttcaaaatgggtcaaatgtttatgtatgacctttacatgtcgcacttcaatatgggagacttcgatctattttcgctggacgacgtggacacggctttcgaaaagataacccagttgaaatacaaccaaacagtttcactgaaggacaaaggatatggaatatccattacgcctttgaacgctggacacatgatcggcggcaccatctggaagatcgtcaaggtgggcgaggaggatattgtgtacgccaccgacttcaaccataagaaggagcgccacttaagtggctgcgagctggacaggctgcaaagaccttcgctgctcattaccgacgcctacaacgcacagtaccagcaggccagaaggagggcccgcgatgaaaagctaatgaccaacatcctgcaaacggtgcgtaacaacggcaatgtcctgatagccgtggatacggcaggacgagtcctggagttggcccacatgctggaccagctgtggaagaacaaggaatctgggctaatggcctactccctggcccttcttaacaatgtgagctacaacgtgattgagttcgccaagtcgcagatagaatggatgagtgacaagctcacgaaggctttcgaaggtgcccgcaacaatccctttcagttcaagcacatccagctgtgccattcactggcggacgtctataaattgcccgctggtccaaaagtggtgttggccagtaccccagatctggagagcggattcacgagggatctcttcgtgcaatgggccagcaatgccaacaatagcataatccttactactcgtacgtctcccggcactttagccatggaactggtggagaactgcgcaccgggcaagcaaatcgaattggacgtcaggcgaagagttgacttagaaggagctgagttggaggagtacctacgcacacagggcgagaaacttaatccccttatcgtaaagcccgatgtggaggaagagagcagttccgagtccgaggacgacatcgagatgagcgtcatcacgggcaagcatgatattgtggtcagaccggagggtcgccatcactccggttttttcaagtccaacaaacgacaccacgtgatgttcccctatcacgaggaaaaggtgaagtgcgatgagtatggggagatcatcaatctagacgactaccggattgcggatgcgacaggctatgagtttgtacctatggaggagcaaaacaaggagaatgttaaaaaggaagaaccgggcataggagcagaacaacaggctaacggaggaatcgtcgacaatgatgttcagttgctggagaagcccaccaagctgataagccaacgcaaaacaatcgaggtgaatgcccaagtccagaggatcgatttcgaaggtcgctctgatggcgagtccatgctaaagatcctctcccagttgaggccacgaagggttatcgtcatacacggcactgccgaaggcacacaagtggtggccaggcactgcgaacagaatgtcggtgcgcgcgtttttactccgcagaagggggaaatcattgatgtcaccagtgagattcacatctatcaggtacgcctgacggaaggacttgtctcccagctgcagttccaaaagggcaaggacgcggaggtggcgtgggtggatggtcgcctgggcatgcgggtgaaggccatcgaagcacccatggacgtaactgtggagcaggacgcttccgtgcaagaaggcaagacattgactcttgaaacactggcggacgatgagattcctatccacaactcagtgctcattaacgagctgaaactgtccgactttaagcagactctcatgcgtaataacatcaactcggagttctccggcggcgtgctctggtgcagcaacggaactctggccttgaggcgagtggatgccggcaaggtagccatggagggatgcttatccgaggagtactacaagatcagggagttgctgtacgagcagtatgcgatcgtttaatattcaaaatgacgtttgtgtaagcccctaatgttttacttgttaagattagaaagtttttatataagagaa

SEQ ID NO: 2016 - protein, 756 aa, DROSOPHILA
MTSIIKLHTISGAMDESPPCYILQIDDVRILLDCGWDEKFDANFIKELKRQVHTLDAVLLSHPDAYHLGALPYLVGKLGLNCPIYATIPVFKMGQMFMYDLYMSHFNMGDFDLFSLDDVDTAFEKITQLKYNQTVSLKDKGYGISITPLNAGHMIGGTIWKIVKVGEEDIVYATDFNHKKERHLSGCELDRLQRPSLLITDAYNAQYQQARRRARDEKLMTNILQTVRNNGNVLIAVDTAGRVLELAHMLDQLWKNKESGLMAYSLALLNNVSYNVIEFAKSQIEWMSDKLTKAFEGARNNPFQFKHIQLCHSLADVYKLPAGPKVVLASTPDLESGFTRDLFVQWASNANNSIILTTRTSPGTLAMELVENCAPGKQIELDVRRRVDLEGAELEEYLRTQGEKLNPLIVKPDVEEESSSESEDDIEMSVITGKHDIVVRPEGRHHSGFFKSNKRHHVMFPYHEEKVKCDEYGEIINLDDYRIADATGYEFVPMEEQNKENVKKEEPGIGAEQQANGGIVDNDVQLLEKPTKLISQRKTIEVNAQVQRIDFEGRSDGESMLKILSQLRPRRVIVIHGTAEGTQVVARHCEQNVGARVFTPQKGEIIDVTSEIHIYQVRLTEGLVSQLQFQKGKDAEVAWVDGRLGMRVKAIEAPMDVTVEQDASVQEGKTLTLETLADDEIPIHNSVLINELKLSDFKQTLMRNNINSEFSGGVLWCSNGTLALRRVDAGKVAMEGCLSEEYYKIRELLYEQYAIV

SEQ ID NO: 2017 - DNA, 3265 bp, DROSOPHILA
cgcatgcagtgatagcagacaactttatgtgggcacacgtatgcccatgcattgtaaatttgacaaaatatgccctttaccttaaaagttcttagactttaaatctatattatttttgatcaattggcaccatgcgaaaaattcttgttttgcattgccttaacgttattattatttgaaaatagattactcgcacaagcaagcaaattctatttttagatttcttacgctctcagcgggagcgagcggaaagagagcaattttggccgtcactaaaaaagtgcatagtgccaaaccaatgtgccaaaccaacgcatcttgttattctagtgtctttgacaaaactgtgtttagcatcctaagcataaacataaaatcacaatcactcttcaaagtcgatccgaaaccagacgctaaatctatgctacctttgcaaacttccttaaatcggaaataagcaagaagatataaataaccgacgaggcaatatagaccagttgctagttagcaacatcaaccagtaagaactctatattgtctatatctcagtttactagacattttttcaaacaaatatttatggtaggtagaaaactgttggagtaaaaacaaaacaaaaaaacgatagaatgctagtgcaaatgtcaacgagaaatttcaaaacctttcagcttatatatatatttttagtttagaaaagtttagaaaactaatacaagaatcaaaaacatcaaaacattttttaaaagtatgggcgtgtcagtttggtcgttagagtggttgtggcagaatggctgcgcctacgtttttagaatcggcatgcttgatctcaaccttctagcttttatagtttctgagatctagtcgtttttacgaattagaatacggatatatatactttatatggtcgcttccaggtaatttaaagtttaagaataagtatcagcgaattaaaccaacaatgaataatctctcgtgttgaaaatacaaatacacttaccatagatttcacatcatcgttttccttctccgacatcttaagcgattctattgtatcaccacttacgattgcagtttcgttaacgtcagttgtgctgctcacgccagagacatcttctataatatcaaccggatgttccattactatagggttttgggctctcgatggcccggccgtatcacctccggtaaacagggcagaggcagatgaagacgttgcgttttcaccattattttcattctcctccgatccatgctggccttcactttcagaaagctttagcagatctccggctccatccaactgctctataatatcatccattggatctgtgtctttaatagtagcgactgaatggttattagtttccgtcactggttgcgattgtggtatagattttgcattaatgcttttagttgctaaagtgacggtccgagggctacctccggcattgaaaacaaaactttttctggcactcagcgccgttgtagtagcaggagaattatttgagcttgttcctggtagtaccataactttatttccggatgcagccatacttgtattggtgctcataacggtaacagctttgcctcctatatacaatgccgttttttgatgaatgggagtgccactttgtttttgcccaaatgccattgaagatgatgcttgtactgatgatatatttcgcagcatcttaactccactttggttggatattaaagttttttgtccacttaatgcctgcagcgggctaggcgtggtcgacgttgagttaactatacttacaatatttgtccctgatgcagagccaccagcacttgtcataactgtgctagttggaacagatcgcacattgccaccagtggttacaataataatctgctgatttcccaatggcgtaccctgtttattagttatgacaaaagctggttttccacccattacgttcggagttaccttgcccatctgtaagatgtttgaattcttcataatcaattttccaccggccatcgtatgcggcgatacaagctttaaaacgtttccggacacaatgggcttttgaatctgacttccaggcactgtcgatccttattataatgattttcgaaatcgattttgcagatcccgcggcagcgaaacagcacacacccacagttacgccaaatctaaaacgtggaccagaaaaatcaactattggaagcagcaacatagcaaacaccttctgttcaccacacaagcgtggacgcaacggattgcatgattgacataccgattagtagcataatcactcatatataggcatataaattatgggttaaatgtaaagtatgctattagcttttccgtttttacagcttccaatagactttacgctgaattcaaaatgattacaacgaaacttgaatattattgctattaatgcagttttctaagagactgctaattgtgtatgatgcatgtaacattaatccagtttggtttgctttaatgacgaaaataataaattgacgtcgacaattttaagtaaacataataacataacaaacataataatatataatattttccttatcatgaactctacaacactctagtgtatatgtatgctaatcttcggtaaaataaaagttaatttaaaaaatgtaaaattatttacaataataatacttttgaaataaaaataaaagagaaccttgagatacatacgttcggacgggcactgtttaacgactcgactgattcagatcaagtatatatttgcaatttgtgtgccttccttccacattacatatttttaatagactcatcttctactctagaaataacggttgtaataatggctaacacccaccccaaaatgaaattgagcaactactattttccaattatcatatggaatatcatattctttagccatccattaatataatatttatatttttctcctaatctccaacggtttgcttattttagataaaatgaaattacgtctatgttttggatgcacattatttggttacctgttacctgatgtgattttcaatttaactaagaaaatataatatctaaaatttcttattgaaatttcttttctacgacatacatacgagtaaaatacgagtacaataatacaagtgtctagcttcaggtgttcagaagttattggcgtctgaaattcaggtattgatagttttcgctcaaaactaccgggtttttcaaaaagtcgtagaacaaagggttctaatatcaagtttttaaggtaga

SEQ ID NO: 2018 - DNA, 4912 bp, DROSOPHILA
tgaggtctcagttcggcttttaattttgataattcttaatagtgtttgtctttttgaacattaaaagtgaaaattgtcgtatagcatttaaatatgaacttcatataaaatatctctcaaatatcaattattttccaagatttgattggctgatttgttaaagtttttgcgcgtagacctaatccattatagggaagcgtctagttccagcattgccaggccaaaataaattgtgcattacatagagaatgcctttgggtttttagtattttacaattaaaggaaacacataagcacaaagccattcgatggactacgcaccgtgaaaggaaatgcaaacctaatttgtagctgtctacaataatcaagttatatatatatattatcaaaacaataaattgctggccataatatggaaggctcagactttgtggatccagccttttcttcaggagaacgaatatcggcatctgatctcaattcggagcatattattcaggccgagaatcacagttttgctaatcgaatttctatggatatggatgtccctgatgggcaccagctggacagcaacttaaccggatttcgatggaagcgagttcttaacccaaccggaccgcagccccgcccgagacatggacaccgtgcgataaacatcaaagagctaatggtcgtcttcggcggcggaaacgaaggaattgttgacgagttgcacgtttataatactgttactaatcagtggtacgtcccagtgctaaaaggtgatgtaccgaacggatgcgctgcttatggatttgttgtggagggtactcgcatgtttgtttttgggggaatgatcgaatacggaaaatattcaaacgagctctatgagctacaggcaactaaatgggaatggagaaaaatgtatccagagtcaccagacagtgggttgtcaccgtgtcctcgcttgggtcacagctttacaatggttggtgaaaaaatatttcttttcggcggactagcaaatgaatcggacgacccaaaaaataatattccaaaatacttaaacgacttgtacatactggatactcgaggagttcacagtcataacggaaagtggatagtacctaaaacatatggggatagcccgccaccacgagagtcgcacacaggcatatcgtttgctactaaaagcaacggaaatttaaatcttttgatttatggtggaatgagcggctgccgcttgggagatttatggttgctagaaacagactccatgacttggtcgaagccgaaaacttcaggggaggcgccgctaccacgctcgttgcacagttctacaatgattggcaacaaaatgtatgtctttggtggctgggttcccttagtgatcaatgattctaaatcgacaacagagcgtgaatggaaatgtacaaacactcttgctgtccttgaccttgaaacaatgacatgggaaaatgtcacattggacactgtagaggaaaatgttccacgtgcccgtgctggccactgtgcagttggtattcaaagtcgtctttatgtgtggtcaggtcgtgatggttaccgcaaagcatggaacaaccaggtttgctgcaaagacctgtggtacttagaggtctccaagcccctgtatgcagtaaaagttgcgctagttcgcgcttctactcacgccttggagctctcgtggactgcgaccacttttgcagcagcctacgttttgcaaatccaaaaaattgagcagccattaaatacaagctcgaaactgttaagcaacaacattgttcaacaaggaaccccgacatctgctgaaacttctggaattaatatttcagcaaatagatctgggagtgctttgggtcttggtgtcgaagccacatctacagtcttaaaactagaaaaggaatctttgcaactgagtggatgtcaaccggaaacaaatgttcaaccatctgtaaatgacttgttgcaatcaatgtcgcaaccttcttccccagcgtcccgtgctgataaagacccactttcgtcagggggtggaactacctttaacttatcaacatcggtcgcttcagtgcatcctcaaatatctgtaatcagtagtacagccgcagtaacgggcaacgacacagcgtccccaagtggcgccattaatagtatattgcaaaagtttcgaccagttgttaccgctgtaagaacgtccacaactactgcggtatctattgctaccagcacgtctgatcccttgtctgtgcgagtaccaagtacgatgtcggcaaacgttgttctcagctcttcaagtagtacattgcgtattgtcccaagcgtaactgcatcgcattcactacgtatagcttcttctcaagcaagtggcaacaactgccggagtagctctgcaataaatatattaaaaacagctcttccaaacgtcgccgtgcaatctcagcctacatcatcgaccaccacctccattggtggaaaacagtacttcattcaaaagccacttacacttgctccaaatgttcagctccaatttgttaagaccagtggtgggatgactgttcaaactcttccaaaagtaaactttacggcttcaaaaggaacgcccccacatggcatatcaattgcaaacccacatttggcgtctggtattactcaaattcagggatcgacagtgcctggaagtcagattcaaaagcccattgtgtccggaaacgttttaaagcttgtatcgccgcatacgatggccggtggaaaattgattatgaagaattcaaacatcttacagatgggcaaggtaactccgaacgtaatgggtggaaaaccagcttttgtcataactaataaacagggtacgccattgggaaatcagcagattattattgtaaccactggtggcaatgtgcgatctgttccaactagcacagttatgacaagtgctggtggctctgcatcagggacaaatattgtaagtatagttaactcaacgtcgaccacgcctagcccgctgcaggcattaagtggacaaaaaactttaatatccaaccaaagtggagttaagatgctgcgaaatatatcatcagtacaagcatcatcttcaatggcatttgggcaaaaacaaagtggcactcccattcatcaaaaaacggcattgtatataggaggcaaagctgttaccgttatgagcaccaatacaagtatggctgcatccggaaataaagttatggtactaccaggaacaagctcaaataattctcctgctactacaacggcgctgagtgccagaaaaagttttgttttcaatgccggaggtagccctcggaccgtcactttagcaactaaaagcattaatgcaaaatctataccacaatcgcaaccagtgacggaaactaataaccattcagtcgctactattaaagacacagatccaatggatgatattatagagcagttggatggagccggagatctgctaaagctttctgaaagtgaaggccagcatggatcggaggagaatgaaaataatggtgaaaacgcaacgtcttcatctgcctctgccctgtttaccggaggtgatacggccgggccatcgagagcccaaaaccctatagtaatggaacatccggttgatattatagaagatgtctctggcgtgagcagcacaactgacgttaacgaaactgcaatcgtaagtggtgatacaatagaatcgcttaagatgtcggagaaggaaaacgatgatgtgaaatctatgccgacgacttccgagacggaagcggccaccatcctaaccacaattaagtctgcagaggctttagtgttggaaactgcagaaataaggaaagatcataccggatgtactataggtagtttgaaagaaaatcaagatgaaaataaaaagtttaaacaacggcaagaatcttcaccgtctcaaaacattcaccaattccaaaatgtggatggttcacaattagaggctcttgcttctgctgcgttactgcaagctgcaacatcagacaccacagcattggcgttgaaagaattgatagagcgaccggaaagtgaaacaaataccagaagtagcaacattgctgagattcaacaaaataatgttcaatccaccttagcggtcgtggttccaaacacctcccaaaacgagaaccaaaaatggcacacagtaggtgtgtttaaggatctttctcacacagtgactagctacattgattcgaattgtattagtgattctttttttgacggtatagatgtggataatcttccagatttcagcaagtttccacgcaccaatttggagcctggaacggcttaccgttttcgactgagtgctatcaattcttgcggacgaggagaatggggagagatatcaagttttaaaacctgtttaccaggctttccgggtgccccctcagctattaaaatttccaaggatgtcaaggagggcgctcacttaacatgggaaccaccaccagctcaaaaaactaaggagataattgaatattcagtataccttgcagttaagcctactgccaaggataaggcgttgtccactccacaattagcttttgtgcgggtttatgtaggtgcggcaaatcaatgcacagtgccgaatgcttcactatctaatgcacatgtggattgctcaaataaaccagcaattatattccgaatcgctgctcgcaatcaaaagggctatggacctgccacccaagttagatggctgcaggttattataatgattttcgaaatcgattttgcagatcccgcggcagcgaaacagcacacacccacagttacgccaaatctaaaacgtggaccagaaaaatcaactattggaagcagcaacatagcaaacaccttctgttcaccacacaagcgtggacgcaacggattgcatgattga

SEQ ID NO: 2019 - protein, 1499 aa, DROSOPHILA
MEGSDFVDPAFSSGERISASDLNSEHIIQAENHSFANRISMDMDVPDGHQLDSNLTGFRWKRVLNPTGPQPRPRHGHRAINIKELMVVFGGGNEGIVDELHVYNTVTNQWYVPVLKGDVPNGCAAYGFVVEGTRMFVFGGMIEYGKYSNELYELQATKWEWRKMYPESPDSGLSPCPRLGHSFTMVGEKIFLFGGLANESDDPKNNIPKYLNDLYILDTRGVHSHNGKWIVPKTYGDSPPPRESHTGISFATKSNGNLNLLIYGGMSGCRLGDLWLLETDSMTWSKPKTSGEAPLPRSLHSSTMIGNKMYVFGGWVPLVINDSKSTTEREWKCTNTLAVLDLETMTWENVTLDTVEENVPRARAGHCAVGIQSRLYVWSGRDGYRKAWNNQVCCKDLWYLEVSKPLYAVKVALVRASTHALELSWTATTFAAAYVLQIQKIEQPLNTSSKLLSNNIVQQGTPTSAETSGINISANRSGSALGLGVEATSTVLKLEKESLQLSGCQPETNVQPSVNDLLQSMSQPSSPASRADKDPLSSGGGTTFNLSTSVASVHPQISVISSTAAVTGNDTASPSGAINSILQKFRPVVTAVRTSTTTAVSIATSTSDPLSVRVPSTMSANVVLSSSSSTLRIVPSVTASHSLRIASSQASGNNCRSSSAINILKTALPNVAVQSQPTSSTTTSIGGKQYFIQKPLTLAPNVQLQFVKTSGGMTVQTLPKVNFTASKGTPPHGISIANPHLASGITQIQGSTVPGSQIQKPIVSGNVLKLVSPHTMAGGKLIMKNSNILQMGKVTPNVMGGKPAFVITNKQGTPLGNQQIIIVTTGGNVRSVPTSTVMTSAGGSASGTNIVSIVNSTSTTPSPLQALSGQKTLISNQSGVKMLRNISSVQASSSMAFGQKQSGTPIHQKTALYIGGKAVTVMSTNTSMAASGNKVMVLPGTSSNNSPATTTALSARKSFVFNAGGSPRTVTLATKSINAKSIPQSQPVTETNNHSVATIKDTDPMDDIIEQLDGAGDLLKLSESEGQHGSEENENNGENATSSSASALFTGGDTAGPSRAQNPIVMEHPVDIIEDVSGVSSTTDVNETAIVSGDTIESLKMSEKENDDVKSMPTTSETEAATILTTIKSAEALVLETAEIRKDHTGCTIGSLKENQDENKKFKQRQESSPSQNIHQFQNVDGSQLEALASAALLQAATSDTTALALKELIERPESETNTRSSNIAEIQQNNVQSTLAVVVPNTSQNENQKWHTVGVFKDLSHTVTSYIDSNCISDSFFDGIDVDNLPDFSKFPRTNLEPGTAYRFRLSAINSCGRGEWGEISSFKTCLPGFPGAPSAIKISKDVKEGAHLTWEPPPAQKTKEIIEYSVYLAVKPTAKDKALSTPQLAFVRVYVGAANQCTVPNASLSNAHVDCSNKPAIIFRIAARNQKGYGPATQVRWLQVIIMIFEIDFADPAAAKQHTPTVTPNLKRGPEKSTIGSSNIANTFCSPHKRGRNGLHD

SEQ ID NO: 2020 - DNA, 9051 bp, DROSOPHILA
ccaagttcctcaggtacttcgccgtatcctcgcggatacgcaagttgcgcactgtaattcgctgtttggagtccacttttgtgccgggcatgtccacttcgtccacatatttgtcctcgttgccttcctcatcggatatttcagcatcgggatctaaggggtacatgcgaatgatattaattcaactataagcactctgaattcacttttacctaccatttttcagcttctctgctttaagttgtcgcttggcctcttccaccttttcgtactcctcaatgatctctctgtgattggccggatcgtaactactccagcgatctcgtttctcgtcatagttcaccgccgcttcattgaccaaatgctcgtcgtgcacgacgatggattcagcgtacttggcttggactttccgcggccgctccaggcagtcctttcgtttgtgtgtgacggcgccacagttctcgcaggctcccttgcggaacttggtaatgatgcgtgcggtgttaagtcctttgggcgccctcttgtccagctgtccttgctcgtcctcgtgctgcggtcgctgatgcttgagagtgggcccagccgatccgtaataccatggtgcattcgatatgtactgcggaatgtggggatttatgtcgcgaccctcctcgtcgacggcggccggagctgttcccgcttttcgagcctcctccagctccttggccttgcgccagtcctcacgggacttcttcttgggttcctcctcggcatcctggtcgtgcttgctcagaatgatctgcgagaccggcgtgcgcatgggccccgagctcatattgcctgattttatttactagataatattagttgtaatatttatttctcttttatgttatcggttatcgaaaagtgttggcaagcagagaagcacttggcttaacagcgaaagtgttggacaatctgtagcacccccacgatatgtatcgcccaccttggcacatcgctaacgtttttccaataagaattggagtgaagtgaacatttttatcaatagtaatacgcgaaacagttttaaagccaataagaaaactacccagcaatgcaacggaaaatggtggacactgtgattttgtgaaactgttcgaattcgttggaaaaccaaggaaattgcctgggaaaaccaataaatttataacgctgtgcaaacgggtgcgtttaactgtgtgcgtgcgtgtgtgtataagcgcatacatatgtcgagcgtgtgtgtgtgtgtgctctagtgtgaaggcatccttaattttttcgcacacatagctgaacactttttctctgatatacaagttcctgcgcgcgcatatgaattattttattctttttgtttcattgttgattgcaatattttctgcctatttggtgtcgtgcatacccatttcacataaacattgtaaggaagcgtttcaataacttttcatttgaaacgttaaacattttctatataccaacagtagagagagcaagaaaataagagagtggtatatgtatataaaatccatcgatgggactttctaaatattactccgtgtgtggtgcttgattgtgaagcgaaaaatgtcagcgaaacgtgtatctcatagccaagcggagtggttagcatacaatttaaaaaacaatgaaatataatatttgaactacgaacatagtgcgcatttcgtatgtttaccaacactgcgttcgttagtgtcaagctgacaggtggacagtacggcaactctgccagctggaagaccttcgttttcaccaattagaaaattacaaattttccaattggacgggttagtttagttaattgagcgcacttattggcgtttcgtcaggtgtttccaattggagtgggcgtgagacgcgcgtgtattggtgggtggcagaagtgcaagtgagaggcatcattagaaattcttgttgttctctctttgttgtttaatctgtggaaaaaagctgactgcgtgtgtatgtgtgtgtgaaagtgtgagtatatttgccatacatgaacacaaagaatttgcataaaaaagtgagcaagcaatggcaatatacatatgtaatcaaagctaaacgacactgaaagtacccaagattgtgtgcgaagaaaaagggcaactaagtatgtacttgttcccaccaaattgccaattagaaaacgcgttatatcccaattggatgcgcattagactagtggcgagactagtgtacactaaacaacaatctgtggaattgcgaaataaacaaagttgcactccttggaatgatttatacgctagaaatattaccatagcagatgatggtcgcgcactattttcgacttttgttccacggactgttgtcgtttgagcgattgcctaatgtacacacacaaacgggctgaaacacagtggcagccaaaatagtagtgttgaatagtaaaagatgaaaagaattgatatttttgtaagctacagattttcgttttgcaaaaatgaatgtacatttttttctgtgaatcatgaatcctttcaattaaacccagaataagtcagtaacatactgaatcatagtagcgaaattattaatattattatctgaatatacatcacatttgaatttttttaataaatgctatataatagttaatacgcatcgttaaggaaataaataaatatatatggtgcaaattcctttaacatgtcattactattttgaccgctactgtgggcgtagatatgtgtgtgcacaaattccatcgatgcgaggcttaatcgaccttgggagtgaatcgagtataccgcatacgccattcacgagtgtcaatgacctacgccaacattggcccacagcgaaagatgcgaatggcagtcaggcgattgattaacccatcccgaattgctcttcctccgattgcagatcaggatcatcagccagccgcacaccaccacaagccgagtggtccaccgctgctccccaaacagacacgcaaggacatcgcacggaggaccgaggagcagccggatcacgaacaggatcacgaccagcaataggatctagtgcagccgaacgggacattcaccgatcgcacgaccatgttcacgggcaagctgcagatcaaggtgtgcgaggcgagtggcctgcggcccacagacttccagaagcgccacaatctcaccttcggcaaactggccgacgagcagctcatcgacccctatgtctccatagatgtcgacgagagtcacttcggtgagtgtcctcccacttcgatttcagctcaaatattcaaatatggttgggaaacaaaagtcagttagatagttacaaatgttagttacctagctaaagtgttgcatacttaaatgggatttggcagctaactttatttattatttcattatctggttattttgttacgcacagatcgagccaccacgcggccaaagacattcgatcctgtttggaacgagcagttcgtccacgacgtgaccaatgtgagcaacatcaacttgaccgtctttcatgatgctgctctgccgccggatgactttgtggccaactgcatcatctccttcgaggacctcatgcagagcgagacggctgtgcaggatctatgggtgggtttcgaacatatagtagctaaatctctaggaatacttatacttacttttacttcttgaaacctctcaggttaacttggagccgcaaggcaagattcacgtcatcattgagctaaagaatcgcacgggtacgtagcgaaataaagatttgaacaatgttcagcgaatgctgatcaattccatctgatttcagataaagccaaagccgaggccgtggtggagcacaccgtggccgtcaacaaggagttcaaagagcgcgccggattcaaccgacgtcgcggtgccatgcgtcgtcgggtccatcaggttggtgcccatttaaccagttgagaatgagcgtaactaatatgtttcctttgcttgaaaccaggtgaatgggcacaagttcatggccacgtttttgcgtcaacccaccttctgttcgcattgccgggagtttatctggtaagtggcgacgagcacacatgatcgtacaactctcgtaacgaactcaccaaagggctgaaacatctccgtacatcctaagttgtatacgcagtgattaatctgaacatgcatttagttttgggacctgatttacacacacctctcaccatccgaacttcttttgatttgtttcgattcgattcgattcggttcgtttctacttgggttgatctattacctctatgttcttaatgtaccatcaattctcatcactcatcaacgctctacttcggctcacatctttgctcctttgggtggctcattcttatgcggttttagtttccttggttctctacatccattggcattaacctggtctcttcggtgggctattatgctgcttgggtggctgctggggtcatctggggatcacgatctcatcacgcttgatttcttacggcgacactcatccattgaaagtaatacactcgcacactcgcacacaccaaaccaaaccaccaaagaaacacacaccacaaatcattcagttaccaaaatatatatatacatacaatagccatggaatttcttgcctttttgcaggggaattggtaaacaaggctatcaatgtcaaggtatgtgttttgcttcagactaaacggaattgaaaaccagagctgctcagctctggcgcttcggagctccaggatgagcccccgacaagctatatccaatccatatcactttgcatttgcttgttacgttcgttgttcgttattcgttgttcgttcgttgtttgctgttgtcgctgttgatgtggctgccattgggtttctttggctgcattttgagatcagtaatgctatcagtactattttatcatattccgaaagtattgtccagccttcggcattgtccaatgcatccatcacttgcttgagtcggaacaggtcctgtccactgtcccactgcaccataagtgaaatcgatctgtgtgctcccgtcctcgttcccatcacattgcattttaaactcacgtttaaagggaatgcagtactaattagattctattccgatcggagttacagaatattctttataggtctagaattacagatagtcttcatcgcatacacacttttaatttgtccgtccgtcagatttactcaattccatttgataatcatgcatgctatatatagataagcccagtctttcggttctataatcctaagtcagcatttaattttaagagatgaagactagacagttattaaaaaaccaatgtcaataaacataaaaacgcgaattctttaggattggactcattggtctaataaatcatctttttaaatctatttcatgatgcacgataaatttctctttggtttttaatgaatgggttcaaaatgagtatactccatggagtcgaataagaatagaaattttatataggatttcgtattatttactttaaatcattgtcatgaataaactgaactgcttttatggctgccttcgtcatttctcactctttcaagtagttttggttccaatatcaatatctctggcacgaagcatctaaatgttgtgattaaaacgaaacactaaaattagagcacagacacagaccaagcacaacctaactccactgaccaacatgtgaataatcacactgcacagcaagaaacagtcgacggtttatcaactaattactgtccaccagatcgtggcattcgaggaggatcacgagcccatttgctctcaatccgagtcgaatgtcacaatggcggactttgtgtctaaccctgaatgtttcaacgagcttagtttaaacgaaatcctgtaaatatacacattcacgtttgtctagagtttaggctaagaaggaaatcgccctgaaacaacatttactagtttgaaattatgaaatcattgcatttattgagctttgtatcttttgatagaaaatgtagatggttcattttgtgtatcatggcgatcttctttctgagctcatcgattttcatagagtcttggattcattggcctgcactctgccattgaagaatcgaagaagcaccaaatgcccagattggatactaatgatttcaactttggcttctctttcccaaaaactctagtctgcacgttagttgtacataagaaatgtcacctgtcggtggtgtccaagtgtccgggcatgcgagatgaggtaagtgccaatgggatacccccaccagatcgtaatgatctaatcgcaagcctttccagcagccagccaaagtggagatggtgccggcgggccagaggttcaatgtgaatcttccgcaccgcttcgtggtgcacagctacaagcggttcacgttctgcgaccactgcggatccctgctatacggcctgatcaagcagggattgcagtgcgagacatgcgggatgaatgtgcacaagcgatgccagaagaatgtggccaacacgtgcggcatcaacacgaagcagatggccgagatactcagttcgctgggcatctcgccggataagcagcagccgcgccgctccaagtacttgaaccagcagggcggcgaggacaactatggggcatccctgggcgccgatggcgacggtgctccggggcagtcgtttcgcagttgcgccttgtcggtggacagcctggccacatcgacgacgacgatgaccagcgggtataatagcagcagctgcatgagcctggcggtgaccggatctggaggcgttggggccaccggcgagacgcgcccgggcaagtgctccttgctggacttcaacttcatcaaggtgctgggcaagggctcgttcggcaaggtgatgctcgccgagaaaaagggcaccgacgagatctacgccatcaaggtgctcaagaaggacgcgatcatccaggacgacgacgtcgactgcaccatgacagagaagcgcatcctggcgctggccgccaaccatcccttcctgactgcgttacattcctgtttccagaccccggaccgcctgttcttcgtgatggagtacgtcaacggcggcgatctgatgttccagatacagaaggcgcgtcggttcgaggcctcgcgtgccgctttctatgcggcggaggtgactctggccctgcagtttctccacacccacggcgtcatctaccgcgacctgaagctggacaacatcctgctcgaccaggagggccactgcaagctggccgatttcggcatgtgcaaggagggcatcatgaacggcatgctgaccaccacattttgcggcactcccgactacatcgccccggagatcctcaaggagcaggagtacggcgcctccgtcgactggtgggcgctgggcgttctcatgtacgagatgatggctggccagccgccgttcgaggccgacaacgaggacgagctcttcgactccattatgcacgacgatgtcctctatcccgtttggctgtcccgcgaggcagtctccatactaaagggtgagactctgactatgctaagctactttcttactcagcatatgcatatgtactatgaaagtacattacttactcgcaagcggctgacgtgtcgtatgagtaatatttgctatgaaaactaagtcttgctgttgttttcctacatacccaggttttctcaccaaaaatccggagcagcgacttggttgcactggcgacgagaacgagatacgcaaacatccatttttcgccaaattggactggaaggagctggagaagcgcaacataaagccaccattccgaccgaaaatggtaagctaaattatatctagtaaaaacttgacctatatcgatttggcacacagaaaaatccacgcgatgccaacaacttcgatgcggagttcaccaaggaggatccagtgctcacaccgattggaaacgaggtggtgcgctgcatcaaccaggacgagttcgccggcttctcgttcgtgaatcccaagttcggaccggagcgcaaagtctactaaggcccaacgatcgcagttcatgttaacctaccagttcgatggattgcgatgcggtcgtctggagccccggtcgaattgggggtggcccaagtccagccagatcgccatcgcgacgagctgtcatccagcgaaagcagtataatattttcatttcccgtaactccccggcgcactcgccgtccccattgttgtctgtttccagtcgtagtcgtgatgcttgtcctcgtttcgttaccggtcctgtgtgttgatcactcatacgcatccaactaccagtgccaattgtcgaaactgctggcttcaaattgaattttgtggcgcacaagcccgaaacccttttccccgcttcaagctccacgcctgttggaattcatttatgttgtttgccaagctcccaaaaaaaaaaaccaaaaaaaaaaggaaagaaaagaaaagaaagaaggaagagatacccccacccatctagtcaatgcccagtggctgagtgcattttgttattagttatttattgattgtttgacgtgccgaatctcaagtttcgcactcgcagaccgacagcatccaaccagagatctatttacgggaggcgaggcacttgctccaagcgaatctcaagggaattcctaacacaatagccgaaatgtgccgtctgtaccacaaacaccacacaatacatgcgaccacacggatctagtttcatttgttttacatattcgaaatcttgcacaacttccttctcaagtattaaagcgatattattttaaagttaccttattgttaaacatgaatatttataaaacgaacaaaaacaaaaacaaaaaaaaaaaaaaaccaacaaaaacaaaatgaagccaaaaaaccctaatacaaacgcatacaatttaccaacaaaatggaaaaagaaagtaaagctaactaatcatagaggtaaagctaaacccacaaagagaatgtctataaaattcatattaatttatgctaaacaaactatgaatacaaa

SEQ ID NO: 2021 - DNA, 2587 bp, DROSOPHILA
taagaattggagtgaagtgaacatttttatcaatagtaatacgcgaaacagttttaaagccaataagaaaactacccagcaatgcaacggaaaatggtggacactgtgattttgtgaaactgttcgaattcgttggaaaaccaaggaaattgcctgggaaaaccaataaatttataacgctgtgcaaacggatcaggatcatcagccagccgcacaccaccacaagccgagtggtccaccgctgctccccaaacagacacgcaaggacatcgcacggaggaccgaggagcagccggatcacgaacaggatcacgaccagcaataggatctagtgcagccgaacgggacattcaccgatcgcacgaccatgttcacgggcaagctgcagatcaaggtgtgcgaggcgagtggcctgcggcccacagacttccagaagcgccacaatctcaccttcggcaaactggccgacgagcagctcatcgacccctatgtctccatagatgtcgacgagagtcacttcgatcgagccaccacgcggccaaagacattcgatcctgtttggaacgagcagttcgtccacgacgtgaccaatgtgagcaacatcaacttgaccgtctttcatgatgctgctctgccgccggatgactttgtggccaactgcatcatctccttcgaggacctcatgcagagcgagacggctgtgcaggatctatgggttaacttggagccgcaaggcaagattcacgtcatcattgagctaaagaatcgcacggataaagccaaagccgaggccgtggtggagcacaccgtggccgtcaacaaggagttcaaagagcgcgccggattcaaccgacgtcgcggtgccatgcgtcgtcgggtccatcaggtgaatgggcacaagttcatggccacgtttttgcgtcaacccaccttctgttcgcattgccgggagtttatctggggaattggtaaacaaggctatcaatgtcaagtctgcacgttagttgtacataagaaatgtcacctgtcggtggtgtccaagtgtccgggcatgcgagatgagcagccagccaaagtggagatggtgccggcgggccagaggttcaatgtgaatcttccgcaccgcttcgtggtgcacagctacaagcggttcacgttctgcgaccactgcggatccctgctatacggcctgatcaagcagggattgcagtgcgagacatgcgggatgaatgtgcacaagcgatgccagaagaatgtggccaacacgtgcggcatcaacacgaagcagatggccgagatactcagttcgctgggcatctcgccggataagcagcagccgcgccgctccaagtacttgaaccagcagggcggcgaggacaactatggggcatccctgggcgccgatggcgacggtgctccggggcagtcgtttcgcagttgcgccttgtcggtggacagcctggccacatcgacgacgacgatgaccagcgggtataatagcagcagctgcatgagcctggcggtgaccggatctggaggcgttggggccaccggcgagacgcgcccgggcaagtgctccttgctggacttcaacttcatcaaggtgctgggcaagggctcgttcggcaaggtgatgctcgccgagaaaaagggcaccgacgagatctacgccatcaaggtgctcaagaaggacgcgatcatccaggacgacgacgtcgactgcaccatgacagagaagcgcatcctggcgctggccgccaaccatcccttcctgactgcgttacattcctgtttccagaccccggaccgcctgttcttcgtgatggagtacgtcaacggcggcgatctgatgttccagatacagaaggcgcgtcggttcgaggcctcgcgtgccgctttctatgcggcggaggtgactctggccctgcagtttctccacacccacggcgtcatctaccgcgacctgaagctggacaacatcctgctcgaccaggagggccactgcaagctggccgatttcggcatgtgcaaggagggcatcatgaacggcatgctgaccaccacattttgcggcactcccgactacatcgccccggagatcctcaaggagcaggagtacggcgcctccgtcgactggtgggcgctgggcgttctcatgtacgagatgatggctggccagccgccgttcgaggccgacaacgaggacgagctcttcgactccattatgcacgacgatgtcctctatcccgtttggctgtcccgcgaggcagtctccatactaaagggttttctcaccaaaaatccggagcagcgacttggttgcactggcgacgagaacgagatacgcaaacatccatttttcgccaaattggactggaaggagctggagaagcgcaacataaagccaccattccgaccgaaaatgaaaaatccacgcgatgccaacaacttcgatgcggagttcaccaaggaggatccagtgctcacaccgattggaaacgaggtggtgcgctgcatcaaccaggacgagttcgccggcttctcgttcgtgaatcccaagttcggaccggagcgcaaagtctactaa

SEQ ID NO: 2022 - protein, 739 aa, DROSOPHILA
MFTGKLQIKVCEASGLRPTDFQKRHNLTFGKLADEQLIDPYVSIDVDESHFDRATTRPKTFDPVWNEQFVHDVTNVSNINLTVFHDAALPPDDFVANCIISFEDLMQSETAVQDLWVNLEPQGKIHVIIELKNRTDKAKAEAVVEHTVAVNKEFKERAGFNRRRGAMRRRVHQVNGHKFMATFLRQPTFCSHCREFIWGIGKQGYQCQVCTLVVHKKCHLSVVSKCPGMRDEQPAKVEMVPAGQRFNVNLPHRFVVHSYKRFTFCDHCGSLLYGLIKQGLQCETCGMNVHKRCQKNVANTCGINTKQMAEILSSLGISPDKQQPRRSKYLNQQGGEDNYGASLGADGDGAPGQSFRSCALSVDSLATSTTTMTSGYNSSSCMSLAVTGSGGVGATGETRPGKCSLLDFNFIKVLGKGSFGKVMLAEKKGTDEIYAIKVLKKDAIIQDDDVDCTMTEKRILALAANHPFLTALHSCFQTPDRLFFVMEYVNGGDLMFQIQKARRFEASRAAFYAAEVTLALQFLHTHGVIYRDLKLDNILLDQEGHCKLADFGMCKEGIMNGMLTTTFCGTPDYIAPEILKEQEYGASVDWWALGVLMYEMMAGQPPFEADNEDELFDSIMHDDVLYPVWLSREAVSILKGFLTKNPEQRLGCTGDENEIRKHPFFAKLDWKELEKRNIKPPFRPKMKNPRDANNFDAEFTKEDPVLTPIGNEVVRCINQDEFAGFSFVNPKFGPERKVY

SEQ ID NO: 2023 - DNA, 49243 bp, DROSOPHILA
ggttggttgtttgttgcaaatatcataatgcacttctcacagtgctacatacacatacaataaaaacatgcacacttatttgactagatctatatgtataggtatgtctgtattacgtctgatgcagcttcgatctaaacataaaagtaatgcttaatgtttggtatcacagagaggcgtgacttttcatacaaaatacaacgaaagactaatgcagaaagttacaaaatacaatttagttcttctcacttgagctgcagcctgaaccgcacagtgtatacatatatatatataggctacctttactatatgtttatataataatatatctttttagacagagccgcagggggctgggtatttacagtggatagcttcttgctcaaaacgtaaatatatctaggttaatcagtaggcttaatttggctgcaatctgcagtttgtaaatttaatttttggctcagtttgagtatcgcaaatcaactaactacgctggcaaattttgggatggggactgtgggatctttttcttgttctgggaggtatcaatagattcgataacgattgtgtctcatatccggtgctgattgttttcgaaacataaaaggaaccgtagaaacctgtcacagttacaaccgtgtgtgtgtgtgtgtatgattggttggtgagtgtgattgtgtgcgtggcacgcaccacgtcgattgcttagttctacatttaaaattacaacaacaagttacatttagaggagtcgtctacaattcgcacattgctgcaagtttcagggggtgcacatatacagagatacgcactactagcactactacatacaaatatccatgtgtgtgtactggggtggtggcaatatgcggggaaaggtaatatttgctctgctttccgtacgttttcttttgagtcaatggggggtctgcaatcaatgtaacccttataaacatatcgttaaatttaatagaaaattaatttatagacaattaacggacatgatcaaactctcagttacaaataatattagatgattatttctgctaaataaactataccaacgcggtactttaaacagcccagagcctgattttcccacttaaaactttacatttcctaattgtttaagatgtacaccccagtgtttatacctaagtgtgtgagtgtgtcgagcagaggagttcgcttcttccggaaacctagggaagacccttcgagcagctcagattcgcttggataggctcctttctccggaatggaggtcctcgtggatggcctagagaaagctctccctcgccccgtgcctctcatcgcccagcatcacccgctgcgagggaggctcgccatactgatcctggtagtagttctcccgcatcatggtgttcaggctggagcagcggaagtagaggatctcctggaagggtttgcggaaatccctgttcagagtggcgtagataatagggttcagcagggagttggcatagcccagccagaggaatagagacgagagcgatgccggtacgtgcattgtctcgaaaggacgaattagggccaggataaagaatggcagccagcagacggtaaaggccgacatgatgatgcccagagtggtggaggccttcttctctttggccagttgaaaccgcagcttcttgtggtgcggagagcccaggagtccggtcgaaccactaacgccacccccactgccgtgcccagccagtgcgcctcctccgctgctcagacccccacaggtggagtaggtgagcgaagtgttgcccacgctgctgtgcctctggccatttcccgagctggccagctccgtgtggcccaagggcggagcctgcggggccgatggcgatcctgtgccattgagcgcctgttgcaaatgcgtctgggcgcgtttctcttccaggacaatccgcctcgccgccctgaagatctggtagtacacaaacagcatcaccgagagtggtatgtaaaatgagcccagggtggcgtagatctgatatgcgaagttctggcacaccgtgcagataggctggccctcctcgtcctcgtgctcgttgcccaggatcagcagaggaggcaatgagatgcaggcggcggccagccagacgatgcccacgcacagcatcattcgccgaggagtcctcttcacgccgtactccaggggcttcgtgatggccaggtatcgatccacggatatggcacacagattcaggatcgaggccgtgcagcacagcacatcgaaggacacccagatgtcgcagagcagcggtccaaagttccacttctccagcacttcataaagcaaggccatgggcatcaccagaagagccacacagagatccgaaagagccaaggacaccaaaaggtaattgcagggtctcctcaatttccgcaccatgcaaacggctatgcagaccaggacattgcccactacagtgcctaggatcacgatgagaaggacgatgctcacgaatatggacgtcaacgggggcagtacaaactcgccggctgcaaattcctccaggagcaaaggagtgtccgatagcggcaccaaagtcgtattgctgtcgcccaaattgctgctggtgatgccttgatacgagactatggcaatggggctgctgttcatcgaggccaggccataggatcctgatcccgatcccgatcccgagcccgagcccgagcccgatcccgatcccgtcgatgaggccgaggctatggcccccaggaaggcgctactgctattaaagtcctgcgaagtggccgactccgtctcgccttccacgagcggagcgggaacggtggccttgcccgccgcataggctatccagctgctcagaaagagcacgaacagagtcagcgtggcggtggagatcagtttctggtggtttccctgggttctgtggtttctgtgctggcggtggctctgatggcgccgccagtcctgtccagataaagccatcagcagtctttcaatggtggcagcgggctaacgcggcatatgagcaacccagtgctgacctgctgcccagcataatcgcctcttcgagcctcagaatcattgcgtatacgccaccgtgccgcgttttacttcggcactcttgtcattaatcataatttcaataaaaatagagccctcttattagtttcgcctcgagccgcgtcgcttgattactaatttatgtggggcggttgcttaataaaaatgctgcctgaggctaccagttgatgtggtcattgacgtttatgccttgtactccggttatctccttcaataaatctctgtggcttgccgcagtcggtttcgcagactatgtgattgtcgtcgggactgcaaaatagaaggggaggaaattcattactcagctggatttataaagtgaaaatggcagtgtcttaaagactatatttaaattctcttaaaattctgaggcctggggccgtcatttgtcctacacttttacattctcttcatcacttttccgagcacacaaagacctcaacacacgcacatgtcgccctaatgatggtcacagttgttacattttccagagaaaatttttaaacaatgaaacaatgggagaaaaaggaaaataatagagaagaaaccgcgaaccacgttttcatggcccggcggctatcagcagatggtttgtgtacccgccaagagttttccccattttcccagccacgcggtgaatcatcagagcctgtcgttcgtccttttgtattaattttcatacttcttttgattattgaattgttggctccccgcgtgacccaaaccgcagaccacgcccccaccaccgcctactcttccgcccaccagcacttgacgctcttcgaaatgcgaaacaaataaacaaagggcagctaaaaggcggtggcgcctccgccattgttgcggccattttcgttggaagcttccgtttggcatttttatttatttcgccttttcccccctggccttctgcctttgtggtcagtagtcctagaggaaaaggaaggatcgaaaagcagggctcagaaatacaatttatacatttcttcctaattgaattccattgccaggcattcgaaaggtgtcgtcgaacctctcgcacttgagaaggcgctttaaaacgccatttgcgagtcccgtactcatatgtcgccctgcgcgatttattgaattgaaggcaaacaagtggcaattgagccaagaaaatcaagaaaatggaatgtgaggcaaggacgtctagacggccagacaatgccacacctgtgcgccaggtgtcacactcagaaattgtgtgaaactgggagcaagttgcagggcaacaaatcgaagctggagctcagcatcattataaaactattccctgaggaaaaaaaactaggtggccgaactggtcaagaattacaagtaagtgaattggttcacaagacataaacctcccgcttaaaggtcgtgtctataattatacaaacaataatttgcatacatttttaagttggaaatttcattgaaactatacgtttccattttcattaaaaaactttaaaaatactcgcacgttctatttttcctgctcaatattagccggtttaatttaaccattgaaaatagttgacagtttattgcccaaacattccgagtgtcactaaattctgaacaagtagaacaacaaagaggcatgtacacgaaaaccagcaaactaatcgtccgggcataatgataaatagcattgcaaaacattgctgtgtttggttttgaaatttttggaaaattcatctccagcggtaaattgttgggcaattgaaatttcgaaatgcgcacgagttcatttcgtgattgctgtgctgccagtttgtgcgaatgcactcgaatttatttgcttttggcggctggctgcgctcgagtgactttcggtgttaattatgctaatcaaggggacaagatggcccaattatttggtcagcaaatagcgagtcgtaagccgctttaagcctcgccgtccggagctgcgacttttgtccgggtgaattctcctggcaacgggacataaataatgtaatttaattatgaatcgttcgggggcgcatggtgggcgatttggcagctaaggcttagagatgcctcctctgttggcagtggccttatttgtattattgccaaagctgacaggggcgtaaatattcataggttttaatatttatgtccttcgtcctgcacgagcaactttctttcagccagcttcttcctgcccccgtatctggcattcctcctgcggaagcagaacttttcaaatatttggcagtttctctggcttttgcggcagcgtcttgaggtttgccgcagccgctcgactttgctgacaggccctcttcatcagctgaatcccattcgaaatgtgggagaaacccagttcctaaacaagtgtaattttagttggccaactgctacactttgttggaaggcagcaaatagtttactgcggagatttccatttagatttatgccgccaccccttctgcgttattaagtgctgtgcggatttactggcttctctttcagttaacacaaaatatattttatggtcgcgctgacgctttcaaatccttcagttttcatcggccccaaataagctcatccagggaaaagataaaggctggatgcgcataaagtgctttttaaaatcagcgagcgtaaacttaatttttgcagatatcgccgcaattgtttcaagcagcccgctcgagtatcccccacagcagccactcaaaaactaaagaactgcgaaacccgaaagggaatgcgatgcagttgatggttgcagtttatggtctgctgccccgcccaccagtcccccagtccaccagccccgctttttatggggtttggtttggcttggcgccgccactctggcgcattaagattttctttcgctttttaccacacacagacagcatttttaaagccaagcagatttgcggctgagcagcgaaagtcacgaagcaagtgactcactggtgaacatggccaaagtgcaggcggcaagccacggaagattaagcctgtgcggcccactagccgtatgcgcaatgttcggccaatcatttcagtgaataatatggtgtaaacataattcctcaagggcctcttttaggcagcagacaaaaaccatcttaagatgtagtacaaatctcttggctttctgttcatttaaagaaggtgccagaaattatgtagtgtgcctttgtaaaaggatcctaagctccaatcgtatataaaaggtcattttacgtcttttcaaatgcttacaagatataaattcctagccaaccagtaagttcagacagcttaaaagtatgaatgtttaaatgtaatatatatccccaaaaagacagaaaactgcaagaaggaaacctcaggagattaaaatctctgcattgaacacggagagtgcgtaaggttgcgtatacgccatgttcgcccactcatttcatatgctttgccagcgcttttcaattacaaagtcataaaatttgatttttcaagctccgcattcaatttttgcctcaactctgcttatttacggcccactcgcatgcgttatccttgcagcatttttgccatttgccaagtgcccgatgtaatttcaacctgacacatcacacgagggacacgtctcgtctcgagagctcacaaaattgctgtaaatggatgcgagttaaaaagccagcaattttaaattgccgctgtcgacattggcgccccttttttggggtacattgcctggccggggaaaagggggcccgaaatgggcttccgaggggtgaattcttccgcacttgatgtttatgtgtcaagctgctgctggttacattgccttacactttttccgctcggcgtttggcgtggttataaataatgaatgcgttgatttcgaatcatatatttatgccagagaggttacacccaccaacaaaataggggaagcaatcagaggactaaatttcaaatttcttgattgctattttatttgtgaattattttatatatttttttttaaataatttttaaagtggtcaatcgaaaatcaccctttgtgccgcgctctctcaaagtcaaggtcagggagggaaaagcataaaaataagtggaaaatgtgagcggattattgtttaccattaattttgtttgagagtgtttgacaacagctcgtgtaaaattcctggcatatgtaggcatttcgggtgtgtgtgcttgcctgtttatttgtgggcataataaaatttgttcacaaaacatgtgtagaaacgagaggcagaacaaaaacatttgcttatctttaggaattcgcatcgttcttgttccgacatttccactggtgtttcatttttgataatgtttttgcatttaaagtttacgtgggcgtatgagtgatatgatttgcatacgaggaagcgctagtctgcgtgtgccacgtaataaagcattgagttttacataaattgcgggtacggcctgtttcgtttcgtcttcttttccgtttcctgttggaaaacaacacgaaatacgttttgctttccccattcccgcatttccgcaaagcatttgcatatttcggggctgcttcttatagtcctttgttattttcatttgattatttatggcgccatatgaagctccgaaaaaagaaacatcgatgattcccgccaaaggaatttatgctcgcaacataaatgcccgttttgtcaagtcaaacatttgttgttgcccttttatagctcattctgttgttgtcggttgttttttcgcacaatttattggttttaaaattatttctctggcgcgctgtgacatcatcataaaaaatacaatttcgcatttatttacggaaatatttcagttgatgtgtcgcctttgtccttgtgaattgttcattgtccactgtccattgtcctgccgcccctttcagcacgtggcggggaagggggggggcgataatcacaactgctaattgttggcaaatttccaacttgttggccttctgttcgcaacacgtccaagtcaggggcttcaatcaatgtaatggctcaccaccagtcgggccaattgcaatcgatttgatttttcgccctgctcacagaagaagccatttaatcccagtttcagatacaaaagcaagggacatctgataccgatgctttaatctaatgcaatctaatccggctggggaaaatgcagcagctgcatcgcaacaaagtgcatcgctggcccacaattttccactcaatatacttgtgctgacttttatgaggctgccggacaaacgtggcatgccttcgctcatgatcctgtgagtgagtcataaaatctttttatatggctgccggataactttgtctcttagctgccactaattgaattgttttccaagggccctggagaatgcattcagtgcggtataatgccaaaattaaattcctcggaagcttaagtagatgcactcagcataaaaataaaaaaaaaccatggataaagaagcagcgaaatcttcaaatccgcattgtctcgttgaataagttgccaataataatgactgaagcgcaaaatttttcaaactagcttgtattctatcaaaattcctgatactttaggatgttaaaattttaatcttatttaatgtaataaaaaatcacacaacacctgtgataatcgtcaaattttcctacctgctaaatttaatcccctgttatcctatttcatgatagaatttaaagattaaacatattttggctttaattccttttgggaatttcctacgatgaaaggctcacctacttgctatctctttttctgcctttaagcccgtctctttctagtcttaaagctcagtggacgtcttcagcgcgtttctgcaatgaatgagataagtgatgaggtgtgtgtaagtaattaaagaacctaacgcataatggaagttaagtgcgtgtatggtagtggtgttggtgttaccagattattgagagcgtgtgatgtggatatgtgagtgtcaggtgctccatcaaatcgcgagacatgacgtaggcgtgagtttcgccattgaatttcccacgacagaccccattctcaccctttaaccacgcgagattttgttttatgtaaatataataagcgcctgtctgcgtgtgcgagtgtctggcagagacggcatcaatcatacgccatgttgtgctgcgttgaatggtggctaaacaggcggaaacgctaaaacgcgcgcgctcactcacacaaaaccacgcaagttgcaaaattgaaaatttatcgtctagaacacacgcacactaaaccgcaacatgaacagcgggcgctaacaagaaattgtcagcaacaaattcagccggcaacggcaactgcacagcagcaacagaacagcagcagcaacgcacaacaacatcaacctgccatttcatgaaccttcaactaagttgagctgttgcatgcgcttcatcaacgtcatgcttagtcgcattcgagacattgtaggcattgcatttgcaacagagtgcagcagaatggagcagatatcgcagtggggagagtgtcggttcaagtgggtggcgtagggcacagccgataaaaattcccaacgtgcagccactgggagccccaatcactccattcgcagtgactatgtttgctccattccgcatttggattaactcgcacatagcacagaatacgaaaagttggcactataagaagaaacaatttggaattttgtatttgttaactgagtgttaacttaaacaaataagaatgcagtctacaataaaatttaaaaaaatttattcttgttaaaaagtttgattactttttcggtcggtatagtttcaggaaaaaaatagaaaattccttttgtccaactgaaatgaaactgtgctagatttttctgagtgcaaatttgtggtggctcagtgaatgacaaatttatttgcccacaactcccagacaagcacgattcccgaatgacatttatgagatctgactattcagcaggggaattcgcttgcatcctgtgcggagcgctgtggcccttacattgcgcaagctgaaccagttagatggctaatttatgaatacagttgcatttgaaatcaaattacctacgcctgcaaccgaggtaacaaggtaacaagaaaatacaaattacaagccataataggagaaattccagtggctcacaaaaaagaatcgcacaatgcatttccatgcgccgttaagtgcgaatggaaaaaacacagcggatctaggaaaagcctaggaaaaacccggtgagcagggaaaagcgaggcgggccaggcgacatgtgtgtgtttttctgacactggataaagataatcaacttccgtcatcaggagaaatgcggcatggcggcaacagctcgacagtttttaattgagtttacgcttcgtgtgctgcgttatgaaagtgtgtgtgcatactgtagcgagtgtgtgtgggtacacaggcaaaaaaattatggtctgatgcatttgatatagttttattcataaaattataaaatgtatttatgcccagttaagtcattgcagcacattataggaaatatatcttgctgcaaagttcacattgcatatcctatacaccttgttaaaaatggttaaggatgctttttctccgtgttaatgtgggggaaagcgcattatttgcactcagctggaaatgactcgctttgcggttcttgcacttacacttggcgttctttatgcactcgtatgccctatttgccgagcgtctgccaagatttttaattaagttaatgaagtgcatcgtgtggtttttgaccacatctaggaacattgccaaggagtcgcgttgcccgtgcttatccagtcccctttaataaggacattaggggaaatctgcggcactcaacacattgtatctatttaccgcctgccgcatggaaagcaataaaggatagcaatgcgctgatcttgaaagctggagggggggataaaaaatgaagctcagttccgaaacttccggttgctggcgcaagtaaacattaaatatttatgacgctgcacaaaaaatgcaatcaaaaacgtgagaaaagtttctattgcatatttatgtgcgcactgagcggaaagcgcatcaaggaggaaaaaaagctgctaaaatattgcacaaaattctgagctggctttgtaatgctcttacttggaattgaaacaagctgattactacacttgcaactgattttttcgtattatttggggaggtattacaatgaatatgttttcttttcgtcaagcagtttttttcttagtttatgattgggtaaaagatttaaaataaacttaattaaatatttttaaaacagctgcgaataccacagcatagttatcaataaaatagcatcacataataagcaactatttcacagagtttagttcccctttcaaatgcaaggcacaatagactcgaactcgctgtgaaatgtaatgaatataaaagtgttgccgacgacgaaggtcggggctttttgggaggtgcagagcttttgagagcgctgcaccaaaatggttttcaatttagttaatttatggtgcgcattgttggctctgaagtcgcactggcacacaatgggcatatttattgccgttttattttcccatttcaatgcaattacccaagccgactccagtaccaagcgaaatgtatgcttataaatggatatttttgacggtattgggtggaggggaagagctcagtgctccatgagacggcggaaagtgctgagccaagaatatatacccttaaaacatatatctcagtgtccattgtgggaccagctgtccgaaaagcggcacttatccaatttgagaagccacaatgcccaaggatctggccgcccgtaaattgcggggccgccaggttggaggacactagaacacatgtcggggaatggaacaccctcgctcctccagcgcctgttaagtgcaaagttttaacgctggttagcagctgctaattagcataaagttggctcaactttcgcgccactgtggcacacattcactgggaaaaaaaggcccttaacaatctggaagggaatctgtggagacagaaaagtgtacggcctagtttcacataaactttcaacaagatggcttactatatgtcactaatattagctttaatttttgtggtaataccaaagccaattaaaggatttttcgtgttcagccattatatttctaaagagaagacactatatttccaccatgaaaccacgttgaatctccaattttatgccgtgtaacagcagacgagaggggctccatgctccattcattccgctttttgacagcgtcacttgccttagtctgcgtgacgctgcagcatctcggagggatccttcagctcatcctgctccttgttctccccgctcgggctttgcgcgaccattcctcattgctcccaggatggcgccggctttcgctgccgtcttttgtttagcttgaagcacgtctcgctcatctctttgataaatattagtttaattccttgcaggagatggaacttcaaggctgccgcttcagcctctttagtggctcgttttcttatttcttattttatacaattattcggtttctttttccacactttattttgtgtcctttgtttggcatttcatttcatttcatttcgcccgcctgactaagtgaaaaatgtaaatatttttctttgattgaaatccaagtatcgaacttacagagctgctggtaactcgatcagctgaaaattgatggaaaatcgttggactcgaaatgttttaatttaagcaaaaccaatttcattatttgatttaatattgtcttgaaattaagttttcagcaattgcattatttctcttagtgagtaaccagtactttattcgtccttctccgaccaattgattttcattccagaatatccatttatatgtcatccgaatttcgtttttcagcatatattcaagagaaatgcgcaaagaaagtggtgccaacttaattcgatgccgggtggctgaaatccgaccaaatctcttggctctaataggcgtcctgcaatttggcccattcaggagaatggtttccattgaacggctttgcaatcaatgaaagctacttctttttggcgttttgcctctgtcgaaaactgggaaaattggcaagtgacaacctcggtgcatttcggtttccggactcattcattgagggaaaaatactgcgtttgcggtccattcatgaggcactccaacgcacacagatgccatccgtccgcttttcctctgtgacaatctgtctgacatttgccagatttccgaaggccaacaaaacgggtttctcgcatacgatatcaccttcccagttcccttgagatgatgtatgatttgatgacagtgcggcgtgacgtttaaattgaattttcgattcaagcatgtttatttcacatctgactttgtccaaacttttctgccgagcacattctaaatttaaccgaaaaggcaggcacacaaaaagccaaatacaagatatttccgctgacagtgatgtgcgtatatatctttgaaagcatggcgaggggaaaagttccatcgggcaaaaacgacaggtgcaaatgtcgctgctgggtcgagtaatttgtcggaaaagttcagcggttgtcagcggtccgcaaacttttaccacttgtcatgctgacccttccgccaaattttgaagtgagcggggacactaaaaaatagcaacaattactgctcatgttatttaagttttaattaatcacaatttttatgttcaattaactaatagaattaaatataatagaatttaatatatccaaagactgcagctcaatttaaatctagcgttttaatttatttttaataaaataattgcagctctcttaatgggctttccacgacattttccgtaaagcccgcttaattgagcggcccaaaaagcaacattgactcgcccggggcagtgcagcacaaaaatgcaaacagcagccggagagcaagagccgccaccccaaggagtcctaccaaaacacgggggcaaccggacacttgttgcggcagtacggagccaaaggatgcgtcagcagaaggaaaaggatgtaggaggacccggctgcctgttgcaacttctccgagcatccggactccaaggataacccaatgaggagccccaggcccttcgcaaacagtctggagatggaggaaggaaggaatatacaatttaaacgtttccaaattgattccgatggccagcaagctgcaattccatttgcccactgctgattgaagtggaaaattgcagaaaatatatgaaaatgatttatcgtgccagaagtttcgagaaagcaaacaaattttgattatgttaattgccagaaaattggtagttactaggccacgtgcgaaattttgagtttcttcagctgctcgtcagaagaatttgaaactttgctgactatgcaacttcagtacatttgaaaacttctgctgcctaagcctgactttatacactgtcaaatatcaaacatttacttataaaaactgcatttttagaagaagattatggaggtcccttttctctcagtgcaccgaaccccttaacggtataaaaatagcttttttactactttatgcaaacttgtcaccaagtgaactctttgccccgcgccccgagcaccgaccaagcacaacaagtggctcctggcttggcaggggaatttaattaaaaagtttttatgcgttccgccagagccgcaacaacaacagcgaacaagaggcgcagcaacaaaagtgcgggtttgtcaaggggacaaacaacaacaaagctttatctcggcgcagacttttgcgcctattttctgagaggttttcctcagtttttcgccgctcctccgaaaaatgtccttgctcgccgcatagttgcagctaaaaaacacagactaaaagtttgttgcttttttagtggcatgtaaatttgcaaattcatatttatgcgaggaccgagctgaaatagtttacccaaagaagctgaaatgatgcagcaatttgcggaaagttatgcgctgtcactttcagaggaaaaatggtttcggcgaaagcgaaattgttgcacatttgaagcacataaaattctgtaggagccccatcaaattttaagccccgttggccacaaagcctgacttcgaaagcataaaaaatggtttaaacgatgccagaacttatcattatttatcagtgccataatagaataattaattcgatgctgcctctatgtattaaatgtgtgcattaatttatacattcaactaatttaattatttaaatatttcgaattatttcgatttcaaaccatttataccaacattccgtagcaatagaaaaaatactggaaaatcaaataatacacaatagagttcaacttatcaatgtacaaataggattatttcaggggaattatgatttatgctagcaggcttaaaaaacggaagcttacatttgcataattcaaattaatttcatcgtagcattaactttataacaaccttatcttttttgttaggtctaacaattgcaatttaaaaggctaggcaagtacggagcgaagaaaggtccttttgtgcttatcccgaccacaatccaattgagttactaccactttgcattcaaggaccaattagccgaggttgccgcttttcgttgcagcgaaagtccttgagcatctggccggaattgtcttgaccaaaagaaaggcggcttactgcgctggaaagcgcatttgcggttgagtttttccgctaattttcgccgaagaaaagccagcaatttccccttcggactcgctcgactggtcgaaacggaagtgggcgctaattgaggcgctcttcttcgtcgttgtagacaagttgcaaacattgtatctgcctggatgtcagtcgaaccccagagaactgtctgccaccactccatgctgacccatccaatcgtattaccacaaattatgtcacgtattagcggagtgaaaaactttggcgagagaccagaacttttatgacataattgaactctgcgtcggttaagttttggtttcggtttcgcaccagtgaagcaaagtttttaatgtcaacatataagcaccccttgtgcactttccagaggacatcggtacatcgccgcaggattaggacgatggagctggagatggagacatatccatgcatgcgccggcgaatcgccaatcaacatcatcgtcaacggcgacggcgactataaccgcagccatcacaaatgccattagagaggcaactgggttgtggcccccagcaaggacattgcgccgcttccactcaccacccaccagtcagcaggaacaacgaggtcctagtggcattagtaaccaccaagccctctcggaaaaatacagaacggcagctcaactaacgcatcgtaaattgagatttctatttattgtcggcgaccacataacactgagaaaaaagtgtgatcccatgtaaagtcaagagcaaagatatataaaaagacatataaaaatgatatgtttatagattgcattttgacggcttcactgcagattctatagcttgtaagaactattcacagatctacatcaatttttcgcattcgtttctttgtatagacaggagttcatcaagtgtacgctatatttctgtgggttcagttcagctcagttgggttggcttagttttatgcagtccagtcacccacatccacatccactttccatttccccccaaatgtcaccaagttgacgcggtctggcgactttataaagtcgcttaagcatttttaatggacttttaagtttgctttattgtttcattttcactgcctttatgttgatacactgtatacttgcgaatacatttttatgtgcaatgggatactgaattcctaagataaaaaggttttaactcgaactttttaatgcataaactattttatgtaagctagttggtttgattcttcataactgtaattttattaaactaatttcggtcgaattcataacgtctatgaatttcaaactgtttccccgttgactcattagctttgtgaatttaccaccaaattgagttatttatatacctttgtcatgctaatattgatgttatataagtgatttccgcccactgggcgtactcgagtaaactgtgataaagttaatacgtatttgcattgcaatcagctaaatttccttaatcagaactaaataaacttcactcacaaatggctaaggaccttctccaatttctccttttttccttcgggcgatgagagcagggcaaatacaattaaccatagctgcacgattgtttcgctactgaaattccgtccattctattaatacatatttgatctacttatttcaatcaatgttctgtcaactacttttcgggtgccccccacctcctcattctaccgagctaaacaaactgtcaatcatagggaaaatcccccgggggaaatgtcctgtaggcgctggctttattatggaaattaaattgatatttaagtgacacattgcggcggcggggtgagcaggatgattttcgtctgacggcaaattgttggcccatacgcccattgttaaggcgaaattaaatttttataggcttaaactgggctcagctgttgtacttttgtgggcgtttcggcccaaaaatatgcctcgccatctaatgaagcagcaagcaactgggtgagtgtgtgtggtgtgtttgtgtatggtcagcttatggtttttggcccgtcattttggtattttgacctttcggctgtagggtttaattaatatgcaaatggacaaagagcaggcaaggagttagccagaccggagagcaatttaaatttagttctcccatctttaatgaactccgaagcgccggaaagttgtgtttctgaaatatttattggaccgcaacttggtccacatgctggaattaccaacttttcggggcctcgggcagccaaagcaattctgctggtcctctccatattcatggggtttctggacgccatttgcaattcgaatgcagtgcatttccggttttcggaaatgcatttccgcttccgccggccattgctctgcagctccgcatccttgcagccgtgcagcgttcgccacagtttgctgcacatcaatttgatatttgacagatgcgctcaaaactaatgcacttactagccattcaaccaatttggttacacgattttgatgcaatttattgcattgcacgccccactgcccgaccacttgtgaaattgatttgatttttattagcattttatgcgatttgcccaagtgtccgtggagcgagttgcccggggaattaaattaaacacgttctgctcggtcggccagcagaaagtgctctccatacacacacacacacacacacacacacaccgaccttgtgtggccagtggaacagtgaaccaggtggaccagccatttctcattgtttgcccgcagccggttttcctcgcttttcctttttcctgtggccacgcccccatgcacacacaaaacacacgccggcgaccattacactgaaaactacgcagtattctgtccttcctttataaacaccaaaatggaagcttaactatttaagcaaatcttgttagttatctattagtagagcatatggtaaattctcttatgcataaaactgaaatcaattcattgttgaaagtatttaaagtaatgtcggaaaatattcccgatacatacatacaccacaataaagagttaaaacacgtctgactcgcagttgaatgcgtgtttgccatatcgaatttcacactttcccctctgcgtttccacccgcagtgctttctttgggcgggaaaagcggaaaaaagaaacaagggcaacagggaaattcggtggcaacaaaaagaggcaatcaatgaaacgcttttgctgttgcactcgtcacctgccaatgcaactgcaactgcaactgcaaatccatctgcatctggccggaattgtgtgttggattttgctgtctcgcccttaatgtgttttcccgctttttgcctgccgtacatcatatttcacatcagatatggattctgccccgcttggtaatgacagcaaaataacgatatcgtcagcaattcagcaaatgacaggataccccaatttcgggtgtctcgtcaacagaacgttattgagaattgtactaaataagtaaactttaattaaagaggacatcttcatgtgcaaaagcacccgcaaaattcaatgggaacacgaagtccgtgccagtggtaactgagaggggagcactagtttccaattcaaagactcttaattggacgtaattatggcttgacctgactgccatgtcagatcccagctgcactcgaccccagttcacactaacgtgccgaccagttccgctgaccgcagtgggaggtccttgctgccaggaccagctttttggccaggatgtgccagatcatcggtggccggggctgcaggatgccctctttaagagcgtgtgagccgggcaagttttgagcacataataaatatttattaggcccgctgctgctggccaaaatttaatttgttttcattaagccaggcaaagcgcttaagacagctgcaaatatacagttcagcttccttgagtgcaatttggttagactcgtaaaaaagaagaggcaattggctcaaaactttaacaactttagagaatttaatgacagctatgtgtctatttttatagatataaaacacgaatttaaaagcttagttctaagacagtattcgttccatttgcaattattgctgtggaatgcttcaacgaatgtattatttttacgtctgccttttagcggaaatggcattcttcaattattaaaacatgacataaccgccaagtgtttcaggttaggcaggcttgactgtataatgcgtacgagttccccggaggagttgggtgctgcgaaaatatgctcgaaattaaaaagggtattctctctggggtcctcaatgtcagcgtcgtcgccttgacgtggccaaaaacatttcgctggcttaattgcgcgcaagccaagcagataaaaaaacaaaatgaaaaagtttggggcccaccgaaaaaaaaaaacggaaaaacgcgaaaacgcgaaacaaaagcgctcaaagcgaggagaaaagcgcgttcaacgctgaaatcggtggggaggggtttcatttttgggcggtggtgaagtaacataacaaaacaaaattaaagtaaatatgcgcccggatccacagacaaagtagaaaggcaaacaaagccgagatcctgacaaggggtcgagcgacaggcgccagaagagccaggagaggcaaggatgacagtaaacaaaatcacaattaactgagaatgacgaaaaataacagcgccaaaggagcagcgagcatgtgacaatggggcagctttaaagtggtaaaaaaaaaacaggggaagctcaaggacgaaggacctgtcataaagcattttaattgcgcacccacatcgcctgaacttgattggaagtgctgaagtctattcaaattggacccaaggacaaaatggaatatttaatgattggaaaagggttttcgggctgtaatgcgcagattatagtgacaatgacatggcagcggagctctaataaatgtctgtgaagcaatagggttactattatccctgtatctgcaggggtaaaataattaaactattagcaagtctagtaactaaaattttattgcgagttacttgtaaggctgcgcattaacgtcttataatttgacaaattaaaatcccttcccctttctagcttcctaaatattgtactggcggtggcatcgtcgcacagcatcgttgaactccttgcacacactgagatcgtcattgtcctcggtgcacttcaagaactccttcatttccttggcgcaaggaccttcttcgactaaatcgctgtggtgcggctgctggtcacgccgcctgaatagccccgttattcctgatccgatggcatgacccacgactgatcctgctgccacgcccactgcgtgggcagccgcttccttgaagaccatttcggaattcgtgacggtgggcaccaccgcaggcatatagtttgtagagcctgctttgaccgaagcacttctctgtttgcgtggcatcttttctccccttttccaggctttaaatttatgtatattttaagccgagcagaattagacttacttttaaaaggtagattagaatttcgaatgacacatgtgccattttgatggcttactcatagacacctggcctgctccgggaatccttttacagctgtgacagctaatttatattgcattccctgtcagctaattgctaagtgcatgcaacagcgccacctggtggccagaaccctgcagcgaggacgaaaaaaggaattctaattcgttttcccttctcactttttgcgtttgcttttcccatttcccgcactaattacgaacacataatgaatttgtcggcaaacgcgagaggtataaaagcaatacaaatacacaactccagctggcttcccttttaaaattccaacaaggagggggggttcatctggtggggatatgtggcccgcaaaatacactgaacaaaatgttcagagctactattgaaatcttttgaacaacaaagcttatttatactaatttattgttaaatggtctgaacttcaaacaattttgtttgtctcttatatttttcctacgctcgcacccttttgagttaagcgaaggaccctaatgaacatcccaaaaaacattaacaaaatggattttagatttttgttgctggtggaaccgcaaaggaaattgctttacccgaagagtatttcagacagcaagaactaacgctttcgactttcaacaaagtcaaacctctttgcttttagcgagtgcaacggaaattctttaattggctggcagcatgctagagttgtgactatttttgcttttgggggagaagcgaaaacacagcggcaattagccgaactgccaaaagtttgggcctaattcgaattacgcagtgccccatatgctaaattttggcagcgagttcatgtggcaaacggaatatttcattaaattattgccaaccgcagaaaggcgaaaacagacccgctgcaaatgccgcttgattgatgctgtgtttaatgttgcacagtggagagtggggaatttcccccttaaatgctgggtccgtgttcatcagcactatacaatttccactcactctgttatgaatatttaagcaaattatatttgctcgctgaaattgtgagccgcctgccatgtgaataaatgtgacgacagcagctgccactttcagctgcgaaaaagtgaagaaaaactctacgcgatgctaatttaattttgtttattgttttggctacaacttaatcggcccaactctctactcgattcgccgctcccagcactgtttataaatcaatcaacatcaataatgtttcggcaagcaagatggatggccttgagctctgggttgagttggatggatcttcgttcttgctggtggctgcccgcataacgccaattaatttgcttctccgaaggctctttctacgcagtcctcgtaaaaaatggaaggcaattgctcaaagtgtaaatcgaaattgatagatagcaccaattgaggaggaatatcaaaatttggttaggaatgactgtaacatgtctatttcccactttccggagacattttgagttttaatttcaccaaatcgaccacaaaagtcgggaaacacactgatttttcatttgtttttctaagcattctatcccaatcaattttttacaaattttgagaaaaaaatttttttgccaaattttcacttttttataatacatcatcattttttgcaaaaattgaaaaaaaaaaaaatttttaattcgatcgccgatcaaaaaggatgtttctaccagtctgacaaggcgaaaaattttcattttattccgaaaaaatgtctatttttgggtagccaactgcaaattaaataccatatgtacatatatgtatgctttagattaatctcattgatttgcttctgtaatctggatgaggtcaccatcctagcatctcagacattatagcgccgccgacactgctgcattgcctcgttaaactccttgcaaacggagagatcactgctgttgtcctcggtgcacttgaggaactgcctcagctcgaaggcgcagggaccatcctccactagttgaggtttcggtactgattgcgaagctgaagctgccaaggatccctcctgttgaggctgctccttggccggggctgcctgaccacgtccctggaacattcccgtgagtcctgcgcccacagcgtggcccacagctgatcctgctgccacgccagccgccgtggtggccatgtccttgaacctatctgctgtgctaggaccttttgtctctgtggaggtggctgccgaggcagcaggagctgcagctggcagggattccttcttgggctgctgcacagccggcagatccttgctgctcccacgagacggctttgtggcgaagacatggctgctccggctgctttggcgccgcatagatcctgtggatcgcggcccttccgaacgttggcggggcatatcctttcaaaaatgagcagacggcaaatgtgaaggctgacttgctgaaagctgaatttagaatgaaatggcccgacttttgacctttctagactcgactaacacagccaactgtattataaagtttccccaacggaacacttgaactttgtccgctaatttttattgcacggtttcattgtgcacgacataaggttacatattacattatctttgacgcgttgggaataagtaagatgtactatggacttactagtctccagttcttatattttgaataagtgtgccactttagatattgcatttatgttataaaaaaaagatatttacataatgtctatcctcgagtgccacattaaatacaccgctccattggcatcgtattcatataggcctcttgctcgggcctttcattacttttgacagcagctatattatagttctggcgcaaacttattgcacactggcgaatcgagatgaattgggtgggagatatgcggatttcatttgcattcacgacaattctgggggctgtttcccacatattccatttgctgtttgctgatctgcgacagcccaaactggcacgctttcaatttggaactgcacttgagtgtctgaatgggcttgagtttgcatagctgcgctgattgcactttgtgtaaattaggcgacgccggccgcagtgcgtatgattaatatgaggactggaagtgggggaagcggctcatttctggccctcatttgcatttctggcactagctctgaggctaattctcggctcgcaagtggctctcaagtgcttcccattacaaccacctccgatatccgactttctacctttgtatgcctcaattacctgcgccgttttccccaaaactggttggccgtttgaaaaaacacaattaaagtcggcacctgcacaccaactcgagcattcataactgcatggagaatcggggaatctacaatagaatcgagaaaggtgaatggtgaatggcgaatggccagcatttcaaatgcggtaaattacagttaacgattttgtagcacagcaatttgctttatcttcagatgtctatctacggtttgtaaatgtacttccacgtagctgccccgaacgccgtttgctttgcatgtcggccgatggattctatccgtacatagtactgcagtactacacaaagccaacttctctggtcattggccagaactaaagccaggcccatagtggccagcaccctacactgggcgaaagtttaataaatcgcgagatataccaaagctgcacttctgttgggcgaagaccttagaccactcaggcgctaaactatgttttacttctctgaagtcagaagttactgcattgctatatacaccatggtgaatgctttttctcgcagtgtgtgtatttgcggttaacaaatgtaggaacaccgccataaaggtgttgaaataactgctgcaccgctgaacccggctcctttgtttggctttcgttggcggcgttcttggccgattgttatggcgttttatggttattgtgtcgggggcgcaatgcaaattgccgccacataattatgtcgcagtcgaggggaatttatatagtatgtagccggaatacgaataggccagctggacctgctgccaacaatgggaaaatcagtgcgactttgaggcttcgggcttcaaagtttcgcaattgaacggaaagttgtggctttacacacctggacaagtccaacttttccatgtctaattagcaagcgacagtaacagttccagcaaactaatttatataaaaactcgctttggcttggcaatcaaataatagagagagaacttttaatttgccaacgccctgacaactcacgcaatggaaacacggaaaattcctggcgtcgggcgaaaaccaacgagtgcgaaacaaaaaactaaagttgctccgacttttacctcagttaaatcagttactaattgcttcgtcctcggcaggtgataagaaagctatttcaatctaccaacattgtggccatcagttcgtagttgggaattggtgtcttttttattcggttccaaacaggaggttattaaaacgagagacaactatatccttaattaaaaagctatctcactttaagctccactcttttatcttgaaattcgaaatccaatttgaaatagatccgatccgattttgtatgtttcaaataaataaattgaatgcagctgaggagaaattaaggacaaatcgttggtagctcccaacacttttgcgctgaattgtgaacagggtgcagtatcttgattttcgcccaccaaagggtgtttttccggagaactactctactacatttcgctttcatcgagtgtcaggttgcagttcctgctccttgactaatgatcgcgtgccaatgaaatggcaatctgccattacaatagtgcaacttcacgcacgtatttccctggggacaggcaaacaaatgaatttagatttcgtggggctggttgttttttttttttttttaagtgggcggagggcagcattttggagccattttttaagcttaacgaaggggggtctctgattgtagtacattagctgggaccccaaaaattaagctggatattaatgattgcgctttcgagagaaggcttcattgtgtgggcttcgcaacttgataatgtgcagattaaaattttcgcagcactttctgctgagtcttccacgttcccgcttcatgaagttagcggcgcgaaaagtttcagtgcttaagcagccgcaaaaagaagtttttaatgaaaataaatcatgcgcacacttgactgcctcgaaggactttcaggagcagtagcaggacttatcgcccgggagtaagccaagtcaagtcgggctccccgaatgcgaagttaccacgcaaggcgggcccaacgaatttatggacttgctccagttgacattcgatataaatcagggaactgcaattaggtggctggtaaattgggccatatcacgagagacagttggcccagaactatcgttttgcagactgtaagtgaaaaacagccccctgaaggccttcggcagacaaatcctcgcacatgcagtgcagctggccacaggtgtttatttaattaatttacataaatcagctggctgcaaaacgcactcacacacatgcatgcacgcgcctaactgcccttgcatttaataagtaattaagtttaaataagcttattggaccacctgcaaggccgagcctaaaaactgtttacactaattaaatgacagagctgcagagaaaataaatagagttaagcccatatttgtgttgcggtgcgcgtacgtggcgtatacgcaatgttgtcaatgaacctgcacggattattggcattaagtaagccagccagataattatgcaaatttcagattcagcttcagccattttggagctccaccattaaagacctgctttttggccaacaccccaactaattgcccaacgtcggctacaaattcctcactcgattgtctgcagaaaacaaattgcgcctggcaaataaataatgcatggttaaagcgacggggattcaggggtaacatgcaaatgatggcgggctctttctacctgcaaatcactttgagttattgtatttagccttcaacgtttcccggcaaagtagaataaatattttaaagcctcgcgccgtctcacctgcaaaaggtgtccaacagccacgcactttgggcgatgattgatatggctttttgggggaaatggaagacggtcggctcccgggggacgacaattccccttttcaaacacagaaaacgtcgagtgtcaaagtttttgtgcgcgcttagcgcatttgatgaattgttaaaagaaaatcgcgcgtatgtgtaaacattctggtctagaaattcgaaggggctggaaccttatgaatgtgtgtgtgaaaatcaactgtactaccaccagccgctatgggggaaaaagtctggcgaagcttttgaagccgccgacgagcaaatggcggaagcccaaacagctgctgatgatgatggcggttgctgtcggtaaacagaaagaaatgagtgggtaacattgcgggagcactgactggttaataccctttgtccgcaggcatcgaagattacccacaaatgtcaacaaaataaattcgacgacatttaagcccagcgagtgttatttgaaggttgctaattgagttaccctactctcccattcatcaggtaagcactttaaataattaaatggccaattgctggcacgcgagtggacaaaggtctttcattacttttaataatttagtattttagcagctttagccaactggaatcaagtagattaaacagccattgggaaatgacgtgacatttacccaatgaatatgaaatataaatacttatacactcaatcggagctaaatttaaagccaagaaaattgcttgtgtaaagattggaactgacaagtttccggattaaaataagtagagcaggtgaatcattgccaaagttcttgtgagttttaccttggcaaatcctaaggtaattttcgtaatgagtcactcgcccagacatttctatgctaatgcagctaaaattagcatgaaatgtgtatttacttagtgctggtcataggattatttgtggctcagtaagggtatgcccattcagatagcaggaagcaaaacttttcgcaggcccttcacttttaatctgccttagaccgaccaatacacacacacgagcctgggcaaatgaatatatgcatatgtgggctgtcattgccttaaagagacaggatccccgggattcctggtatttgcttggattctgcgtgggcacctaatcctcgccagagaagccacatttggctgggcgggaaatggagcgacactatacacatcaaatcatcaatcacatgctttggtgattcattgataagccctccccatcgaagccctccaaggactccgcatgcggtcctcgtggcaatcatgttaataatgccgcaagatgtcggccagccattagccttcgccattaggccctccactctcccctttccaccttcccacctattccatttccctttcccttttctgacggcaattaatttaaagagctttaaagcaagagaaatgaaatgcagagaatgggactttgtttattttgattttggaaatcaattttgaatttgttgtttatttttgatgtggttatccggccagcagccactggcgtgtaaacaaatcgagcgctttttttcgcagatgccacgaacagacaggctctgctttttgtgtgtttgtgcgtgcctcgcggaatatatataaatataaaaactatataaaaggcaaatattcatgcggaaaatatacgtatgtatgtatgctgcgtattcgtatatatcatgaagccgcgtatgtgtgtgtgcctgcgccattagtgtcacaagtgtaattgttttttaatcgcattgatagcgccgcgccagcagcaaattccacacacgaaattatttcgagtgtgtgctaaaaccacttgaaaaacgccaagagctttgaaagtgacccaaaaaaacaaaaacccgccaagagtgcttgtgtgcaagtgggtgtgcgttaatgctcataaacaaacaaagacaaaggaaagtgggtgttttgcgggggcggaagtggaaatgtgaaaagcattcgacttaagctgtctactagctcacaaaaactaaaatgctgcacaccaaaatggcgataaaaaatttacataatggctgaaggaaacatgaaagcgaatagtggcaaaggtggaaatgaggagagcgcataagtgactggcaaatggcaagtgacactcagaaaatggaaaacccagcggagtaatgcggaatatagagtgacccgagcagatcgaggggtgagggggtagatctaaaatctaataaactagaaaactccattaggtgggtcctgcacaattacagatcctttggcaattataggggggtgaatataaagctgtcattaagctcaacacgtgctgctgagatacaagattcagtcacagcttcagaaataaaacatatatccatctagtttctatccaatttagtttgacttttccatgtgatttaagaaccagtgcaactgagactgccaagaaaatccgtttgtaatcgaagtcgcctctaatggctccactttgcactgttctgctaatggttcctccacttagttccttggcttttgtgctcaagacagggactgttgcaaatgcattacatcagtttggcccggggcccgcagcccgacttatatatccttgtacatcctgtgcatacatagagcccatggagcatatagagcaggtcctggggccggattttaataagcaagaggacgaggagatgaacacaacgactgccatcagggcagaacgtgccacgagcaccacaatgtaagatttgataaaaagccataaaaagcatagctggcaaaacttaaggccaagactataaaataataatgaagtcaatttcaatgatgttgctgtggccaaaacaacaaagcttaactcgatccggcccctgaccctggaaaacgtttcgttatattgttattattgctgctctggacagcaaagggcaaactggggaaaaaaccaacaaaccggccaaccagcaaacaaacaaaacaaaagcctcacgtcacatcatttcctgcagcgattttcgtgtcttgcctttgacgttcccttaaaattctcctcttttatggcaattagcttatgattttcattgttatggccgatacaagccagccacccctagtttatttaatggtacacgtatgtaatttatgcggacaaaaagtaaacaacttgtcattaaatgggtaatggactggctagctggcaaaaaagggaatggggaaagcgtcaaaaagttgttctgcaagtattgcctaagctgtcgtttcctcagattgcttttcctggcgcttccactgaattcagcaaacttttggcgggcccacttaaaacttgaccacttaaaagttactcggaatgcataataccatttaaaaacctccagccccacctggtgtttctacactacctagcttcagtacattccgctggagacaacgagctgccagtccattaacaactgtcttgtaacgctcaattacaataactaattcgcagctaatccggtagcatgtttccgccttggcagggaaagtggaaaataagaggcagaaaggcgaagtggaaggcactgctctttttgcacaccttttgggccatatcaaaacacactccctgagtgcgtaagcgtgttagtgtcaagcggcttatctattatcatttcgttgaattttgaatgacctgggcgagagcagggtaagcctttgtctgtccttcgtctggggcttcattacgcttgatttcttgggccccagcatgcacacagccaaccatttgacgagcacacggcaaaatagccctttgttcgtccttcgttggcaaggagcaactcttcggcttcctcgtcctggcgttataatgccttgttcctggccgaagtcatatgagtgctgcactgaggcgaaaatgttatcgagcacgcattatgtagatacatgggttcttcacagggaaaacatttctgttcagtgcaaatagccaaacaataagtctgaggaaggcgttccttcgtcactcgcaaggacggacattcgggcagcgtgccgacgacaggatgtggtcacaggatgcgagcagtgtgcccaaggacttggagctgcagtcgagtgaccaccccaatgactgacaccacagtaaacagccgaggggctgcgaagaggtcttaggtaaacacccagtgccggccacataatgaactgactgccaaggcgggtggcccacctgtcccttgctcaacagcagcagaccccacctgttgatggaacaggtccttcccggcctgtcgcacaaaagcgagcaacactttttgcacatttaccaagtttatgcaatttacacaagcccgtcaacagtcacacgtctcgttggattccctcttccgcccttctcctcttagtccgcttttcccattttagacccctttaagccatttaaatgccctactgccccagccattctgctgcctttatgcacacactgtgctgaccacaagcgtttcggtctgaataattgaccaacagacaaaagcagcaacaaaaaaccagcaaaaatatatacgaaaaatggaggaaaacagcgggaccgcagcaaagcgaagccggacaaggactgcaaaaaaaagaaacaaatgaataaacaaaatttatgaagcgcaaccacagagttaagcgttgtccagctcgtgatttaaagttggtcagcaacgccaaaaacccctccatatatcaccgttgagcattacgaggaacctaaacattcggtaaccaaaaccgtgtgccccatctagactcattaaatttgtccagcaaggtggaagttggagtttggttagcaccttcggaccacaagagacttttgccaaattcaatatcgtattcgtatatggtttcctttgacatgtttataaacttcaacagagaaatcccaattaaattcgtaaagcaaacctgtgtgaaatgggtttacctcgagatggtgacctggaattctgcattgcagtctaggatataatcataccaggtcattcgaatcttaaactttttgtttaaataggaaaaataataagctagtcaattgaatggactcctcaaaaggcaacaaaaacaaattaaagtgcttctcactcacccaaggcaacaaagatcatcgaatttgtccatcaaggtgtacaaatactggaggtaaacatatttctatctcatattcggacagttgatggcaactgaccggcaaaaggtcctctgccaggcacgtaactaatttatttatgtatttcttagtcgccgcattcacacaaaggaccctcgaactgccactttttccatctcctggccacaggcacattagccgcaacggatgttggccttttcatgctcagttgggcacaaaggagcgaggtttttgcctcgaacggaggcaaaggttctttttgggcaaacaagtgggcagtccaactggccgaccgaacagaaatgtcaataaattcatatgaagttatctcttccagacagcttaatgcgtatttttatggcctaatctagagtcaaatttttctggcgctcctcgctcgggtggattccaaatccctgatcccaaatggctccatagtcaaattcacgcactcacctcgttcaatctgcaatggaaggaaaggaagggaagaaagatgggttcaatcattgggttattagaaagtggcaagcaccggagtatctatgccaactatcccacatatgctgacgtctgctgtcggccatttgatgagcccaataaagccaaacacgaagtgccactcaggaccaaaatgacagcccaaacgttgaataaaattgaagggcccggggcctttcgagaagtatcttatattgaatctcagcgacccaggagcacagggcacataaaaaagattaacgccgggctggaaaagtgggtcggtgtgtcgtgtttgacatggattcggattcggtcgtgggggtgcattgcatttcggctgttgcattatttatagtctttcgtgctttattttttatgccccggcatacgtgattttgcataaattcccaccccgttccccctctgcacttcactctcagcttagcttccgtattcctttccgagtattccccatgcttttccactccggatttgcattctccaccatgcacacggaatcacttgggccccggatccggagttttttttattatttatgcgtcggctgccacagcagacaaaaattgctcgaataaatgtaccgaaagcgaaaggcgataataaataaatgggagcccaataaagattgagcgatactttcggagcatcgcaattaaagagccaactctatcccattattacgtatcggttttatcattaaatcctattattccatgagttctgaatggatttcgagaattgtacggtttgtaaatcaacttacaatattgttacaaaaatggttgtaattatagaaaactaaacaaggcatcaaaccaaattacagaatattctagattttaaatgatgccgaaatcccaacggacttaaatgacagctatgataaaaagaaacctgcccgaaaagctttgctctttttaatgaaatcttaaaagaaagatacataggcgtacaaaaaatgatatcgacactctttgacagccagcaaatcttattttagtttctcttatctttgtttaaataattcacactatttaaagagtttatcattctttgaacaattaatgaatgaatttgctgggcattcttcgcctcggtcccatcaatattaatagaccttcaagttcttatcgatgctcaaattgagctatataatttccaaagttagtgcattccccttttaagatcgcttctctgacctttcgaatgcctgaaattaggacgccaatcaacggggctaagacggctatctaggtgttgtgccaacatttgcaggtgttggccagccaaattgaataacaaacgcggcgcctaaacgcacagaacagacccctaggagcagtgaggggttaagggtcctggatgtgggcgtgtcgggggctgtctttcctgtttatcggcgcataaatactaaagcaaatgtactgttaactcgtatattccaaacaaagtgtgaatggaaacaggtgaagcgagcgtgtgtgcgtaagttactgtattagtgtggtcccagccaccacaactgctgaaaaggaggtccaacttaaagacaggatctaaactaaagggaagaccgcattgctagagaattacgtaaccaaaaacgcagccaaagtaaaggtacgtaaaggtacaaccgccgtgctggttgctgggtgctgggtaactggaaaattgtgtaaataaacagtattaaattttcctcttgacggctaatagaatggcggacggacacgcagccccagttgttgccgcagagtatcgattgccccgcaggactcgattccttgaggggacgcgactgccagatgataaagctgaactccactctacttctaactaaatttacaacaacttaagccataaaaattgaaacgatagccgtaaaaataaggctacattggcggcgtacacagcgaaataaagctgacacccttattattcaaagacagcagagcgtttacggatatctttttcattgtgaattgtagctaagaagtctgaagataaattcaagaaacgacttccagatgaattgaagaaattttaaatttcgaaacgaaactcaattttttctctgaatgaagcgctcgaattctcttctccctgcacttttatatatttcctttttctctgcttgctatctactacccagcaggcagaccacgaggtgggcgtccttggggggatggggttttcagggcgcgtggcaactgctgatgctgcgtcttcgttgggcgccacttaacgccactgacagcaggtctcgttcccatttccccgttttctttcccatgcaaaagttcattgggggccaacagttttcttttccctcgctttttcacgtttttttccttcgagaagcaccgcatttcgggccctgagcagacgaaaaagttttcatgtatgtggcagcgaggacgagttgccagatgaggcagaaatacccgtactctaaaactcttttcagaagtgacgtgtggaggtgttcggtgcttcgtcttaatttgctatatgctaaggaaaacacagaacacccctgaagataagatataagaccatttatggtgacttaatcttgtgcgaaattaaagcgaaaaaagtgctaagtgcattttctagccatttctggttggaaaacaccctgatgtttctggtgttataagcaattcgcatagcttggcgaatatcagggtccttttcaagcactgtttactgtagcacataaatttaaagcatgcccaacttgtccaatttttgctgctattgctattggacgcacacacacacagcgcaggagagctgtgcttatcacccccagtccacacccactcacacacacacccatacactcgcacttcaacagcgagctcttcagacacgcatatgcaaggacttagttttaacccggggctatcaaatcttgtagctgacatttatgcgagtctgagttctattaacgtactcccaccaaactgtctcagctgcgcaagtgtgtgtgcaagtttcctttgccattcaccgtgtgcacgtgtgtgggtgtgagtggggcagtgtgtgcgtgttgacattgattgcgtgcgtgttgctgacagttgtccgtacaagcttaatggctgtgcgattttaattgaataatatgcaagcccctgagccgaaccccaatctctattccctctgttccctgtgctccaaccccatggaatccatggagtccttgctgaatccctgcccccgaagacaaacaacgacgatcccaaccagtttgggagtcatcggggcaccgtgcatatgacatgggccatgtttactttggctctgactcaggtcccccccctcacttttctcggcttacttggcctttagtagccgtgtccctgctggccaagatttagtagcgccataattgtcaatgggccattaggacgatgtcctggatgtcctcgcccctgcggttttgccaatcactcagccgtaagcctcagagatgacagcgtgatggaaattatttttatgactttggtacaccagaattgagcacaggattactttaattgttactttactatggcttatggatattggcggcagcaacaaaacctactacttcgaaattaaacaggtaccgacatttgcaaaattgaaggaaaatcaaaaccatgatgatttctacgccattctaagaagtgtctaatttttccctgtgtagagccatgggtaaatcctcctaattcgaatcacaacttttgcttcggtcacgcactcattcttgattcgtcgtcaatgattatgaagttgccgggacagactgttccacatatttttattgacaacggaggcaaacaaagcggaagtcatctccatccacatccacatccacatccacatccagatctcctgccctttccttcccgataccattattactttgcggatgcgtgcgggaattatgctagcatgaaaaatcgataaattattgtattaatgtatacatggctcgtctcgtattattatgaattactgccggaccagcgacttccatttgacaggtcatgcgttaaagttgacttggacgcccagcacaggcattccaattaaagaccgtccgccttctgtgcaaatatttgtgatgtttgtgtttcggggccataaattaaattagatttcaattaaacgctgcccacaatcaaataccgaagacaattagttggtgcatattttcgagcccagcttactgtcgccggttaaaggcgggtgaccccgattcgggcggatcacaggccaggaaattaattcgttgcaaaatccttggcacacagagacaaggaggaaaggacgatttcacaaaagacagatgcagtttatgcgactcctcacgttcgaaggcatgagccagcagaaatgtcattcggatggcagctcaaaatatgcaaaaaaataaaataagaaaagccaggacgggccaccccgacaacgtgaacatgtagaaagaaattgaaaacggaaggaagcacaaaacgaagaaaacaggagcaaaaaacaaacaagcgcatgacatgcaaaacaggcaaacaagcaacgaggctcgaggggaaaccgtgggtggatgggcggtgggtggaagggaaatgtacgctggtcggggtcaccacccagcagggaacaactgaaaatgcgctgataagagaggcgtgctcaccggaagcagcagcagtgtatgaagaaaaaatgtcacgaaaactgagagagtttttggagttatatgaatcttcaagcggactaagctagcaatttatttggtttgtcaaattagtatatttgacatattcaaatttaaatcaaatgggatgcgatttaacagtgcttatttttttccaacatctatccgttcagaaataaaacttattcatgttattgaagaaggccttaaataacaagattaaagtcgtgcaaccttctttattaaacaccactctcataatattactttactaatatataaagcagaagaaatgtgattttccctctgtgcacaagcgaaataaaagcaaatacgaccaaaaacaaggaccaacgtaacagtgagtaaaagatacccagacatacggaaacacctactaaaacgttggcaaggggggactgacaaaaaaaaaattgagtaaagtgcccatcgtcaaggcttataccctccttttctagaaacgaaatgtagaaaaggaccttgtgagtggagactactttcagtgtgcttagcataacttaaagtttgaaatattatcccaggatttgtccaacccaaggcgaaccttacataccaatcaagagatttattgcgagacatcggcatctattgctgtttaagagctgtttgttcaataacaaaatttaaagctactgatatttgggggaaaatttaaagaggggaacattcaagtcacagaaaaccttagtttgccaatctattttccacctagacgtattccacccaattcattgaaactcgaattgaggccagggaagcccaatttggcaagtaatttcattgtgtgtctacgttccattcaaacagcaccgcagagcaattatacccgattttgtatagggcattgcgaataaggcgcacgtaaaacggcgcaaattcctaaataacagaggggcattcgtggggagacgcaggacattaggggacgggtgcatcgaagggaggtagggcacaaagggaggctcggaacaaggacagcagccgcaagctaaacgtcgtcgcaagtgcgagtgcaacagacctcggcggagcagcaagtctttcggtcaggtgtcctccctatgccaccaggttttaggaacccaccccggcacgcgccaattgatgcgttgaatgctcataacgagctgtgatgtactgcgaaaaatcgtattaaaaaaaaaataaattcaacaaataagctaaattataaggtttcataagttcattgcctagataagagtcttaactatgagctagtttgacctcgattaaaagggaattttggcattttttccgagtgcatcaagtgaatggtgcctccaggcaagttggcatgttggcgcgggtgccgctgaaacaatgctgaaaatcaataaaagccattaaaatgcagccaaggctgatggcgccaaggaatgtgaagttcaagcagcaaggttggggagggatccatactttctggttgcgtgattggagttacccatggagttctgcccccatttataaatagaatccaatggcataattggcgaagccgcggtttggctgccaaatcgatgccagaaacagcgtgcaaggtcttggtagaaatgctaaaaaatggtgttgaaaatttaggacagaaaacacattaaatttatggcagggagcttgtcgagctgcatgaattatgtgcaaggaaacctgacgacgcacacgaatgcaaatcggaaactaaattcgccggcagatttatgtgacacgtacacaacgcgacggggaaaagccgcaaaaacaagcgaggacttagccgaaaaagttcaaatggacattacaaaaaatttaaaattaaatctgcagtaaatggcaagtttcaccacttccggtgggcgagttacttatcacacccacttcctgtgcagaaaattgtacatttacccagcaaaaagtgctactcgtgtttgcatattcagatgcgaggcattccggcactccggccattcgcactgaccacaaaatgcattcgattaataaataaagccaatttgcatacccaaagccaggatatgtgcaaaagctccatgtatccgtatctctgggccacgaggcccatcaatcatgcagaatgttttggccatttcacatgcaccagccacacccggctacactctaatatgcatagacaattttcagatactgtacggttatgccaacctttatctttatctctgccagtcgaatgcgcgactctcgtcaccgaaacgggggatatttttattgagccggcgcttaaattaattgaagaaataaatatcgcgtatttttgggccaaactgtgcataaagattatgttcgattgataagcttggcgggcgaaaacaaattgaatagcgaaatgccagccaaccaggttttcgactgcaaagataccacaaacagaaatttatctggtttttagccctgttgagttcctaaataaataggcccgaatatatatgaactcattacgcagcttgttaacccgactaagtgcacgagaccttttcaaaaatgcaagcaacaaatgggtgtggaaaatgatctgggaaatcggaaaactacgtaaacaattcgttatagccaaataatggcaacaatatcagtgttttatgagctcgaataaatattttcgcacttcgtatttatgcaatttaaccattaaatgattgaacgggttaatcgctttcctggcagcgcttgtaaacaatgcccggggtccaaaagttttccacatcaacgccgacaggcaatagtgtttgaataaatcattcttcatctgccataaatagtcaaccaatttcaattatcgccggcatcgaatatttataaatagttattcatttatttttaggattgtgtcgttgacttttatccaacccgttggcaacgaaaacgaattgctcgccgcttccattgttcgctactcctgatataaagcatacgccgcgttggtttgcaaccgataaataagtaattaaagcgcctaaataaataattacgccgaaattagtgctggcagtgggcgttgtctgcataccgaaaccagcagccagtctgcaatattatccccattaaccctcattccaaagcagcatcaaagagcgaaacaaatacataatttgcccagtttaatcggggtaaacagattttctgatacccttgaaaaaaatacaatttaattgcttctataaaatgtagtattttaccaaaataaatcaatggaatatgaaaacgaagctcgtctgattatttaatattattatgtgttaaagtcactctgcatggcgaaacagattcaaatgtttattttatcggaattcattcagctttgccttcagtgtttgtggtcagaattacatttagcaatctatgggtaccagcattaaaagcacacagggaaattttgcgcttaaggccaaacaaatcacgaagccattaatttttattaacaaaatctcggctgagcagttccgaaagtcaagagctaagcgccaagatatgtccaacggaaaaaagaaccacatgaagaccatttgataggaaaaagaagtcgaacgaaagcgaagactgcgaaacacaaaaggaaaaatgtgagcttatcagcagtaacgtaattaagcagcgataaagcgccgccacgcccctgccgccccttttcccccatttctgttctctattttttttttttttgggaatgatgagtgggacgcgcgataagcacgggccttcttttttctctgtttagcctcaatgagcatagtttatatcaatttagatttgaatttaatttatttacacagccatgtgtgagcgggggtgtttattttcggctggacggtcagcggtgatagagcagttagtcaccatcggatgatgacacggaggtgcacttccatggctttaactaaacaagtaattatcaaaatggcattttacccaggtattaaagatacaatacagttttaaaatgtaacttttaaaaacacagactcttcatctgcgtggaaatcagctagttagctaaattggattattaagttcatattgctacttggacttgaatgacccagtttttgaacgatattaaagataaaagaaatcaagagataaaaaaaaaacaagtttgccgagcaagcaaattgttatgcgttgcactagttaagaaatggtgaaggagtgacttttaaactcaattatatcttgttctttaatggaaacgtcagcgaaagtttagatgcctgaccatggacatctgctgatcgatagaaacacagttctgcctgcgcccgttattaattagctgaggcaattagtttggcgttgcattagcgcggattacgcatacgccaagtgcgccgagcgaaatggaactgcgcttaatcgcattgttttgggctatctcgcagctggcactcgtattctcatcgcagatattaccactgctgccactgttattttcccggaacacagctgcattttcctcatctccacccgatgattgtggcataaccataacgagatgtgtgcatctgcaatgtgtgtgcacaagtggtcagagttggaagagcaaagcatctaattgcctgccgcacttgattaccttcttgtttactggccagagttggcagtttataatattattaaacaatataagagcgggtaaatagcagttggtgcacactgtggactacaaacggaaaaacaatttaatcgacagttaaatcgtgatcaggttttattaactatttgttaagcttgttagcttaaggttgaataaaatgatgtttccaataataattattctcttgcactcttatatgctgccagaaaaattaaaattttaagcaaataatgtttaatgtttatttgcattcatttaaccacgtgttactttgcatctggcgctttaattcgccgtgcagccactaattgcatgccaagtcgattacaattcaattagcacacgatgcgaactctttgcaattgtctgttgtctggctaacacacaatcaggtagtacaagatgtctacaattacgtgttctggcggaacggaacgcaatcgcctggcttgtatgcaattagccatcaaaagcgtagcgggccaacactcgcggctgtcttgccagacatttggctctgattaatgggtctgtggggcatgcccccaatcttgattggccgcccataatgcaccctcgagacaggagatcaaggatccactcgaaggactcgagggcctgcacttagcagaaacatgttttcgattctctaccctgcgtcctgtgccccctgcctaatgcctaatcaaaacataaacattccggcccagaaaggtggtctgcaatttaattaatgaaaagccaaaacacttgagaatctattttggccgaaggacgctgccctgatttatgctgaatgacttctgtggcgccggtgcttgagaactggcgctcgttcaagggtgtacaatttggccaataaaagacaatgtgcctgactcactatggtctgtccctatgatcaggaacgaatgaggttgggttgtgatcaaaagttatgtctcaacatatgtgccacttatataacatcgttggcagctattgttacttattattatttgtattatttttactatttaattataatttaattattctgctgttgcaacccaatcatctagttagcttttaacaacttgccagtcatgtccgccactcacgtgtccgtttctaatcaatttgtatatccgccaaaggtcgctttcatggctttaattactgatgattaatcataattgaaaaagaggcgtgcggacagcgtttctgtttctgtgggcaaggccaaagttctctgtttcagagcgctgcgtatgccaatttcccgggaaaagtttcgaaagctggttgggcagtgaaaatcgcaaatctgccaacggcaggccgcagatgatccacttgattggaggcagtcaaggcagcgatgagctgcggacttaaattcgcaattatgtcgttttaataaacagggaccaacgagccgtaattgcccagatgccgtagagaatccggagaggaactccggctccatcttcacaaaccgtaaccagaagctgtaaccgagaccctggaggaaactcaaggggaagcgattgagccggcccatcaataatgtgcgtgacacaatgttgccaaaggcccacgctgcgtatacgcaatgcggcaggagatggatggcaggatcaaatggtatttcccagcatgttaagtggattgtttacgtctcccagtgcttgtgtgtgtgcccactatgtatacctatatatatatgtatgtacatgtaggtgccaaagtggggaacaaaacttaattgcaggcattaattatgcccgaaattaagatacattgtgcactggagttaaatgttgcttattattactctcaccaaagcgctgcaatttgaattaattttttgcattaatgcggcttaattagtttttcataaattgcacaaccatcgattatgtgtcaatactgtattatatagtcggcaggcgatggccgtccgtcgcctgctgtccagccaaaataaagtcagtaattaatctcctttcaactgaccgcaggctgggcaaccaaagttgattttaatgaaattattcccaactgacgcactgacctgaaagccattccggattccctctcccaattttcgctccaatccgatctcagctggcggcattttgaatacattaatgcttgcgaattgcacgaagctaattacgtttttaattattttacggcttaaggctaacaaatccattgcagcgttttaattttaacgcaaacatctgcattgcattaaataggttaagggattttcacaaaagccaatgtttaatcacaaatgaaatgggaaacataattcaatagccggttaaacagataagcggcaatgctaaaggattaaatagtacaggaaactatttttgctatcaatttaaaacaatggtttcgaataattcgattcgagcctaaactgatggttctcttattcgaatttaatattacaccattgcctagctcacttgggttgattgtagtttatggaatattgaaatcgaaatggttttcttctgcatggtaaggctggactatttgctaactcgggcggctcctcaattattgtgccgtattatttatttatgcaattttccgaatacaaactgttgctttattgcagctcgctcatctggcaaataaatgcaatttgatgaatcaaagggtccgactctacagttttccagagagagcgggagtaaggggaaaattgaattctcattgtatggcaaggcccggggctttgtgaaattgactttcaagttgagatttcgcttgggtaagtctagcatcataaatcaacagggctaaattgggacggaaggtggataatcaggaaaaggctcttttctcctctgccccattttaaatttgacttatcacgggctgcaaatccttgagatttctcattagccgtggcaactaattaacataagtaattttcttaatggccactcaaaggcggtcgcattccctatgaactcctcaaactttcagtaaaaatacctgagagctatgttcgtttatcagggctacagcagagaggagggcaaacaaatagaacaaacaaaaacagggaagcccaaaacaaacaaaaaaaaaacacatgcaactaagaaatcccgggcttacatgatggatttcccaatggctggcatgaactaatattttgtaaataaaaagctagcgctcgctccgtcttcttttcgctgtgtttttgttcttgggactgatagcatttggggacggaaattaaatttggccacgttaattgcctcgattagaacttttcggccattacgataagcgtgggcagtaggcccgcagacaatggcagaatgaccgcttttttggccaacaaatgaagagcttgactctgcccaatgattaacctaaaataattaagagcttattaacaatatctccaaggtgtaagagggccacgcggcgtatgcgcaataatcactagcacgcagagcagaaaacactgacgcaatggtgcaaaacaatagtttactttatatttccgccatgcccgctggcactttgagctccattgttgtgggttgtcgcctttgatttgagcgttccgtttgctttgtagaagccaccctggcgtatgagcaacattcagcgcagacaatgcagcttgaatgcaggaggactgtcgaccgtattacgcatacgccccattgtgctggccattcttcctcgagactcaatttacaatagatgaaagaagggctggagctccggcggtggcaaaactgtgtcactccgacatctcccctaaatgctttaagcaaacgcaaaacacgtgtggctcatgtggccgtgactcactttaagtgacggcggctgtaattagtgtaagtgccgcccgaattgtcccgacatcttttggcagcactctcgtttcacttttcatgttcaaggatgcgcgcagcagttgttgcaattgcaaagaaataattttgagcaagcgccagtgcttgtcgcaactggaagatacccattctgtttgctttttgtctatctctgaggtcgaaaaagattttatatacaattttcagtgtttacaaactcatttagcctttaaatagatcttgaccgaattttgatggtggtttgatacaattaaataggtggtcaaagtactcttagtttcttttcggataattgggaaatatggtagtaactggtggtgctgtacgatgttgcgtattcttgagcaaaatccagaaaaatatattatatcgaattaatgaaattttcttcagatcgatatacccttctgctgggcactcgaattgttctcaagaacttggcccaggaccactcgaccagatccactgggatgctgagttttatttggtttcgggcaattaagcttgttgttttgcagttaagtgtaaatttatacacaaagccgcagccgcacgttgggtgcacacctgtgcggaggtaatttgccaactttaaagataaaagtgctgcatattcctggaggcgcgggcaaatcgacagcatctgcggcaagctacaggcagatgccttggaatacagccgtaacctaactgaattatcaaatcaagcggtttgtgactttgtaatttgattagctacgcccccggctgaagtgtttgtgcatatcagtggctgcttttcacttcaagggccctcaaaagggcggtatctgaacaagttcgccggggaagttaccacatcaatcggcgcaagtggcacctatttatttccccttggtctaggtcaatcatctcaaatgccccaccaagacgaagcgggtaatccaattaatgtttgcctgccataaatctatatttaaatctccgacaaacactcggcgataacaagatcgtccgcagattggtgttaaggtgtcaaatgtggcgggtctattcaaaggggcacacaaatccagaacaatattgaccagagacttacactgggtcaacgactggcgacactctcacttttggctgtggatcggatcggctttcttctcgaagtcgtttgcataaattgcgtgtgcttccaaaagtcgtcgaacaggtggcaagtgtcgcacaaaattactttaataatagcactggcgttggaaaatatccgagatggaactgcacaagtttgtccaagatatattctttctttcgactatcggcctatttactcttgagcacttttccattcatgcctatgtagacacatgcgaatgctggtcgcaatttatttttgttttgcacacactaatagcattgaatttttcattgatttcaagtagcacgaatacgatttttggcgtatttttgtgggtattttcatttgagtaattgctgaaaatattttcactatttatttattttgattcctagtggtttcaataattttcttgcaattctgtgctcgccatttccatttgaataattcctgcgtgtattttttcactcgtatttatttattcagatctctgacggtttttaacgaatcgaatatctgaattccgcgggaggctgtcaggaatccaggagccgaatcgcgtagaaactgcggagcccgacgattgatttcaagacccgtccgtccgccttttcggtaaaagtttaactggaaacgcgaccgccgacctccgagcagcgattgccgagcggtacagagagagcctcgtacctgtgcggcggcatacgccataacagtactctctctgctagcactaacacagcggcgcgctgttatcagtggccattctttatcactgtgtcagtgggtctgcgcaggcggggaaactcagccggagagagttagagagcgagcagaaaattcagaggcatgaaaagtcgcatgcgagaaactgctttcgcagcagaacatttgaaaacgaaacactcgctggcggggaaaaatcaagaaagacaactgcaaaccaaatatttatcatggctctagtaatgtttaaatatttgtcatatcgaacatatcgaatatttgtcattatcagaacaaaactttagttattattaaaaagcggaaagtgattgtttgcaaaatagaatctcataatagtataagagggctgcctgtattaggaccaagtttttgtttgtggcttattacttctgatgagtctaacaatcttctagggaaaatgggaagcgctacgcttataagccacattgctttaatgaattattcattgacaaataaaacgttgcagccggctgaataattgtaaaatattagttttatatcctgtttgcaaaatgcaatttggttgcataatgaagtgtataactaattgtatgcatctcatgttgttcaagacgaaatcgtttttttttcgcagaaatatctcgacttttaaattgtgcttaactcttaatcattgtctttatttcacataagtaatattttctacacatccagtaacctgttttcttaatatgttaactgctttaattcaaatttggcgcccaagctgaaatgttactgcattcagctcagccaggggaaatctgcaaaaattgaacagagaaatcacgtttagttaacattaacagctcggctggcttacaatctgcctgcaaagtggtaaaagaaaatgcagacggtgcctagaatt

SEQ ID NO: 2024 - DNA, 3021 bp, DROSOPHILA
tcgcgtttccagttaaacttttaccgaaaaggcggacggacgggtcttgaaatcaatcgtcgggctccgcagtttctacgcgattcggctcctggattcctgacagcctcccgcggaattcagatattcgattcgttaaaaaccgtcagagatctgaataaataaatacgagtgaaaaaatacacgcaggaattattcaaatggaaatggcgagcacagaattgcaagaaaattattgaaaccactaggaatcaaaataaataaatagtgaaaatattttcagcaattactcaaatgaaaatacccacaaaaatacgccaaaaatcgtattcgtgctacttgaaatcaatgaaaaattcaatgctattagtgtgtgcaaaacaaaaataaattgcgaccagcattcgcatgtgtctacataggcatgaatggaaaagtgctcaagagtaaataggccgatagtcgaaagaaagaatatatcttggacaaacttgtgcagttccatctcggatattttccaacgccagtgctattattaaagtaattttgtgcgacacttgccacctgttcgacgacttttggaagcacacgcaatttatgcaaacgacttcgagaagaaagccgatccgatccacagccaaaagtgagagtgtcgccagtcgttgacccagtttgcagtcccgacgacaatcacatagtctgcgaaaccgactgcggcaagccacagagatttattgaaggagataaccggagtacaaggcataaacgtcaatgaccacatcaactggtagcctcaggcagcatttttattaagcaaccgccccacataaattagtaatcaagcgacgcggctcgaggcgaaactaataagagggctctatttttattgaaattatgattaatgacaagagtgccgaagtaaaacgcggcacggtggcgtatacgcaatgattctgaggctcgaagaggcgattatgctgggcagcaggtcagcactgggttgctcatatgccgcgttagcccgctgccaccattgaaagactgctgatggctttatctggacaggactggcggcgccatcagagccaccgccagcacagaaaccacagaacccagggaaaccaccagaaactgatctccaccgccacgctgactctgttcgtgctctttctgagcagctggatagcctatgcggcgggcaaggccaccgttcccgctccgctcgtggaaggcgagacggagtcggccacttcgcaggactttaatagcagtagcgccttcctgggggccatagcctcggcctcatcgacgggatcgggatcgggctcgggctcgggctcgggatcgggatcgggatcaggatcctatggcctggcctcgatgaacagcagccccattgccatagtctcgtatcaaggcatcaccagcagcaatttgggcgacagcaatacgactttggtgccgctatcggacactcctttgctcctggaggaatttgcagccggcgagtttgtactgcccccgttgacgtccatattcgtgagcatcgtccttctcatcgtgatcctaggcactgtagtgggcaatgtcctggtctgcatagccgtttgcatggtgcggaaattgaggagaccctgcaattaccttttggtgtccttggctctttcggatctctgtgtggctcttctggtgatgcccatggccttgctttatgaagtgctggagaagtggaactttggaccgctgctctgcgacatctgggtgtccttcgatgtgctgtgctgcacggcctcgatcctgaatctgtgtgccatatccgtggatcgatacctggccatcacgaagcccctggagtacggcgtgaagaggactcctcggcgaatgatgctgtgcgtgggcatcgtctggctggccgccgcctgcatctcattgcctcctctgctgatcctgggcaacgagcacgaggacgaggagggccagcctatctgcacggtgtgccagaacttcgcatatcagatctacgccaccctgggctcattttacataccactctcggtgatgctgtttgtgtactaccagatcttcagggcggcgaggcggattgtcctggaagagaaacgcgcccagacgcatttgcaacaggcgctcaatggcacaggatcgccatcggccccgcaggctccgcccttgggccacacggagctggccagctcgggaaatggccagaggcacagcagcgtgggcaacacttcgctcacctactccacctgtgggggtctgagcagcggaggaggcgcactggctgggcacggcagtgggggtggcgttagtggttcgaccggactcctgggctctccgcaccacaagaagctgcggtttcaactggccaaagagaagaaggcctccaccactctgggcatcatcatgtcggcctttaccgtctgctggctgccattctttatcctggccctaattcgtcctttcgagacaatgcacgtaccggcatcgctctcgtctctattcctctggctgggctatgccaactccctgctgaaccctattatctacgccactctgaacagggatttccgcaaacccttccaggagatcctctacttccgctgctccagcctgaacaccatgatgcgggagaactactaccaggatcagtatggcgagcctccctcgcagcgggtgatgctgggcgatgagaggcacggggcgagggagagctttctctaggccatccacgaggacctccattccggagaaaggagcctatccaagcgaatctgagctgctcgaagggtcttccctaggtttccggaagaagcgaactcctctgctcgacacactcacacacttaggtataaacactggggtgtacatcttaaacaattaggaaatgtaaagttttaagtgggaaaatcaggctctgggctgtttaaagtaccgcgttggtatagtttatttagcagaaataatcatctaatattatttgtaactgagagtttgatcatg

SEQ ID NO: 2025 - protein, 564 aa, DROSOPHILA
MALSGQDWRRHQSHRQHRNHRTQGNHQKLISTATLTLFVLFLSSWIAYAAGKATVPAPLVEGETESATSQDFNSSSAFLGAIASASSTGSGSGSGSGSGSGSGSGSYGLASMNSSPIAIVSYQGITSSNLGDSNTTLVPLSDTPLLLEEFAAGEFVLPPLTSIFVSIVLLIVILGTVVGNVLVCIAVCMVRKLRRPCNYLLVSLALSDLCVALLVMPMALLYEVLEKWNFGPLLCDIWVSFDVLCCTASILNLCAISVDRYLAITKPLEYGVKRTPRRMMLCVGIVWLAAACISLPPLLILGNEHEDEEGQPICTVCQNFAYQIYATLGSFYIPLSVMLFVYYQIFRAARRIVLEEKRAQTHLQQALNGTGSPSAPQAPPLGHTELASSGNGQRHSSVGNTSLTYSTCGGLSSGGGALAGHGSGGGVSGSTGLLGSPHHKKLRFQLAKEKKASTTLGIIMSAFTVCWLPFFILALIRPFETMHVPASLSSLFLWLGYANSLLNPIIYATLNRDFRKPFQEILYFRCSSLNTMMRENYYQDQYGEPPSQRVMLGDERHGARESFL

SEQ ID NO: 2026 - DNA, 3624 bp, DROSOPHILA
atataaactaaactaaagaaaacaattaattgtaaaatgctcgcccaactctcgaagggattgcgaagttccgggcggtcgaggtatatcaataatgatttttattttaaatgcgttggaatacatagcccccctccgccttccccgcgagtcccgcccccttcgaaatcctttttttttaaattgctattatcgtagtcgattcaataatataaaaccgggcgtacatgtgcctacgcccgcgtggaggactagccagtaagttagtcgagtgtatatctaagtgatcccaattcaaagcatacaaataaaagagaaaactgatttaaataacgagcgccattgcgtgataaatggcgggcggggttatctggaaatcgggcagctataaataaactgcggccaacgctagagattttcgtgtgaaaagcgaaagaagataaggaacgcaggcttcaagtggatggatggatgagtttccttggtcaagtttccatgacaaggataaagactctacttttaaacaggacactcttcaactatgctacatcattatatggtaaattaatacaattaagagttcaatatagctgtagttttagattctacatgttttatgtaatagaaattgctattttgttaaattataataaatttattgttttgaataagtattcaaattaaacgatatttatcgataactttggtatttaattttaaaagtgtttgaactacattcaaattgtaaagcaaatatcgttagagagagcatttccaatagaaactaaatacattgcagtttttagtagttttccatacgctttttcagaatattcgtttgagaaaatgttaagaatgttcgaattcgaaagggtctggcatcgccggcagtgtgaccaactgcccggcgctttggcattccgtgcgtgacgagcggctaacacactgtttttttttagtctcaaaattctaacaaatttattgataaactagcaatatgctcgtttcgccctgcccccgctgcgtgcaccgacattaaagcgcaccaaatcgtgctaatggagcaatatcaacgccgtgcaaatcgacgaattaacagccgccgcttccattgaatcgaaatacccagcccaaaaaaaagagaaagaaaaagtaaaagaaacgcgtgcgagagcgagagggctagagcgaccagggggagaaaagcaaaatcgagtgaattttgtttgttgtatcggcttttccctggcttaatcccgttttccctgtgatttttccccaccaacttcccacgccacctccccaccgcatccatcgcatttcgttttgatcgcgttttatcgcgtcgaggagttttcccgtggatttccgcagtcggcgcagctaaaatggacgcggacaggggcggcgggcaggagacgaaggtgatataccacatcgacgatgagacgacgccgtatctggtgaagatccccattccatccgcccaggtgacgctgcgcgatttcaagctggtgctgaacaagcagaacaacaactacaagtacttcttcaagtcaatggacgccgatttcggtgtggtcaaagaggaaatagccgacgactccaccatactgccctgcttcaatgggcgagtggtgtcctggctggtctccgccgatggtaccaatcagtcagataactgctccgagctgccaaccagtgagtgtgaattgggcatgggtctgaccaacaggaagctacagcagcaacagcagcagcatcagcagcagcaacaacaacagcagcagcagcaccagcaacagcaacaacaacagcagcagcaggtgcagcctgtccagctggcgcagcagcaacagcagcaggtgctccatcaccagaagatgatgggcaatccgctgctgcagccgccaccgctcacatatcaatcggcatccgtgctctccagcgatctggactcgaccagtctctttggcaccgaatccgaattgacgctggaccgcgacatgaccgactatagcagcgttcagcgattgcaggtgcgcaagaagccgcagaggcgcaaaaaacgggcgcccagcatgtcgcgcacctcctcgtacagctccataaccgactcgaccatgtccctaaatatcattaccgtctccatcaacatggaggcggtcaactttctgggcatatccattgtcgggcaatcgaatcgcggcggcgacggcggcatctacgtgggcagcatcatgaaaggcggcgcagtggcactcgatggacgcatcgaaccgggcgacatgatcctccaagtgaacgatgtcaacttcgagaacatgaccaacgacgaggcggtacgtgtgctgagagaagtcgttcagaagccgggacccatcaagctggtggtggccaagtgctgggacccaaatcccaagggctacttcaccattccgcgcacggagccggtgcgacccatcgatcccggtgcttgggtggcgcacactcaggccctcacatcgcacgacagtattattgccgacattgcggagccgattaaggagcgtctggaccagaataacctcgaggagatcgttaaggcgatgacgaagccggacagcggcctggagatcagggatcgcatgtggctaaagataacgattcccaatgcatttatcggcgccgatgcggtcaattgggtgctggagaatgtggaggatgttcaggataggcgggaggcgcgaaggatcgtctcggcgatgctgcgcagcaattacatcaagcatacggtcaataagttgaccttctcggagcagtgctactacgtggtgaacgaggagcgcaatcccaatctgttgggccgaggacatctgcatccgcaccagctgccgcacgggcatggcggccatgcgcttagccatgcggacaccgagagcatcaccagcgacatcgggccgctaccgaacccgcccatttatatgccatattcggccacgtacaatccaagtcacggctatcagccgatccagtacggcatcgccgagcgacacatctcgtcgggatcgagtagcagcgatgtgctgaccagcaaggatatctcggcgtcgcagagcgacatcacctcggtgatccatcaggccaaccagctgaccatcgccgctcatggctctaacaaatcatccggctcctccaatcggggcggcggcggaggcggtggcggtggcggcaacaataccaacgatcaggacgtatccgtatttaattacgtattgtagaaacctttctttttgcaatcaaattgtgtttttaattaattaaattaaatatgtacgattattcttttttatatacgagtatacaaagcaagcaaacagcaaaccacaatataataattataattataataataataataataataattataataataataataatacttatgtatatgtatggtatggtgtaagtcatagaaaagaacgctaaacacccagccgcaacgagtcaaggatcagcgagggctcgtgaggcagcaggaggatcagcacagggatatccgggtccggcagcaatcggttgtggacccgatcagatcaaatcaactgagatatatgatatatgatatatatatatata

SEQ ID NO: 2027 - DNA, 2260 bp, DROSOPHILA
ctcgtttcgccctgcccccgctgcgtgcaccgacattaaagcgcaccaaatcgtgctaatggagcaatatcaacgccgtgcaaatcgacgaattaacagccgccgcttccattgaatcgaaatacccagcccaaaaaaaagagaaagaaaaagtaaaagaaacgcgtgcgagagcgagagggctagagcgaccagggggagaaaagcaaaatcgagtgaattttgtttgttgtatcggcttttccctggcttaatcccgttttccctgtgatttttccccaccaacttcccacgccacctccccaccgcatccatcgcatttcgttttgatcgcgttttatcgcgtcgaggagttttcccgtggatttccgcagtcggcgcagctaaaatggacgcggacaggggcggcgggcaggagacgaaggtgatataccacatcgacgatgagacgacgccgtatctggtgaagatccccattccatccgcccaggtgacgctgcgcgatttcaagctggtgctgaacaagcagaacaacaactacaagtacttcttcaagtcaatggacgccgatttcggtgtggtcaaagaggaaatagccgacgactccaccatactgccctgcttcaatgggcgagtggtgtcctggctggtctccgccgatggtaccaatcagtcagataactgctccgagctgccaaccagtgagtgtgaattgggcatgggtctgaccaacaggaagctacagcagcaacagcagcagcatcagcagcagcaacaacaacagcagcagcagcaccagcaacagcaacaacaacagcagcagcaggtgcagcctgtccagctggcgcagcagcaacagcagcaggtgctccatcaccagaagatgatgggcaatccgctgctgcagccgccaccgctcacatatcaatcggcatccgtgctctccagcgatctggactcgaccagtctctttggcaccgaatccgaattgacgctggaccgcgacatgaccgactatagcagcgttcagcgattgcaggtgcgcaagaagccgcagaggcgcaaaaaacgggcgcccagcatgtcgcgcacctcctcgtacagctccataaccgactcgaccatgtccctaaatatcattaccgtctccatcaacatggaggcggtcaactttctgggcatatccattgtcgggcaatcgaatcgcggcggcgacggcggcatctacgtgggcagcatcatgaaaggcggcgcagtggcactcgatggacgcatcgaaccgggcgacatgatcctccaagtgaacgatgtcaacttcgagaacatgaccaacgacgaggcggtacgtgtgctgagagaagtcgttcagaagccgggacccatcaagctggtggtggccaagtgctgggacccaaatcccaagggctacttcaccattccgcgcacggagccggtgcgacccatcgatcccggtgcttgggtggcgcacactcaggccctcacatcgcacgacagtattattgccgacattgcggagccgattaaggagcgtctggaccagaataacctcgaggagatcgttaaggcgatgacgaagccggacagcggcctggagatcagggatcgcatgtggctaaagataacgattcccaatgcatttatcggcgccgatgcggtcaattgggtgctggagaatgtggaggatgttcaggataggcgggaggcgcgaaggatcgtctcggcgatgctgcgcagcaattacatcaagcatacggtcaataagttgaccttctcggagcagtgctactacgtggtgaacgaggagcgcaatcccaatctgttgggccgaggacatctgcatccgcaccagctgccgcacgggcatggcggccatgcgcttagccatgcggacaccgagagcatcaccagcgacatcgggccgctaccgaacccgcccatttatatgccatattcggccacgtacaatccaagtcacggctatcagccgatccagtacggcatcgccgagcgacacatctcgtcgggatcgagtagcagcgatgtgctgaccagcaaggatatctcggcgtcgcagagcgacatcacctcggtgatccatcaggccaaccagctgaccatcgccgctcatggctctaacaaatcatccggctcctccaatcggggcggcggcggaggcggtggcggtggcggcaacaataccaacgatcaggacgtatccgtatttaattacgtattgtag

SEQ ID NO: 2028 - protein, 623 aa, DROSOPHILA
MDADRGGGQETKVIYHIDDETTPYLVKIPIPSAQVTLRDFKLVLNKQNNNYKYFFKSMDADFGVVKEEIADDSTILPCFNGRVVSWLVSADGTNQSDNCSELPTSECELGMGLTNRKLQQQQQQHQQQQQQQQQQHQQQQQQQQQQVQPVQLAQQQQQQVLHHQKMMGNPLLQPPPLTYQSASVLSSDLDSTSLFGTESELTLDRDMTDYSSVQRLQVRKKPQRRKKRAPSMSRTSSYSSITDSTMSLNIITVSINMEAVNFLGISIVGQSNRGGDGGIYVGSIMKGGAVALDGRIEPGDMILQVNDVNFENMTNDEAVRVLREVVQKPGPIKLVVAKCWDPNPKGYFTIPRTEPVRPIDPGAWVAHTQALTSHDSIIADIAEPIKERLDQNNLEEIVKAMTKPDSGLEIRDRMWLKITIPNAFIGADAVNWVLENVEDVQDRREARRIVSAMLRSNYIKHTVNKLTFSEQCYYVVNEERNPNLLGRGHLHPHQLPHGHGGHALSHADTESITSDIGPLPNPPIYMPYSATYNPSHGYQPIQYGIAERHISSGSSSSDVLTSKDISASQSDITSVIHQANQLTIAAHGSNKSSGSSNRGGGGGGGGGGNNTNDQDVSVFNYVL

SEQ ID NO: 2029 - DNA, 4220 bp, DROSOPHILA
tgcatgacgtctgctatcgaaattattcgaattttgtagcaaaaatatttatggatttattgtaacatcaaaagttattacattattactgtggacttatgtattataataagaattaataaaaataatttataatagaattataaaaagacctgatagattacatgtattacaacaatgttatcgacagcgaacaagatgttcgaatctttctgatattttgtccggtgtgaacgtgcgaattttagtacgacaaccagttacatcgatgtatcgatagtttttagactggccaatgtttattgttataaaataaatgttacaaataaacaattaatcacttagtataaacaaaaataagtgcaagcagcaagtgcgttgttaaaacgaccgccgccctccgaatttccttattgcgggcattaaatcgcaacaacaacaacgccaccagcaacagcaacaacaataagcaggagattcagattcgcaacgcaatcaaaacgtaaaaaaaaaacgaaaaataaaaaactacaaggcgaaacgcataaataaatagggaagcaaataatagtaataataagactaaaagcaagtggaaaagtacgaaagcgaaaagagaaaacatatgtacgttgcgtgagagtgacgtgtgtgtgtgtgtgtcagtgagcgaaggagagtgagcgagagaggggaggcgagcaaaaacaaaaacaacagcacagcataagcgagaccttgaaaactttaaaagcagcaaaaaaaacaagacaacagccaaaaataagaaactaaaagctgcaaaagtaataaaaaatatattttagccgaaaaatttccataataacaattctagaagtgcggagcgtacaccctgttatggagagtgacgattttcatttaccgcaaggcgccaattaaaggggaaaatccataaatcgaggattacaagtggaaaacaaggaggcagtaactccagaaaacgcccaaaaagtccaaaatggcagcaccagagacgggcaacacgggctccacaggatccgctggctcgacaggatcgggatcgggatcgggatcgggaagtgggagctcctcagatccagcgaatggacgggaggcccgtaaccttgccgaaaaacagcgacgggataagcttaatgccagcatccaggagctggccaccatggtaccacatgcagccgaatcctcccgtcgcctggacaaaaccgccgtccttagattcgccacccatggcctgagacttcagtatgtctttggcaagtccgcttccagacgtcgcaagaaaaccggcctcaagggaacgggtatgtctgcctcacctgtcggagatctacccaatcccagtctgcatctaacggacactctaatgcaactgctggactgctgcttcctcaccctaacctgcagtggccaaatcgttttggtatccaccagcgtggagcagctattgggtcactgtcagtccgatttgtatggccagaatctactgcagatcacgcatcccgatgatcaggatctgttaagacagcagctaatacccagggatatagagaccctgttctatcagcatcagcaccaccagcagcaggggcacaatccccagcagcactccacttccacgtcggcctcaacttcgggcagtgatctggaggaggaggaaatggagacggaggaacaccgtctgggtcggcagcagggagaggcggacgatgacgaggatcacccgtacaaccgacgaacacccagcccgcggagaatggcccatttggcgaccattgatgaccgactacgcatggatcggcgctgctttaccgtccgcttggctagggcttccacgcgagcggaggccacgcgtcattacgagcgggttaagatcgatggctgctttcgtcgcagtgactcctccttaaccggaggtgccgctgccaactatccgattgtctcccagctgatacgacgctcgagaaacaacaatatgctggctgctgctgcagcagtggcagcagaagcggcgacggtgccgccccagcacgatgccattgcccaggcggcgctgcacgggattagcggcaatgatattgtcctggtggccatggccagggtgctgcgagaggaacggccgcctgaggagacggagggtacagtgggcttgaccatttacagacagccagaaccctatcagttggagtaccatacgaggcatctaatcgacggcagcatcatcgactgtgatcaaaggattggtctggtggcgggatatatgaaggatgaggtgggtatattaacatcatctctctgaactgcttacgacaactaatcgtgtactctccactcgaaacaggtgcgcaaccttagtcccttctgtttcatgcacctggacgacgttcgctgggtgattgtggcccttcgacaaatgtacgattgcaacagtgactacggcgagagctgctaccgtctgctgtcccgcaacgggcgcttcatttacctgcacaccaagggatttctggaggtcgaccgtggcagtaataaggtgcattcctttctgtgcgtcaacacgctgctcgatgaggaggcgggccggcaaaaggtgcaggagatgaaggagaaattctcgacaatcatcaaggcggagatgcccacgcagagcagcagtcccgatttgcccgcctcgcaggcaccgcagcaacttgagagaattgtcctctatctaatagagaacctacagaagagtgtggattcagcagagacggttggcggccagggcatggaaagcctaatggacgatggctacagttcgccagcaaataccttaactctcgaggagttagctccctcgcccacgcccgccttggccttggtgccgccggctccctcatcggtcaagagctccatctccaagtcggtgagtgtggtcaatgtgacggcggccagaaagtttcagcaggagcatcagaagcagcgtgaacgtgaccgtgagcagcttaaggagcgcaccaactccacgcagggcgtgatccggcaactgagcagctgcctaagcgaggcggaaacggcatcctgtatcctatcaccagccagtagcttgagtgccagcgaagcaccggacacgcccgatccgcacagcaacacatcaccgccaccgtcgctccacacacgtcccagtgtcctgcatcgaaccctgaccagcacgctgcgatgacgggctgatggaacctggtttgccttctaattgggtgtgtggaaatggacgtcattggtagctcacgtgcccacaaacgaattagtatcggtaatataatcctggccaatcgcaaaatgaaaacccaaaatgtatcagaaaaaaacgagcattattcaaatagtttaaaaattcagccaaaaaacttaaaaacgaaaaaaaagagcgtgggttgaaaaaccttttgttttcatattcacatttccaagctttgagcaatcaaacaattttaattttcagtatacacatatgtataatgagttggctttacaaaagctattaacaaatcaagcaattgtgtaatttaatatgagactttccgtgattttcgctttctacgtacttttcgacttcaattgatctatagggtttccgtattaaaaacgaaattaacgtggtttcatttgatgaaaatgcaatatgagctcgcatttattttgatattatgacagtaataatgatctgatcacgataatcgttttctcaaaacataagcgatacattttgggtacatttggccattactgtttctgtgtgtgatttcggtataaaatagtagtttgattacatgttatattgatgaatggcgatcggtgggtgctgctaaatgcgttccattatcaataattttcgttatgtaattacgtttaatttgtaaatatgtatgagtgcgagcgtgagtgagtttgtgatcgtgtcagcatgggtgtgaatgaacattagatcagtgctcggatttggttttagttgaaatttaaaccccatttccccgatttcccagttatcaccttccgccccaaaacaccagtgtaaaaagagtacaaaaaaaaaaagaaaagaaaatagaaaaacaaacaaacaattatatatttatttcgccctaagtctagaacgtgctaaacacaactcattaatagttaaacaaacggatgttgcaatcgatggaaattaaacgctcgct

SEQ ID NO: 2030 - DNA, 2151 bp, DROSOPHILA
atggcagcaccagagacgggcaacacgggctccacaggatccgctggctcgacaggatcgggatcgggatcgggatcgggaagtgggagctcctcagatccagcgaatggacgggaggcccgtaaccttgccgaaaaacagcgacgggataagcttaatgccagcatccaggagctggccaccatggtaccacatgcagccgaatcctcccgtcgcctggacaaaaccgccgtccttagattcgccacccatggcctgagacttcagtatgtctttggcaagtccgcttccagacgtcgcaagaaaaccggcctcaagggaacgggtatgtctgcctcacctgtcggagatctacccaatcccagtctgcatctaacggacactctaatgcaactgctggactgctgcttcctcaccctaacctgcagtggccaaatcgttttggtatccaccagcgtggagcagctattgggtcactgtcagtccgatttgtatggccagaatctactgcagatcacgcatcccgatgatcaggatctgttaagacagcagctaatacccagggatatagagaccctgttctatcagcatcagcaccaccagcagcaggggcacaatccccagcagcactccacttccacgtcggcctcaacttcgggcagtgatctggaggaggaggaaatggagacggaggaacaccgtctgggtcggcagcagggagaggcggacgatgacgaggatcacccgtacaaccgacgaacacccagcccgcggagaatggcccatttggcgaccattgatgaccgactacgcatggatcggcgctgctttaccgtccgcttggctagggcttccacgcgagcggaggccacgcgtcattacgagcgggttaagatcgatggctgctttcgtcgcagtgactcctccttaaccggaggtgccgctgccaactatccgattgtctcccagctgatacgacgctcgagaaacaacaatatgctggctgctgctgcagcagtggcagcagaagcggcgacggtgccgccccagcacgatgccattgcccaggcggcgctgcacgggattagcggcaatgatattgtcctggtggccatggccagggtgctgcgagaggaacggccgcctgaggagacggagggtacagtgggcttgaccatttacagacagccagaaccctatcagttggagtaccatacgaggcatctaatcgacggcagcatcatcgactgtgatcaaaggattggtctggtggcgggatatatgaaggatgaggtgcgcaaccttagtcccttctgtttcatgcacctggacgacgttcgctgggtgattgtggcccttcgacaaatgtacgattgcaacagtgactacggcgagagctgctaccgtctgctgtcccgcaacgggcgcttcatttacctgcacaccaagggatttctggaggtcgaccgtggcagtaataaggtgcattcctttctgtgcgtcaacacgctgctcgatgaggaggcgggccggcaaaaggtgcaggagatgaaggagaaattctcgacaatcatcaaggcggagatgcccacgcagagcagcagtcccgatttgcccgcctcgcaggcaccgcagcaacttgagagaattgtcctctatctaatagagaacctacagaagagtgtggattcagcagagacggttggcggccagggcatggaaagcctaatggacgatggctacagttcgccagcaaataccttaactctcgaggagttagctccctcgcccacgcccgccttggccttggtgccgccggctccctcatcggtcaagagctccatctccaagtcggtgagtgtggtcaatgtgacggcggccagaaagtttcagcaggagcatcagaagcagcgtgaacgtgaccgtgagcagcttaaggagcgcaccaactccacgcagggcgtgatccggcaactgagcagctgcctaagcgaggcggaaacggcatcctgtatcctatcaccagccagtagcttgagtgccagcgaagcaccggacacgcccgatccgcacagcaacacatcaccgccaccgtcgctccacacacgtcccagtgtcctgcatcgaaccctgaccagcacgctgcgatga

SEQ ID NO: 2031 - protein, 716 aa, DROSOPHILA
MAAPETGNTGSTGSAGSTGSGSGSGSGSGSSSDPANGREARNLAEKQRRDKLNASIQELATMVPHAAESSRRLDKTAVLRFATHGLRLQYVFGKSASRRRKKTGLKGTGMSASPVGDLPNPSLHLTDTLMQLLDCCFLTLTCSGQIVLVSTSVEQLLGHCQSDLYGQNLLQITHPDDQDLLRQQLIPRDIETLFYQHQHHQQQGHNPQQHSTSTSASTSGSDLEEEEMETEEHRLGRQQGEADDDEDHPYNRRTPSPRRMAHLATIDDRLRMDRRCFTVRLARASTRAEATRHYERVKIDGCFRRSDSSLTGGAAANYPIVSQLIRRSRNNNMLAAAAAVAAEAATVPPQHDAIAQAALHGISGNDIVLVAMARVLREERPPEETEGTVGLTIYRQPEPYQLEYHTRHLIDGSIIDCDQRIGLVAGYMKDEVRNLSPFCFMHLDDVRWVIVALRQMYDCNSDYGESCYRLLSRNGRFIYLHTKGFLEVDRGSNKVHSFLCVNTLLDEEAGRQKVQEMKEKFSTIIKAEMPTQSSSPDLPASQAPQQLERIVLYLIENLQKSVDSAETVGGQGMESLMDDGYSSPANTLTLEELAPSPTPALALVPPAPSSVKSSISKSVSVVNVTAARKFQQEHQKQRERDREQLKERTNSTQGVIRQLSSCLSEAETASCILSPASSLSASEAPDTPDPHSNTSPPPSLHTRPSVLHRTLTSTLR

SEQ ID NO: 2032 - DNA, 3726 bp, DROSOPHILA
ttcttggtgcccatcggcaaggccaaggtaatgcggccgggcaaggacattaccctggtggcgcattccaaggcggtggagacatcgcttctggcagctgccgagctggccaagaagggtacggcactgttttactttgaatgacgcgaaaagtagctaaccttctcttatatgtttaggtattgaggctgaggtcattaacctgcgctccattcgtcctctggacacggcgaccatcttcgcctctgtacgaaagacccaccatctggtgaccgtggagaacggctggccccaacacggtgagtgggaaattcagctaattgaaagcctagcgatatttataaatttttaccctcttaggcgttggagctgagatctgcgcccgcataatggaggaccagaccttcttcgagctggacgcccccgtatggcgctgcgccggcgtggatgtgcccatgccctatgccaagacgctggaggcccacgccctgccccgcgttcaggatctcgtggaggcgactcttaaggtcttgggtggcaaagtgggcaaggccgctgcggccaacaagtaggaactcaggactagccagcctcccgatcggaacccccagctaactaaatttatagtccaagtcgaaacgctgcctctggtctaaccgagctgcccccataatagtgcaccgaactggaaattgaatgttctgaaaataaagcactaccgctttcgggttttgattagttttcggacgttctagtttaattatttggttatagaaatctcttgtgaaaaataaacgaaaacataaatacattttgagtgcttatattttggtatagttaatgatataatatcagaagataaaaaatatataattcttatcgttaatgattgaagtttaaaaagtgcgcgcaccgatgaaaacgttttcctattgaacgctgtccaacactgacgacatctattttttcgatatcagcctatcgtttagcaataggtgtcctcatatcgatagcgataatagcaaagttaacaataacaaaagatataacataacaaataattgcaatgctttggctgtaatggcaaacagctccagctccgacgaaagctgcaaggcccccgacaactttcgcatctcgagcgcctccacaaacggcgaggacgaggaatcagatgtcgcaggatacacaacaaagcgcaggccaacggcagcgacgaaggaactgttgaaggatgcgaacgccaaggataggaacgccaccacgggaatgggtgcccacatgcggtgcccactgtgccacagctgcagcgccagccgattccactgtcgcaattgcgtcagaaacggaaacattactcacagccaggcggaaaggcccgaaaggtttgcccaccttacactactcaccttatctgaaccacacatgtaaactgaatcgatcttacaatatttcagcctgacggagaagcagcagcgctacatcaacctgcaggcgggcctcaaaaccttcagcacgcgctacgaacgccttatcgggcagcaccgctccaatgaagatcgcctgatggccatcaaggccaagcgaaagcaactggagctcctacagcaactaatctccggcacgggacagagactgcgcgtcctcggcgagcgacgcgatgaattgcgtcgcgccaatgccgagaagcggaagaacctacctaaatacccggacaaggtcaagatgctcgaaaactacgtgttggatcgagtggagaaaatagagaaactcagggagacccatctgggtcttctggacagcataaaacaggcggcgcgtcgcagcattcagcaactggtcacctatgtgtttcccatagctgaggtggtcctcaaggaggagcaacagaggcgggctagtgtggagcgcaccgaggaggcggaaaccatagcggcgctggccgatgccaagaatacatcttacatacgcggcaaatgggtttttcatggcagtgggatcagtgaagttcaatacaggattgtgggcccttcgttgccagccaatggcgactataccgcctacctggactggctggcggacaacaaggacgacgttcccaaggccacggccaacgagattacgccgagcaggttcgaagcctatcgcattgtgggcgctcttacctacacggcgcagctgacgcagttgctcagcttctacctgaacgtgcggctgccacataagatcgcctatggcgacttctgtcgtaagctgctcaacgaggaacagttccggcgcaaaatctcgcgcctcaactccaatatcatgtatctggcctacacacagcaggtgaagttgcgtgccctcatcgaacagcatacgctggaaaacctactagccatcctcgatctggagcgcagcgacttgggtcgatatggccatctggacgtgaacaatgcaccactcatgaagtcagtggactccctactaatcggcatcgagaccgccacggaatcggagtcagagggtgagttggtttagcaatttgaggggaataatcttttcaaactgatgctgatgcctttccagacgaaaactctctgcgcatggactgggaggcggtgcccagcctgacaccgcagccggagctggcggatcccaatctgatgccggcggccaaccagcagtctaccatcgccttcgtgcgaatggcggccacatcggtgctgcgctggatcaaatgatcgcagaccaacagacgtccgatctttcggctatatcatcatgagacacgcgtgttatcttttacaaattagactaagtaatcgtttctgtgacagcacgtcggtgtttatcggcagttgctggttttagcgttatcctttggtttacagaactaattttgtatcaattatatatatacatatatattcgctgtgtgtaaagaaaatgcgccttttggatttatttctattacataacttattcgcctttatttaataaaaatggttctctataaataaatatatataaatttgctttattaatgcttgcatagtacactgacttagtaggtaaacgactcaatgagaaacaataattaaactggtgcaataattggaaaatcggcagacacagctgcgaatgaaacctacctagaatcagcactagaatcttagattagaatcgcaagggaacgagctgagtgaccctagctaaatgaactttgtgggcagttgttgcgtggatgggcgagcagctccagtcgtggtcaccacatcgccgccagcgctgggctgcggcaggctgggtttaacgaatacttgtggcagtgtgttggcagaggctcccacctgggcggcggacatggagacggagccgttggccagcaggtcgtagcgcggcgaggcgtggctcatcgtggagagcacgatggcggcggccatcgcctcctggttgtaaaaggccgtcacagcagccggaaggggctgctgtgcggccgatcccgaatgtcattggcgcgtgggcgtactgggcgctgaggatcccattcctccgcttgcgcccttgacgctgttcggcgagaaagccgcttgaatgaattgcttttccatttccttcagatttgacatagttttcattatatgcggatcggtgagatcgtacactggacccagcgttcttgggctattgtagatatacatgttattcgcgctgtagcccagggatccatttacctgcccc

SEQ ID NO: 2033 - DNA, 1592 bp, DROSOPHILA
ctcatatcgatagcgataatagcaaagttaacaataacaaaagatataacataacaaataattgcaatgctttggctgtaatggcaaacagctccagctccgacgaaagctgcaaggcccccgacaactttcgcatctcgagcgcctccacaaacggcgaggacgaggaatcagatgtcgcaggatacacaacaaagcgcaggccaacggcagcgacgaaggaactgttgaaggatgcgaacgccaaggataggaacgccaccacgggaatgggtgcccacatgcggtgcccactgtgccacagctgcagcgccagccgattccactgtcgcaattgcgtcagaaacggaaacattactcacagccaggcggaaaggcccgaaagcctgacggagaagcagcagcgctacatcaacctgcaggcgggcctcaaaaccttcagcacgcgctacgaacgccttatcgggcagcaccgctccaatgaagatcgcctgatggccatcaaggccaagcgaaagcaactggagctcctacagcaactaatctccggcacgggacagagactgcgcgtcctcggcgagcgacgcgatgaattgcgtcgcgccaatgccgagaagcggaagaacctacctaaatacccggacaaggtcaagatgctcgaaaactacgtgttggatcgagtggagaaaatagagaaactcagggagacccatctgggtcttctggacagcataaaacaggcggcgcgtcgcagcattcagcaactggtcacctatgtgtttcccatagctgaggtggtcctcaaggaggagcaacagaggcgggctagtgtggagcgcaccgaggaggcggaaaccatagcggcgctggccgatgccaagaatacatcttacatacgcggcaaatgggtttttcatggcagtgggatcagtgaagttcaatacaggattgtgggcccttcgttgccagccaatggcgactataccgcctacctggactggctggcggacaacaaggacgacgttcccaaggccacggccaacgagattacgccgagcaggttcgaagcctatcgcattgtgggcgctcttacctacacggcgcagctgacgcagttgctcagcttctacctgaacgtgcggctgccacataagatcgcctatggcgacttctgtcgtaagctgctcaacgaggaacagttccggcgcaaaatctcgcgcctcaactccaatatcatgtatctggcctacacacagcaggtgaagttgcgtgccctcatcgaacagcatacgctggaaaacctactagccatcctcgatctggagcgcagcgacttgggtcgatatggccatctggacgtgaacaatgcaccactcatgaagtcagtggactccctactaatcggcatcgagaccgccacggaatcggagtcagaggacgaaaactctctgcgcatggactgggaggcggtgcccagcctgacaccgcagccggagctggcggatcccaatctgatgccggcggccaaccagcagtctaccatcgccttcgtgcgaatggcggccacatcggtgctgcgctggatcaaatga

SEQ ID NO: 2034 - protein, 503 aa, DROSOPHILA
MANSSSSDESCKAPDNFRISSASTNGEDEESDVAGYTTKRRPTAATKELLKDANAKDRNATTGMGAHMRCPLCHSCSASRFHCRNCVRNGNITHSQAERPESLTEKQQRYINLQAGLKTFSTRYERLIGQHRSNEDRLMAIKAKRKQLELLQQLISGTGQRLRVLGERRDELRRANAEKRKNLPKYPDKVKMLENYVLDRVEKIEKLRETHLGLLDSIKQAARRSIQQLVTYVFPIAEVVLKEEQQRRASVERTEEAETIAALADAKNTSYIRGKWVFHGSGISEVQYRIVGPSLPANGDYTAYLDWLADNKDDVPKATANEITPSRFEAYRIVGALTYTAQLTQLLSFYLNVRLPHKIAYGDFCRKLLNEEQFRRKISRLNSNIMYLAYTQQVKLRALIEQHTLENLLAILDLERSDLGRYGHLDVNNAPLMKSVDSLLIGIETATESESEDENSLRMDWEAVPSLTPQPELADPNLMPAANQQSTIAFVRMAATSVLRWIK

SEQ ID NO: 2035 - DNA, 3747 bp, DROSOPHILA
gctaattaaaactaatggccaagtcaagaaagtaacgagccactgtcagctactagcggctgcaggtggatgtccttatctgagtggctttccttgttcgattcgtcctagaagggctgctattcaatcggaagggaaaaccactcccgcgaaaggtggcaaaagttacgcaacactcgtataaaaagtcgcacgcgatatcccgatatgggggggggagcagtcgcttgcaaatccaaataagaaggtcagtccaaagtcattgagttgcgtgccacgcatttgccagtgcccttgtctgtggcagatgcagttgcagttgcacccttacaacaagtcaactgtaaattggcttagctgcagtttatcattaaatttgatgtcattttatttaccattgcattccacctacattttattttcgtatgtggaagctttacgtgaggtgcagtattattaaaataatattttcaagtattctgcggatcgtgtagaattttttaagcccgttgtgctggacagtgtccactttaaatcttacatctccaaatcaatttgccaagaaaacttgtaaggtgaattctagcaatatacaaataaaacatattgtttctgaagttaaagtgattttatcatatttcccctggactggttgacattatgcaatttgttatggttacgatgtgcgccactaaatgcttctaggcataaaaactattgtaggtttgtattgtgaccttggtccttttccattctttttcatattctttcgagatgtcgtttcgtttgtataatcaatcgacaacctgctccaaataagttttttcgcaagaaacaatatattattgaccatatataattttggtttaaacagaagaaagtgagaatatcacaatcacgataagcaaaaaataatataactaaaacttacaatgcaccaaaaagttgcatcagaattttgtagttttctccctcgcactcccacagaaatcacctatagcgttctctcttctttgattttttatttgggcggctgctgtgttatgaattctattttatatatcatttttgtccaaaatctttcttcccggaaaccttctccactcgaaggataatatcgcgctttgaggccataaccgggctagttggagcccactcgatcttcttaatggttttatcacatgtgtggaatcggtggttgcgcaaaatatgcacaagtccaagcttggattgaagcagacccaaccgcatgccaatgcagtttcgcggaccaacaccaaacggcatgtatgcgtccatgttaagattgtcgcggttgctcgaattgaagcgctccggatcgtacttctcggggtccggccagtactgggggtcacgatgaacggccacagtggacatataaatggacatgccgtgcggcagctccatgttgtggaatggttcgagggtgaatcgctcaccctccgccggttgagagcattctcgttctatatagcccacgatcggatacttgcggagtgtctcgttgacaacctgagataggtagggcatctcctgaatacgctcatagcttatatggtcctcgtccccgaagaagtcaacgatctcttgccgcagacggtcctgtagagcctcgttcttggccagctcgtaaagcgtcatcgtcattgtggacgcactagtttcaaatccggcggtctgaaaaacagctgcctgggcaactaagtagtccaagtcaacttccttcgacatcttccccgggttggcagcagcctcgcgctttagggctagaaggatgtcgataaggtcgtttcgcttttcgcctgtcctttcgcgctcctttagaacgtagttgacgctggaccggatgaactttgtggtttccctagaaaagagtttcacacgggccagtgacgccagagccgggatcataaaaataatcgcaaagtcaatgcccctacttaaggtcagcgaaaatatagctctattgtggtaaaagaactcgctcttggcgtcctgcagagcgttggcctctacgccaaaggcaatagtcgctattaggtcagtggtgaaccgggagcatagatccttcacttggacttccgtaccactgcctagacgctcggcgctgtcctgcaagttctttccaatctacaaatagcattaaattttaaaacttagatacaatatacaaaaagaaaaaacaacttaataataactcagtaaatagcacccatttttgaatgcaaacaaattctctctgtggcttaccttcaccattagaggatacatttgcttgatcttgccagatgtaaaaaccggagagatttttgtgcgcaattccctccatcctgggcttcgtgcaaagaagaggtttttatagccaagcgcgtcgttgtgcgggtcagtttgaaggacgcggttgttgaagtattgaaacttcttgatcatcaccgtcttgatcagttctaaatcgcgaatgacaagtgccggacgatgggtcatgtatactccaacgaaaggctcgttctcgaagccaggcgcttcgtggaatttttgaatctgctcgaagaacggcacttttgcggtcaaaaactcccgggtgcagcctacaacgggaaacggacggatgtattttactccatggcgttcccaaaacgataaggttcgcctctgccagatatagaagacgatcgttaatgaaccgagaagaagcagtaacaacatgttgggtgcttagaagttagggatcttctactaaaatttccgctctgtgggccgctttaaagcgatcgccaaagctttccaggccgcatatgtagtagatgtagtagatgtagtagagactgtcaacactcaaagaaattgatactgatccattttatttcactttcagtttttagcataatacttattacctatcgacatacaaattattggtaaattattttgaataatataatagtataattatggataaatacacatttttagttttaaacaaaatatttattccaatagttaaacatcagctatattaaacataagtatcatttaataattacaattttataaacgaacgttagactttgttgacagtatagtatactcggtatacacgcatatgtgataaggctttttaaatcgcatttaatctttgactaggcgaatttaatagatgcttttttgcttagacttcatgactatacaaaaagctgaatcaattgcgaaccgagcaaaagttagttgaaataacgtttcagcgcgtcagcgtgtgctgtttgattaaaacggactttggggaaacacctctggtgaagattactacagtctcagtattatactttttcttgtttgtgctataaacagtagtcaataattttatatggcatatatagtattatggcactttttgaggtcggtatcagtagtcaagcgtaatagtatcctattatagagatataaaacttattgagccctaaacacagaggaaacacagatgcttaattcaagattttgttttttcaatataaaacataacttttttaatttattatgataaacactgcgatagaaacaactaataacaatttagaatcattggacttgtcttgttttggtcgttttgtaggcgttagaattggcgtggcgatattaatcttgctacattagggacacccaacctaagacatatcttatctaacgcctgtggcacgcctccaaattttaatgctttagtgcttatat

SEQ ID NO: 2036 - DNA, 1627 bp, DROSOPHILA
ctaacttctaagcacccaacatgttgttactgcttcttctcggttcattaacgatcgtcttctatatctggcagaggcgaaccttatcgttttgggaacgccatggagtaaaatacatccgtccgtttcccgttgtaggctgcacccgggagtttttgaccgcaaaagtgccgttcttcgagcagattcaaaaattccacgaagcgcctggcttcgagaacgagcctttcgttggagtatacatgacccatcgtccggcacttgtcattcgcgatttagaactgatcaagacggtgatgatcaagaagtttcaatacttcaacaaccgcgtccttcaaactgacccgcacaacgacgcgcttggctataaaaacctcttctttgcacgaagcccaggatggagggaattgcgcacaaaaatctctccggtttttacatctggcaagatcaagcaaatgtatcctctaatggtgaagattggaaagaacttgcaggacagcgccgagcgtctaggcagtggtacggaagtccaagtgaaggatctatgctcccggttcaccactgacctaatagcgactattgcctttggcgtagaggccaacgctctgcaggacgccaagagcgagttcttttaccacaatagagctatattttcgctgaccttaagtaggggcattgactttgcgattatttttatgatcccggctctggcgtcactggcccgtgtgaaactcttttctagggaaaccacaaagttcatccggtccagcgtcaactacgttctaaaggagcgcgaaaggacaggcgaaaagcgaaacgaccttatcgacatccttctagccctaaagcgcgaggctgctgccaacccggggaagatgtcgaaggaagttgacttggactacttagttgcccaggcagctgtttttcagaccgccggatttgaaactagtgcgtccacaatgacgatgacgctttacgagctggccaagaacgaggctctacaggaccgtctgcggcaagagatcgttgacttcttcggggacgaggaccatataagctatgagcgtattcaggagatgccctacctatctcaggttgtcaacgagacactccgcaagtatccgatcgtgggctatatagaacgagaatgctctcaaccggcggagggtgagcgattcaccctcgaaccattccacaacatggagctgccgcacggcatgtccatttatatgtccactgtggccgttcatcgtgacccccagtactggccggaccccgagaagtacgatccggagcgcttcaattcgagcaaccgcgacaatcttaacatggacgcatacatgccgtttggtgttggtccgcgaaactgcattggcatgcggttgggtctgcttcaatccaagcttggacttgtgcatattttgcgcaaccaccgattccacacatgtgataaaaccattaagaagatcgagtgggctccaactagcccggttatggcctcaaagcgcgatattatccttcgagtggagaaggtttccgggaagaaagattttggacaaaaatgatatataaaatagaattcataacacagcagccgcccaaataaaaaatcaaagaagagagaacg

SEQ ID NO: 2037 - protein, 514 aa, DROSOPHILA
MLLLLLLGSLTIVFYIWQRRTLSFWERHGVKYIRPFPVVGCTREFLTAKVPFFEQIQKFHEAPGFENEPFVGVYMTHRPALVIRDLELIKTVMIKKFQYFNNRVLQTDPHNDALGYKNLFFARSPGWRELRTKISPVFTSGKIKQMYPLMVKIGKNLQDSAERLGSGTEVQVKDLCSRFTTDLIATIAFGVEANALQDAKSEFFYHNRAIFSLTLSRGIDFAIIFMIPALASLARVKLFSRETTKFIRSSVNYVLKERERTGEKRNDLIDILLALKREAAANPGKMSKEVDLDYLVAQAAVFQTAGFETSASTMTMTLYELAKNEALQDRLRQEIVDFFGDEDHISYERIQEMPYLSQVVNETLRKYPIVGYIERECSQPAEGERFTLEPFHNMELPHGMSIYMSTVAVHRDPQYWPDPEKYDPERFNSSNRDNLNMDAYMPFGVGPRNCIGMRLGLLQSKLGLVHILRNHRFHTCDKTIKKIEWAPTSPVMASKRDIILRVEKVSGKKDFGQK

SEQ ID NO: 2038 - DNA, 11390 bp, DROSOPHILA
ccaaatgaattataggtccaacaaattttagaatattgaattttgtatcttttttcactatccttatcgagctaaagtttttgtgaacaaaatttagaatacaagcaagagaccacgacagttggtttggaaattggcaaataaaactagtaaaataaaaaagttcctgacatattcataattataattatatatataattatttcggcatatagataaaaattgttaaggctaaagaagaaagaaaaaaaaacgacgttcatacggacggacagtcatttggacggccagaaagattcacctagtgatcctgatcaagaatataaatcatttataggatcagaaacgctatattgtatgtaaaagaaaaaacgcgataaatatatttattgttttatatagcaacaacttatacaaaattgaaataatttaaatattttatagtgattgacaaagacgccgaaagacaaataaagaaaaaacgatcgcttttatttccaaaagacccacaaaatattgcatatatcgcttgttcattttgggccgtcgatcccaacagctacaatttttaaaatagcaattttttatcttttaccctgtttaattcaaactaattcttttgatatgcaatatgaggttccaaagatcataaaatattaaaacggttttgatctgaccattctggaagatatttaattcaacggctctaaattcatagtactcttctttatatatatatatatatatgaaaatatattgtttagtttctaaattaaattgacaagttcttttaaaagagtatccatgaacagaaagttttaaaatatttaactcaaaatttgatcatgtggttggagtgctggctaagagcgcagcgaagtgcccaacctcgaacaaggaaccgttttttcggcaacggtcactctgttttcgatagaaataacttttcctcgcaggcctggtattttttggcatttaccagcagtgcggccgcattgaatcgttaaaaagtaaaaagagaagcaacagcgtgaggtgtaaataatgtaagacaatgcaatatagtaaaggcgagcagcaattgggaacagtgtgctcgaatcaagtgcgattggtgcggcggaaaagcgattggcacttggcaggccgcaacgtagttgtggaaaacgcagcacacccacacacagccagagtgcacacatatattgactgatgattttcgtctacgtttcaattcgattttcggaaatttcaccttcgcgttgctgtttttcggctatttcaaacttgttttcagctgtgcgcgccccctccgtcccccgtcccgaccccttttcgttccgctggcagccgctcactttttgacttgcttacgtattacgttcgcgtgccaattcgcagtgcaaagcgtgcattacaaacgcaaaatctcgcataattccacgcacattacccgtctgtcgccttccagttgtctcgcgatctcccgtcattttcgtgtggaaatcgtgtgacgctctaagaataccacggatcggtggaaagccgtgaaaagcgcaggaaaagccaaccaaatgtgtgtcaaagagcagcagcaggtgtaaatgcagtgttctaaagcgctgcaatgctccgtgcgtgtgtgtgtgtatgtgtgtgtgtgtcgcaaacatatggcagcaaataaatattaatcgcagttaatattttcgccatactccgcagattgaagattcacgcgaaggccaagcccagagtgactgcgtgtggggagtagggcccgccaggtgtaccaagtgcgccaagcaatcccatggattccaatgtcaaatgtaacaatcgaaacacaccagccgccctgaggaagcagaagaaagtgtttcgaggtcaaccaaccaccaccatcaccaccccccgatttgttatcatttcgttttcgtttactttttaaccctccgctcgagaacgtggtttcttttgcgacgtgcaatactctgtggcagaagtcttgcaccgttccaaaagagagcagcacgtggagcgacgagaacggccgtacaatacccaagtccgtggccaccaagctccagcgtctcaaggccaaggcgtctgcgagccagcactacggcggcacctatcgtaagtcctcgtccggagcgtcagcgtccaacggaaaccacagcgagggcagcgacagaagctcatcctctgcgctccacggcgggcatagccatcaacgcggtggcgccgccgaggagctccaatttgctttggcggatgtggccgagaagtcatatcaaagcaacagcagcagcagcaacctcaaccacaataacaattatcaaaagtcaaaccacaccagtgccaattattaccaacactccaacaacagcaaccacccacaaagcaccaccaccaacctgccttatcagcccaacagcaataccaacacgatgatgatgaccaaacagaagaattcgctggccgagcgcctcaacatcggtgaggaggtgcgggaactgaagctgggcgccaccttcaacccgaagaacacctcgaccgcctttcacactatcaaatgtaagtgctgtccaggggactcccattcaccctcgccagaactcagaattcacccacaaacgcctcgtcttgcagatgacttcaagccagcgagcgtggacaccagccgcatggcatctgtggacgtcggctccaacaatcaagttactgttaccgtgccaaattctggtgagtgcactcgaaaaagtggtcgaaaacagcattgcgttaggtctttgtgaaggtagatttttaacatcataaaataagtatatttaaactggaagtcttaattaagggcacagtttaaatgtttcacacaaagaatagttattcaatcaaattccaaagctcaaacttctataccaatgaatttgtgaagaaatttggaattatgtataactagttcatatttactaaataagctaaacacgtttagcgatactacaattgtccagaataagcaaggtgaaatttggtgtgcacctgcttaatcgaatggtggaatgtgcatctcgcccagaagctttaaaaaaattacttgaagcaatcaataacacgtgctccaagccaagttcagatacacttgagctcagaaatatttacatttgtattcctaaaaccaattggactaaatccctttataaagagaacacaacatgtacttatttttcaaacggacatggacatggctgggttaatagggttttatcgattgggaactcggaaccaaagttatgatataccctttcgaactgggataaaagaaggtgtctggttagagctcattgtatgcgtttagttgggactgcattgcatgcctgatgacataatgcataatccattagacgagacgaactttttaaagatacaaattaatggctagccctgtgcattatttgaatcaagcaagagaagaaaaggccagctctggagagcaaagacagcgaattacatcaagtcaggaaaaatgcagccaagcgttcaagtctttcacctcggccgctctatactggtattattccgctatgctctttgtggccaaacattgtcgtcgtcatcgtcatcgtctgtgggccgacgactgtggtggggctgctgctttggggcccattgcggccgacttggcttgtgtaacgcttcgttgattgcgagcgccgagtcgccaaagagttttggcggcggcggtggtggcgacggcgacaatagcatcggaatttggtcaagtgtgggccactgaagtgggtaagtgcggtaactgaccaatctatgccgcctctctgggaatcggacgggtgcagccaaaggcgcacaatgctgaactagtttccagtttggcaccgtccacagccaagttcccgtccagcctatcaatggaacacttttgccgtgcttccatagccatagtaacgataaccatatcgtttacccacagctacggcaattttgatagtagttttgtgttttattccgcatatggccagttaataatggtcagaaatggaatcgtagtaatagtcaattgaatcgagtaagttatagattgttacgcattgattcatacttattattctttcttgatatcaaattagtgtctagaaatgtctggaataaagcctatttttgtaagcattcccaaatttcccctgtctccgcgtctgaactttgtgatactagaagctctctccccttggtgactcaaccgattggatacggcaatttgaaaccgcgtcaaggtcatctcagaccacgttacattaagccactagagattcctgactaaatacgatatgataaaacaaaagtttattgcaaacgtgtttgtagatctaaaagaagtttcgtttagacaaaccagcgctttcgtttgattatttgggcaggaagtctaagccagccttgaataggccagtttgattgtccagggatgcatttctccgtctactgtccccgaaaatctccatcaatgatcctatgttataggtcaacgaaaaggcctgcttgattttgtctgcagtagaattcagaagcctactcttgacttccgaaagaagtggcaatatgaccaaggcactgtatacctgcaggcaaagcactatgttcataaatcagcatgatatctgctcgttggtcacgatgctcaccaacgattaaaactccgattcgcattgtcgacttctctcgctgacgacggaatccaggttactaaagtcagttgcaaccaaaaagcagacgcccatagcgagtttaatagtcagcatgataattgctattaacgttcaggccagactgtgaatatcacgctaatatggttgagcagcaagagggcagagatgaattagtgaaatgcgttttagaagagtgtccgaatgattcttgtttaatacaacagttaaatgtatatacttcatatgctgacgtcgaataagcagcgaatatcagtatccacttgtgacctattcagtttgaccgattatccccgccgattcgttctggagactatgtcacgcatgggacacgctccgaaccccaaaatcgatctggccgccacaggcttgtagatctttgggcagtagggcttctggcaattcatgggcggtggacagtagggaggcaggcagcttgccatcctgcccaggtttccgggaatacacatgggtggagtgcagggacttggacaatagggtggccagcaggtcggtgggagggtacagcccggttctttgcagggtggatagcaatcgggcggaacgcatttggaatcgcagtgtggcgatctgcacggataacagtagggtggttgacaaattgtggggcagtgcggcatatagcaccagggaaagtaggagccatcggggtactccaggccttccgagagatctgacgggggcttaaatgggtcttcagttgtagttgtggttgttgttgtagttatagttgtagtgactgcctttaatggaagcgacggagaaagtgttggtggtggtggaggtggtggaggtggtgccgccggcggcggtggtctccgattcggtcgggatggtttatagaatggcggaggcctcgggcagagaagctccaccttcttggccagtaccttaaataagaaacatcgtctggacgatgttatatgcacctcttccagggcttgtcccagcgacggaacccattcggctccgtatttccttcctgagttagcctccgcaatggcatttaccagatccgcggttagttttttcaacttgaggtgatcctgcgtccaacttggctgcgcccgcaacagacctgccaagtggatactattattatctcatgctatatatcagagcttttgtggaaatatcacaatatatcactgttttttgaacggcccaatactgttcctattcaaattcgtatcacaaacttacatatcatgaacagtaaaagcggaaacttttcgttcatctcgagcaacttgccaaactcccaacttgtttcatttacatggatacttaagtaaattagttatttgcatatttcttaagcagatccaaattgaaatgctgcgatttaatcaaataggcaacagtcaataaacgtgagtgaaacatatacaatagcattgcgaaaaacagtatgtgtcatctctttaagctcaaaaagtgtaaagttagtggcttaaatgctattcacagaaagcaattcaaagaatatacaaattcttctgcttattagcactaaacggttttatttttgtaagcccaatgaacatccgtaaaaatttccgatctgaaacattaactttcataacaacttcatattacagccaatctacaatatttggcatggtacaaaaccgaaaaatgttttcactacagataaggttcatctagcagcagtagctcttttattcctctaagaaatccagtaggtttattttcttggttatgcagtctttaagaaatccaattagtgtatctagtttctcttctatattttgttttctcgatcgcgctgatacaggtaacttttcatctgcaaagatgatggtaatgtttggaattttaatggtcggcaggattatgtagttttgcacagtgttcttgttggttatccgaaagttggcaattttagctggaagcttctttccttctttcatttctatgacgcacagcattataagtgtgtcaatcgtgtccgagtcctgacgcccttttacgttctggtcgagccaggacttcagttcgttgattttattcagcaccgctcctatttcccattgaaacaggtagagaatggctaaagaatcgagtcttactttcgttttggatcgcatagcaactcggacttaccaatgtgtacagcaagccgtcgcattttcgattctagcgataacactcggattttaccatttatattccatgggacaaatccattagtcaaactttacattacctggtcgccaaagcagcgaaaagatcaatattggatttctgacaaggtagctctgattttcatcagtggtcaggtgttaaagcgctaccaatgctatgtagtagaattgttgatgatccccattcgtatgaacatcatgatcctatgctactactataagagctagtaacttgtgattaggcatgtacatacattttaatgttgcgaaagcactggcaatccggaaaacacagtcccaaatgttctttaaagaatgattttcctgaactatgaaatgttcctgttttaattgaatgaaaaacattttaaattgaatgtttaatttaatttagaaagttagttcggttacgcttttataacattaagttctttgattttcataaggacgcacttcttaatgcccgcactcaatcctttcttagtcctttcttgcaaccccgttctgggtgcaggtttggtatcctccttggcgttgctacgacgtttgattattatggccccgtttttagatttctcttggtatttggccagctccttttcatccttcacgatgacaaccgtaatcggtggcaattgaatttccggcatgctgatgttgttcgtgatcgtgttaatattactgatggtttgtttgggatttacaaatcccttttctgtttctgatttacaaagcttgaccagcgtgttcaggaattgcctcttttcgtcctctttagtgtttgccttcttatttgaatatgtattgggtttcgcgtgtgatggttccggttccggttccggtgcagagctatcatcgttgttaccattgaacatttcgtttatcattatgaccttatcctcgaagtgtttgtggatgttgtttaaaacaggtaaaaatggcttctgatttgagacgtggagcacacagagcagcactataaatgtcacaaataggaattgttgttcggatagtaccagctttaggaactgcaaactcacccaaagcgatcgtacaaaaccgcatcgtgggttgtaaaaagagaactaaattaattccgccaagatgggtgcatcttggattcacgaaaaaggcgcgaataatccattggtaccagatcacattttaatttaggccattaatatttttacaaatatgtatcttctgaaagtcgtctagtcgttacttaaatttagcactaggtttagttagtattataacattttctttttaaaaactcactatctccaaaaatcaatattgtaaaattcggagaatttgcattaaaaatattttatcaaaactttaccagaacttttgtttgacttatggggaaggaagcataagcaggaataattaatagtcattagttttatttttcaaatatcaatctcacctaattccatggttattatacaaaatattaatttttccaagaacttaagtgatagtatggccacgattttcaaggataatatttagatttgagtataaaaaaaagaaatttaaaaatattgctccatgcatagataaccgaaataagtaaaattgaaatttaaaatgcttaacaaacccatttgtcatcagcttgaggaaatgcgagagactatattgacaattaatttgctagatgttattttcgaaaatatttttatatttctatcgtcgtaaatgtcttttgcactgcatttcaaacttctgaataaaatttatataagctcacaccattaatgtttacgatctctgctttatattatgatggtgccaatgccttatattactattttatttaacttgcagaaagttccggagtgcctcatacagtttataagggaaatcagagagagtatgcaaaggagtgtttgatgatctacgacaaggagacgggcgccatcaccatagaaaagctaaaccacaatattcaagtgaagaagaccaggtaagtgctttaatcttagagaatttcaagcagcaagcttaaatttacattactgcaggaatgaagtcaccaacaagtcagtccagctgcctggtcagaacatgggtcagccccacaatcagggtgcgaacggagcggcaccagtcgcggtcccggtacctggtcaaggctcgggaacggcacccaaaatggagaatagcaccatgcgaatctcaaccaagacgaaggtttctaccggcagccgtagaaacaatattagtaagtattgtagaaagaggaaacaagaggacacagtagaaacacacaccactctaggtgtgcagataacttaaacccaaataaaataaacagaaattcaataagattgaagtgcttgctctaatttttctttatcttaccattttcagttgacttcaagccgcgcaattcgccaatgcaacagaactcaccatcgcgtccagtgccagtccaccgcagtccccaatctgcgccggcgtatgttactttatccgtcctcgctgacatatatttcatagaattatctttcagttgggatgctaacaatgcacagcagacgctgcccagcattcccctgatcaccgacgacgacgactttgggttgagagccgccctgcacaacagcggacatgggaatacgtcaggcaccgcggcaggtcaaccggatttcggatctacgtcctcgtccacgcacattggcaagcagcggcaggctcctccgcatggccatggaaagcgccagcagatgcaccagcgcctcagcccaccaatggctcagcagcagcagccatctaactatgggcgtggttacaatggcggccacaaccacgcacaacagcagcagcaccatcaacgcaactcgccgcagcagcagcgtccttctgcctatggccacggcaatagcatgcccatagacgtggactcgagcagggagcatgaactgacctcgcagtccgtggcgcaagcggctgccgccttggaacaggtgggttgtgattatggttaggtatggcgcattgctaacttgagggtttgctttcttgcagcaaattggcggtgcactgagtgcatcgagctccagttcggagtcggattccagcgacagtgacagcggtagcgactcggatgacagcacagaggacgatcgctccacgcagggccaacagcaggatcaccagcagcagcagcagcagcagcatcaggtctatcagaatcacaaacacactcaacagcaggtggcgcagcagcaccataatcagctgcccaacctgggcctcggctccatatcaccagcatatggcagcagtcatcaacagcagcatcagcagcagatgcttccacatcaacagaaacagaagcaacagtccggcatttatgcgtccaatggtggctttccaaacgatttcctacaaaacgatctgcagttgtcgtcaaattcgtccgacgatgacgacgactagctgtttaaagtttgatcttatttgccttcttttgactaaaccaacgacaacaagagcaacaacaattattgatattttgtctatatgcgtgtaattaatttgtaattattgagaggtgattttacttgctagtgaaattttttaaaataaattcttatttctacaccacgatatccacaaaaatatattaattaattttaaacactaattttagaccttccaaatgtgctggtaaacattgaattaaatcgaaaaaagattaatcaaatcaatcaaaatcataaaccacaatgcatattcgtttttaacacaaacaaatgattatgtaaaacttgttggaagactaataatatatcgcacgcaaataaaacacagatttatactataaaaaatacccaggagataaaacgaacgatgtagaggatgcaactgaggaaattatttagtttgtaataagaatgctgcaaatcaagaaaatatttttaagttttccagaaaaaagtgaccactcggatttttgccattaattacgcattttaatttaagcccttacttctttttaatatattcagataccaaaagcgcaaagaaacatattttaaaagatattttcaagtgttattttgttttcccttacttcgctcatctttgtagtcaagcttacttttatcgttggcgatttagttaatttaatgaaaagtaaaagctatctgagtttacgttttttattaatttgttagctatatttatccctctctttgttagtcacataattgtgcggtatgaagacatttgtgtttttagctcatgttttatttgaatttatttgtagttttttaattaattttaaatttatactattacgattttgttatgagcttgcaatagttaaacgcaacgaaagaaaataaatgtgaaacgaaataaccggcctggtgaaagccatttttgtttatatttgtattcaccccagaatgtccaaagaatttgttacactggc

SEQ ID NO: 2039 - DNA, 1837 bp, DROSOPHILA
tcgttaaaaagtaaaaagagaagcaacagcgtgaggtgtaaataatattgaagattcacgcgaaggccaagcccagagtgactgcgtgtggggagtagggcccgccaggtgtaccaagtgcgccaagcaatcccatggattccaatgtcaaatgtaacaatcgaaacacaccagccgccctgaggaagcagaagaaagtgtttcgaggtcaaccaaccaccaccatcaccaccccccgatttgttatcatttcgttttcgtttactttttaaccctccgctcgagaacgtggtttcttttgcgacgtgcaatactctgtggcagaagtcttgcaccgttccaaaagagagcagcacgtggagcgacgagaacggccgtacaatacccaagtccgtggccaccaagctccagcgtctcaaggccaaggcgtctgcgagccagcactacggcggcacctatcccagcgagcgtggacaccagccgcatggcatctgtggacgtcggctccaacaatcaagttactgttaccgtgccaaattctgaaagttccggagtgcctcatacagtttataagggaaatcagagagagtatgcaaaggagtgtttgatgatctacgacaaggagacgggcgccatcaccatagaaaagctaaaccacaatattcaagtgaagaagaccaggaatgaagtcaccaacaagtcagtccagctgcctggtcagaacatgggtcagccccacaatcagggtgcgaacggagcggcaccagtcgcggtcccggtacctggtcaaggctcgggaacggcacccaaaatggagaatagcaccatgcgaatctcaaccaagacgaaggtttctaccggcagccgtagaaacaatattattgacttcaagccgcgcaattcgccaatgcaacagaactcaccatcgcgtccagtgccagtccaccgcagtccccaatctgcgccggcttgggatgctaacaatgcacagcagacgctgcccagcattcccctgatcaccgacgacgacgactttgggttgagagccgccctgcacaacagcggacatgggaatacgtcaggcaccgcggcaggtcaaccggatttcggatctacgtcctcgtccacgcacattggcaagcagcggcaggctcctccgcatggccatggaaagcgccagcagatgcaccagcgcctcagcccaccaatggctcagcagcagcagccatctaactatgggcgtggttacaatggcggccacaaccacgcacaacagcagcagcaccatcaacgcaactcgccgcagcagcagcgtccttctgcctatggccacggcaatagcatgcccatagacgtggactcgagcagggagcatgaactgacctcgcagtccgtggcgcaagcggctgccgccttggaacagcaaattggcggtgcactgagtgcatcgagctccagttcggagtcggattccagcgacagtgacagcggtagcgactcggatgacagcacagaggacgatcgctccacgcagggccaacagcaggatcaccagcagcagcagcagcagcagcatcaggtctatcagaatcacaaacacactcaacagcaggtggcgcagcagcaccataatcagctgcccaacctgggcctcggctccatatcaccagcatatggcagcagtcatcaacagcagcatcagcagcagatgcttccacatcaacagaaacagaagcaacagtccggcatttatgcgtccaatggtggctttccaaacgatttcctacaaaacgatctgcagttgtcgtcaaattcgtccgacgatgacgacgactag

SEQ ID NO: 2040 - protein, 450 aa, DROSOPHILA
MASVDVGSNNQVTVTVPNSESSGVPHTVYKGNQREYAKECLMIYDKETGAITIEKLNHNIQVKKTRNEVTNKSVQLPGQNMGQPHNQGANGAAPVAVPVPGQGSGTAPKMENSTMRISTKTKVSTGSRRNNIIDFKPRNSPMQQNSPSRPVPVHRSPQSAPAWDANNAQQTLPSIPLITDDDDFGLRAALHNSGHGNTSGTAAGQPDFGSTSSSTHIGKQRQAPPHGHGKRQQMHQRLSPPMAQQQQPSNYGRGYNGGHNHAQQQQHHQRNSPQQQRPSAYGHGNSMPIDVDSSREHELTSQSVAQAAAALEQQIGGALSASSSSSESDSSDSDSGSDSDDSTEDDRSTQGQQQDHQQQQQQQHQVYQNHKHTQQQVAQQHHNQLPNLGLGSISPAYGSSHQQQHQQQMLPHQQKQKQQSGIYASNGGFPNDFLQNDLQLSSNSSDDDDD

SEQ ID NO: 2041 - DNA, 2630 bp, DROSOPHILA
ctagctactgtcagaaatgaggagcagcatcagctaatgcttcactacgtcaacaggaaaggtaagcttgataaagaaaagtgacactactccccgtttgacctttatatagaacggatatttggaaacagaaccttttggttgggcgccacaaacctggtggatcggagctatttctggacctggatgagcactggcattcccgttacctacgcacaatggagccggagagagcccaagtctgatcgaacaggtcaagacgcctgcctggtcttgggaacagacaatctctggcatagtgaaccctgccaacggaaacacaattttatttgcgaaaatgtttgtcagctaaattattcagggctggacaagagagtatatatataaaattgttatttcaatctgaaaatatataaaacaatatccaaagcaaaatgaatagaacacaattgtctttcaacgatgcaattaacaacccaaatggataggcacctttttgccacagcgtttgtatcaagaaatacttaaaagttttagctttgggttggtctaagtaattagagaattcaaataatcgcaacatccaaatttaatactttcgattacatataaatatagcgatttttcaaattcgaaatgacgaatagcagtcattaaacattaaagatttttgtcaaaaaacgtcgaaggcgtagtctggccaataacatcagtttcaagtatatgtttttgtagacaaatcatacaactttttatattacataatatagtctcacaaggaatgtatgtttacacaaggaatattttattatacacagagaaggattactcatcacttatgttgtttatagtgagctaaaggaaaagtatctcttctggggatatatagtagacgatttgggatcaactgtgagaaaaaaaagactcgagagccccgagcattaaaagattgacaaataactcagtctttaagtttgccttgcttgaaattaaaaactcattcgcatttttaattgcacatattcggctgatattttatttaacaaccggactctttttcgactcacttcgtcaaattaggttagtttacgtcgtcatcgaactggcaacgcttctcgcaaacgaagtagcgcagctctgagcagttctcgttcacccatagtccgttaattccattgatgccaaggcagtggcgattatcgctggagtagcccggtagaccgttctggaagttgcggtagttgacggcgcgccccttgctgaaccacacccagttgttgtcactggccaggtcggtgcccgaggtccagagcggatcggtcagcagatcctgctggttccgggcgtagttgaagaggaagttgcggagactgcgctgatcctgctcggatgtaatgcttacgagcgtgtacccataggcggcacaggtggcctgagcttggaaccagttcactttggcaaaggcacctatggcgaacctgccatcgcgcagactaaatggcgagaaggcgggcagctgaggctcctcggcggtgtcgtttccgggtgctggagatgtgggtaagaggtccgattctggcaaggaccaagcggagcagaagaccaaacagaccaggaatagggaacgcatgttgatttgtatggcaagttgagagggaagcttcccttatatagccaatgcactaattgcccgggcatttatcaatgtcactagataagcagctgagtcttggcataagtgagtactttccccaaattggttcagctcgcgccagcttcttgcgttatgccataaatattgccccagtaaatctcaattttaagcgctgcgcaaatccgctggctatttgtatgttaaggttcgcgctggctaataatttcatcccaccccaaaagccttcgatccaatgcatgtgctggaaatttatcgaaaaaatgtaaaaagcatatctcatttaactcagctgtcagtgggggaaatccgagggagaaaaagagacgttatgacgggtcaaggattgccaattgccaaagcggaaccctcgtccaacttttccccacgcaatctcgatgcacattttctttcggcgtcgctctgtgtgtttgtgtgtttgccaagtgtttacgactcccgctgggattgaacagcaacgaaatgtgcaaacacagatcgctgcacttcctccactcctttattcgttttcgacttgggggaaaatgacatagaatcaaaaactgcttgctgccttgtggtaagtgaggcgttctgcggggcgtatgcttaatatgaattcttcgaatggcgtctcattcagaatagcatttgcatgctgcacaagggacagtgaattcacattacaaagaaggtcattcattgtcaggtggaaggtaatcgttatagtaaagtaatccgctcttgtataaaaatcgcaatcgatacaagtatttgaagctcaataataaaagatgaaagattgccgatttggaggtcttggccaatcgaatttcaaatatgtatagtattatttgtatttgcttttccctttaatccatgagtcgacaacataataaacctttttagaaaaattccatcttctatggagaagtcactctcactcactaaagttaat

SEQ ID NO: 2042 - DNA, 630 bp, DROSOPHILA
atgcgttccctattcctggtctgtttggtcttctgctccgcttggtccttgccagaatcggacctcttacccacatctccagcacccggaaacgacaccgccgaggagcctcagctgcccgccttctcgccatttagtctgcgcgatggcaggttcgccataggtgcctttgccaaagtgaactggttccaagctcaggccacctgtgccgcctatgggtacacgctcgtaagcattacatccgagcaggatcagcgcagtctccgcaacttcctcttcaactacgcccggaaccagcaggatctgctgaccgatccgctctggacctcgggcaccgacctggccagtgacaacaactgggtgtggttcagcaaggggcgcgccgtcaactaccgcaacttccagaacggtctaccgggctactccagcgataatcgccactgccttggcatcaatggaattaacggactatgggtgaacgagaactgctcagagctgcgctacttcgtttgcgagaagcgttgccagttcgatgacgacgtaaactaacctaatttgacgaagtgagtcgaaaaagagtccggttgttaaataaaatatcagccgaatatgtgcaattaaaaatgcgaa

SEQ ID NO: 2043 - protein, 182 aa, DROSOPHILA
MRSLFLVCLVFCSAWSLPESDLLPTSPAPGNDTAEEPQLPAFSPFSLRDGRFAIGAFAKVNWFQAQATCAAYGYTLVSITSEQDQRSLRNFLFNYARNQQDLLTDPLWTSGTDLASDNNWVWFSKGRAVNYRNFQNGLPGYSSDNRHCLGINGINGLWVNENCSELRYFVCEKRCQFDDDVN

SEQ ID NO: 2044 - DNA, 10921 bp, DROSOPHILA
gctctgggcctcaagctgttcatcaggaaggcccatactcggtcattataacgccccgttcatggccaagttgattgcacaaaattatagaaattcaactgtctgcagatgaggaaactgggaagcaaaggaatttatgcagggttagggctattagatgcacagggcaaactcaataaagtttctgtgaaaaatgttgaacatcattttattactttcactattttctatttgtatatatagatcatgaagacttaactataaaattattttaaattatatatgaaacttcaattactagcaagcttaaacatttttgattttctgtttttaatgataaatttaattatttaaccaaaaaagtcaagattaaaacaaaatatgggtaaagaatatttgcatgatgacttcaagtttagatttcctaaatggttttgttatgacgtttcagagttgtgtcgcagcactaacaaattgctatagtttaagataggagagtttgactgtagcgtcaatgtccacttaaatgccattcaagggtacaaaatggaaagtttattgttcatttgaagcgacgtcacttaacccgtttgagaggcgtctcctcgcagtcacttgagtgctaataaatcatgggattcctcaatcagtcattaccattaagaaacgcatctttgtcaaaagggaaaggggcagggcgggggaaacacgtcacaaccaccgtctgtctttatcggcagggactcctcggcttcttactcacccaagcattattcaacaatttcaattaatgatttatcttctctcccgcccctctcttatcccttattccttagtactgaagagatgacatgacgtaaaaccagattcagaaagctcaagttcactgccaagcagagtaacttcaagagaaagcaaaggaagtgagagcgcaaaagcttgagattgagcttggagcttttgcaacggcacccacaaaatgccagccgtgaaaataataatgagtaccgaaacgtcggcgagcgagacaacaccgctgcggcggtcggaaaacgaaacacctgaccataaagaactggcccaaagtaacagcaacagtcgacaaacaacagttaatagcaacaacaataactacagtaactcggtgcaagtgcgtctgcaggaacaggacagagatagcgacagcgagcaacaacaacatactgccaccatcaccatggataccaacaaaagaatcctctgccgcgtgggcttggatgttttaatcttgctctgcggtaagtacaaaaattccactaaccaaactaacttggcaactacgcctgtttacctccaaactcaatgcgaaattttgatcgcatcgtgctatgtatttacattacacgcggtgtttattttctgtcgcaatgtttattatttcttttgtgtacttccctctcgctcactcctccctctggatttatgtaattgcaaaagctttcttgctctctcgctctcttgccctcgctcttcgcactagactctcttagaagaaactgtttttgttttgaattggaataactaatagctttgaaggcgctaaacttatctgactcaagcctatactaagccgttttcaggtttgtaactatttgtcatatgctatttatgtatatatgcacagcaaataaaggtgaaagataaatatggcttaccagtcgaaatgttataataatcaaaagtaatattacatgatttaatgcttttttgaaccacttatgtcagtattcaaatttctaaggcattttgagatatcaaccatttttctcggtgtagctaaactgtttagtttcctgctcaccttacctttatttttatttgctgtacaaacaaaagcggagacagttaaattgtgccaggtaaaggtggacaacctgcacgggctgactgttgcattcgattgggggtgttgctcaattttcataaccagcactttccgcttttccataacaccttgtcagcgtattgctttaccgtcattataaagttaagaaaccattatctaaaaaaaaccccctaaacttatgaaatatcaatattcttgaacataagtatctcgtagcagtcaatctgttctcgacctttaactagcagtactttactctttgttcttcggtttagaaatctccatggattgataatcaagttatttttgttttgagaacctttatctgggttcctcccgcgaatattttatggaatccagtaaatagcgtgcattgtagcggaaccggtttacctgagaatgttcattatttagctttgctgattagcttgcctgtctgactcatgttgtaccgccttattgtcccagtggcattttgtagatttttgcaattggcactactgaaaaggcaatcttacaccgccatatttgagcagctgatatgagtcgccgtcttgccaatcagccaaagacctcgcaccaaacttacgactccattcttggcgtagaattggtgccattttccccagcaccggatccaacgggatctttgccctacctgagcataaatgcatgacacacgatcttagccaggtagccaacattcgcgtctcagttgactcaccttaagcgccattcggatccaggcagtaaatccaaatatttcccacatgaatcatgtgccaaaaatctcctcattaaaggtgaacaaatcagttaccaaaataaaagtagattaataattcaaatagttagttgaagataaaagggcataataaacttctaacgaaagacatatctcctaatctaaaactcgtgccgtgcgcacattgccagttcccacagccaaaaaagtttccatcgatttgtcaaccaaatatggagaggactgttccgtgaatatattaaaaaaaaacttggacaaaatatcgatctgttttccgaataaattccaattagttaaatctgctacaaatgtcttggtgggatctgcatcggaatggaacagctaggaatccatttgagatgcttgtttttagtgggtcgagattagtttgccaggccgcatctatctatctatgcatcctatcggatgcatctgatggccgctcgtctgtcgacgactaattttcgggtgtaaattacttttgacgctaggcaaacgctgataaagtggtttttcggccaaggggctgacaagagtgtcggtggcacttaaccaaacaaattcttcgacctccggagaaaccccaaccttaaactgaaaccccatttgacgttaattgaatgcgaacgagctgcggcatcgagctcctcttcgctcaccgctctccgctcttcgattctttcacctttctcctcgagggtggagtcattaaacccataaaatatacacagaaatgcatatcgggggtcggttcccagatatttccccgccaccgctgcacttcaataatttatcgagcgtgattgcgtgcgcgtgttttgcttttgcggtaagaaattctcccattcagtttgaccaaaactaagtagaaagaacaatatttatgcaatgcattttgggcatgaggcaattgttggctcattgttgttgtttaccttccacccaatagcaaacataaaccaaaaacagaaacagtaacatatacagatgcagagacagatacagatatgtggccacaatagatacagatggaaaagaagatacatggcctgccaagatggatgttgattttccatgtgtttttttttttttgcgctacaattcctgggacaaaagtaatgaacatttaattgccaacagctcatgactcatgacctgtctgtcaggcagggaaaggttcgaatcggattgggaatcgaaatctttacctgtgcgacaccttttctcttctctggcttagaaatctagatgcgggtgaactcgggctggggctcagattcttggtaataattttcgatttcttggcagccatgaaattgccgaaaacccacatcaataattttcgttttcgtttttttaacggactgcgtttttgtccttcttcgatcgaatcaattggcgaggctagagttcagtcatccttaatctgtgcgaatggcggagttgtcttttagttcatctctcggcactaattggctttaatttgacttccgtcatgtctaattaatgcggcaagtgcaagtcagacgcttttaattagatgctgccccgtatttgaggtcagatttgagtagactgtcttgttgtctgtcttccaactcttgcaacaaatagatactgggatactaccagagataacgtgctaaaagcaaacatttggtaacttaaaaggacggcgagcggcactcgcagcatccgaaagatacaaagatacatccgcagcgtaggccggtggcttttgagctgggtaaatcgtcgaagaaagcggcggcgtagagtgatcttctgaagaaatgtgattgtcgggcggactgaagtgggcgcgtttacctctttgtttaacaaacaatttgtttatgttgccctcttcgctggtttggttcaattacaccgtagctttgcagcaggcggcgtctttttattattgaaatgaacttgacaccaaatggactgtgtacggttttgtttgctatgaaagtgcggcataggtgcgttacaattcggttgaatgcagtccccctcgaaagaattaaattaaacatttccgctaagggtatgattaagcctaaacggcttatgtcaccctcatataaaaaaagaagcatagaaacacgcacaaaacaccaacaaaattgattcgtttttttgtgtctgccatttaacacactttttttcccttttcaatatttccattttccccatttaccctatcaacgtgaagttcgaactagttaatctcttatgctcatgtagatcagggtaaatctattgccaaaggctagacactttcgttttccatgccgcagagtcataaaaacattttactgctaccgggtggctgacaatacaattagggattagggatctggagccggagaaaggaaatgagaggactcctagggccaacaatgggccacttgctgtttgtaatatgacgctgatctctgcaagaattccatctctgcaactttcccagcagcatcagaagcagtcggcgatcattaaactcatccagacaatgccactgatctagattttgggacctgatgcagctgcaggccgaagaaaggaatgaatagatagagggtcaggggtctcggcattgtgtcacccacctttgtggaacctcagcgatcaccctattcagcctggcgaaaaaaagaaaaatgcaattaagcgacagacaagtcgccatcgagtgctggctatgcacttcacttccatgaatccatgactccatccatgctcctcgcataggagcagtgttctagcgttccgatgagcacttcacaacgcacaactttcccaattttcaacgcctcgctgacttgggccagttcatcgacatggcgatgtcttttccgcctgcaggtagtatggctcattgcagaaaggcaattaggcaaactggagcgttggagccaggagggctaatgcagttttaattatccactagataaacgccctgcgtgtacagcaaagcaaataaagtagccgaacggacaggcgatccatcagcagcaagtacgcatcacaactcgtataggtcattattaatggcagcgaattttgaattagacagggcgaagaagtcgctgacagatttccctgggcggaattactttatgatccacaattgagaccccgcacacgttcgcctgtcactgggaaatcttatcgacggcttagtcgtatcataagtcaatagggagggtctctatgacgtttttacccccaagaagatagtgccgcagcacttagggcccgatgacccactgagatgaggggaaaatgggaaaatatgggggggaatggggaaaatattgataaatggagtgatgtttataatttctattttttccaatttttgtttgcctttagctggatttcccatactgctgtttttcctgctgggcgagccgtacaagcggggcttcttctgcgatgacgagtcactgaagcacccgttccacgattctacggtccggaattggatgctatacttcatcggagctgtgataccagtcggcgtggtaagtgatcggttgggttggatggattgggtggggtatggtgggtggttgatggacgacagcccgaaattgtgtcaagcagctgtcggatacttgagcgaagattgcgcaatcgcctcaagttcagttgtcggcactatggagctatgaggcaagataccacatgcatgctccatgctccactgtccacatgtcggcaattaaaactagaacaacatgtgtctggccctaatgggcctagaatagagattcatcccatctcggatgccataaatatttgcatgtgcgacccgacgacttctagagaaaagggtttctaacgagctgctaaatcgaggaactcactctcactcccattgctcttccttttccatgccgcagatattcatcgtggaggtcatcatttcacagaacaaggccaagcaggataatggcaatgcaaccagtcgaaggtacgtctttatgaactacgaactgcccgactggatgatcgagtgctacaagaagatcggcatctatgccttcggcgctgtgctcagccagctgaccacggatatagccaagtactccatcggccgactgcgtccccatttcatcgcggtaagtgcatatctgcatgtccatgggttggcatctacacagcgttatccccgttctgacattgccaattaattttaatctgcaacatgtgcagcgggacaggcgacactgacagcgacaacgaagacaaatccaaagtcgaagtaggagacgaacttgtacagagacaatgtcaaaaactcacacgatgtggggatgggttattaatagtatttggccaaaaggggaatgatgaaggctctagttgaatacactatctaagatggattagttagtttaacaggtagcaattcttcaaagacttttagctattttgtggactatctttaagatttaatatatatttgttagcatctagcaaacggaagagcctttatcgaatttaaagacacattccttcacttctcgctcaaagaatagaaaagagatttgtttacttaaactttgtcagggtatttctgccttcaatgaatccccaatcgcccagaccagttggtttgtttatttatgatattttgactggttgtcagacaatttcataaatattcgcggcggcaagtggcttgttagctggttatcgtgcgctccatttggggagatgggaatagggatcgttacagggattgccatagggatcgctttaaaaaggggagccgcagcacagagccgccctattgtttagtgaagtgcggcaaccgggcagagagtgcgatgcaacactgcagctgttgcctcatctccagcagtcacttctctaatttgctgcacatgtggcagagatgccagtggataccagcgccactatttgttggccctaagcagcttaactccaagtcatcaatgccttctcctttcctgctgccgcccacaggtgtgccagcctcaaatggccgacggcagcacctgcgacgatgcgatcaatgcgggaaaatacatccaggagttcacatgcaagggagttggatcgtcggcgcgcatgctcaaagagatgcgcctctccttccccagtggccactccagcttcaccttcttcgccatggtctatctggcggtgagtccattgtcatagtcacacgatcagaacctcattgttctccatactcttccatttacaattgcagctctacctgcaggctcgcatgacctggcggggctccaagctgctgcgtcaccttctccagttcctgttcatcatggtggcctggtacacagccctaagtcgcgtatcggactacaagcaccactggtccgatgtgctggcaggatcgcttattggctccataagcgcactggtcgtggtaagtcaagaccggataagaagttattaaatcatacgcatattttagagataggaattaatttgaaagcaagaaaacaattgtgtatggttcatgcatgcaatcacctcatcattcttccatttagcataatatgcccgacattcatatgcaacacttccctcatctttttagagctacggtttgcccaagagttggttcaactttcaaacagtttggcccgccaaaagtaaggccaagtaggagaggagcacagagacacagacagaatcagaagcttatatcagcattgtaaagaggattagcaattaaagcatcacaaattctgcatatcccgactattcattactaacctggtggtggccattagccttaattgatctgcgggatacgctctccaaatggccagaactcaacacctagtcgcggtgtctgtgccttgcgtgcggtgccaatcaatgccatccgcagcacgaagcctcgtttccaggtcgaattgcctctttccacccagctggctatgcagctgtccagttgtaatttcacgcttcacttggggcaggggacattcctaagggggacgcaatgcccatcatattccaaggcgattcaattagatagatagacgatggggtaaggaaacaacgacgcatacttttaggagcagctgtttaatgttgcaagtgtggcattgagctagaattataggtcgcatatcaaaattattatcaaataactgttatgtatgatgtacatacatatgtaggagaatgtgcattactcgaccaataaatagtatacctttataaaggaaaagcagtgtgaatgtaatcactaaggtgcgtaacagtcatatgaacattagttttgcaatatggtattccaatgttatatgttaaagggtatacaagtattttgcaagtagaatgaacatattccgactctttggagcataaactcttgattatgttcattagcaagtcgctttggccgtgtccgtttctctgtccctatgaacgtcgagatctggggaaataagcatgctagcttgcttcagaacagaatattgtgttattagtttttccgattttgaactctctggttcttagtccgttataaacaaacatattaacatactaatttgagcaaatttcacaaaacccttctacttgattttttgctaatattttttgtatatatatgtacctgtgtattggtatggtattacactttattaaaaacacattttcctacttgcaggccaactatgtctccgacttgtttcaaaagcccaacacgaagccctatttggcgcgtacagtgcaagacatgaatgcatcgccggcccaggccataacgattactacaaactaacacgcagaagtgcaaaatagcaattacaagttgcacgagctgtagttaaactaaggactcgatgttcttacggctttcttcatggggacagtgaagcctagctttgcgagccttcccaattaatttattcctgtactggcattttaagagctgagcgtgaatgtatgtgttagctgcaagtgcactcgagtgccttctttaatatttaaactagagcaattgagagatctgtgtatgacgatagctatactaaatatttttaactgacgcaacaatttccacaaaacaagtgacctttaaaacagagctgcgcaaaaaatatatgaaagcaataagtattatgtaaactagttttaagctttggatacggaaagataattaaaatatttctaagatggccgttaaatatgttaatttataatttttggcgagaatttacaattgttcgctgaatatttttatgaaaataaaatagaattaagaatatggttttgttatttgtagtaaaaaggtgataacgagttttggatttcaaatgttatggagttattgaaataaaaataaaatatggtggaaaccttttactttttataaatgacgttcattttgaaattgaaaaaaaagaaaagaaaacgattttttttttaaatatccggtttggtatatctggtattatttatggttcgcgaggtatatcggtatattttagtggtcgatctacggtcacgctgaaatatttgtacacaataaaaaccggctcgttttttcgctgaaaaaggtaataaactaaagttaatgaacgcaaacgaaacaatcggtgaagttaatcgacaaatgagatgcataatcccgcgttgcattttggtggatacagaaataggccagaaatcgcgatttccacaccgcacccatgacgtgtcactcgcccacttcgtttctaatcaattagtttgtttttatccatagaacgtgttactgtctgcaaaatgatcaccgacgtgcaattggccattttctccaacgttctgggcgtatttctgttcctgctggtggttgcctatcattatattaatgccaataccggaaagtaagtaatcccacttggtgaagaagaggaagaagacagcccggaatcaacaataaaaccgattttcatttatttacaggcccagtgccaaggcaaaatgatgtaggatgtttccgctaacagactaatatagttctaccaggataatgataatgctgcttcattcgcaaaataaatatgtagttgtacaaatctaatccaggatgtcgttaatggcctccttcatggcctggacatcgtccagtgttttgccagatctctgatctttgcctgtgtagaaactcctctgcgtttgatgtccaaagctgaaggccttgacgtagggcaaacttttagtttcctctatcacctcgtccacctccatggaattgggtttgc

SEQ ID NO: 2045 - DNA, 1584 bp, DROSOPHILA
atgagtaccgaaacgtcggcgagcgagacaacaccgctgcggcggtcggaaaacgaaacacctgaccataaagaactggcccaaagtaacagcaacagtcgacaaacaacagttaatagcaacaacaataactacagtaactcggtgcaagtgcgtctgcaggaacaggacagagatagcgacagcgagcaacaacaacatactgccaccatcaccatggataccaacaaaagaatcctctgccgcgtgggcttggatgttttaatcttgctctgcgctggatttcccatactgctgtttttcctgctgggcgagccgtacaagcggggcttcttctgcgatgacgagtcactgaagcacccgttccacgattctacggtccggaattggatgctatacttcatcggagctgtgataccagtcggcgtgatattcatcgtggaggtcatcatttcacagaacaaggccaagcaggataatggcaatgcaaccagtcgaaggtacgtctttatgaactacgaactgcccgactggatgatcgagtgctacaagaagatcggcatctatgccttcggcgctgtgctcagccagctgaccacggatatagccaagtactccatcggccgactgcgtccccatttcatcgcggtgtgccagcctcaaatggccgacggcagcacctgcgacgatgcgatcaatgcgggaaaatacatccaggagttcacatgcaagggagttggatcgtcggcgcgcatgctcaaagagatgcgcctctccttccccagtggccactccagcttcaccttcttcgccatggtctatctggcgctctacctgcaggctcgcatgacctggcggggctccaagctgctgcgtcaccttctccagttcctgttcatcatggtggcctggtacacagccctaagtcgcgtatcggactacaagcaccactggtccgatgtgctggcaggatcgcttattggctccataagcgcactggtcgtggccaactatgtctccgacttgtttcaaaagcccaacacgaagccctatttggcgcgtacagtgcaagacatgaatgcatcgccggcccaggccataacgattactacaaactaacacgcagaagtgcaaaatagcaattacaagttgcacgagctgtagttaaactaaggactcgatgttcttacggctttcttcatggggacagtgaagcctagctttgcgagccttcccaattaatttattcctgtactggcattttaagagctgagcgtgaatgtatgtgttagctgcaagtgcactcgagtgccttctttaatatttaaactagagcaattgagagatctgtgtatgacgatagctatactaaatatttttaactgacgcaacaatttccacaaaacaagtgacctttaaaacagagctgcgcaaaaaatatatgaaagcaataagtattatgtaaactagttttaagctttggatacggaaagataattaaaatatttctaagatggccgttaaatatgttaatttataatttttggcgagaatttacaattgttcgctgaatatttttatgaa

SEQ ID NO: 2046 - protein, 372 aa, DROSOPHILA
MSTETSASETTPLRRSENETPDHKELAQSNSNSRQTTVNSNNNNYSNSVQVRLQEQDRDSDSEQQQHTATITMDTNKRILCRVGLDVLILLCAGFPILLFFLLGEPYKRGFFCDDESLKHPFHDSTVRNWMLYFIGAVIPVGVIFIVEVIISQNKAKQDNGNATSRRYVFMNYELPDWMIECYKKIGIYAFGAVLSQLTTDIAKYSIGRLRPHFIAVCQPQMADGSTCDDAINAGKYIQEFTCKGVGSSARMLKEMRLSFPSGHSSFTFFAMVYLALYLQARMTWRGSKLLRHLLQFLFIMVAWYTALSRVSDYKHHWSDVLAGSLIGSISALVVANYVSDLFQKPNTKPYLARTVQDMNASPAQAITITTN

SEQ ID NO: 2047 - DNA, 4370 bp, DROSOPHILA
acgcatgtacacgactttatacacaaagcatataagaatattactttcagttaaattagttataataccgacaacaatcaattacaaatattaaatgctgcgtttaatttggtgggaataaaaatagtaattatcaggaaatactcggtttactagtacaatctcacattttttaataaagttttatatacaactcggtaatttagtaaatcgtaataaatcgtgaaaaatgcggcatgtcagttttaagcggtttaagggcattagagtgggcgtggcaaaattttttttgcacatcgatagaaaattacaagacgaataaaaatctaaacaatatatcaacaggtttttcaaaagtgtgggcgtggcacttttgtgcggtttgtgggcgtggcaacatgggtcaacaaacttgctcagcgtctttgtctttagaatctgtatgctcattcttaactatgctgaatctagctttcatagttccggagatctcgacgttcatacgactcgtctattgatcctgatcaggaatatatataatctatatagtcgaaaaagcttccttctgcctgttacatacttttcaacgaatatagtataccattttactctacggctatcgggtataataattgaaaataatagtaagcaaacaacagtttcgttgtttgaaagttaaaatccatttttttttttttggattttacatggagaatatattatgagttgctttatttattcaataagaataatgtgcaatgggcacattatgctttatatactttgcactttaaagtgaataatgagaattatgcacagaaatggatttctggttttacacaatatttcagagtagaggtggtttgatttcatataaatgcgagggtataaattagttggttcgcagccccaccttacttttttggcgataaaattgtgtgcacattttcgccgcccgatggtacgtttcaccggctgagcgagggtcacactggcaattccctcgcggattttatcaacaggtggttggttaattgccttaaagcatcggaatgggcgacgtgacaggactgagcaatgcccaggcggacgagctgtgccagaagccggattcgtccaccaaggtgagtgggttccagtcgggcagaccgcgccatcgcgcaacgcaactaacccgctgtcggcggcgcaggacttcctcttccagcaaaccatgtaccgcatcaaggatccacgcaagtcgctgcctttctacacgggcgtcctcgggatgaccttgctggtgaaactggacttccccgaggccaagttctcgctgtactttctggggtaaggtcgattgctccggcttatcttaatttgatattgatacaatgacaatcgcttttgtatctggcccaggtacgagaacgccaccgatgtgcctaaggatcccaagcagcgacgcagctgggcgctgagccgcaaggccaccattgagttgacccagtaagtggttttccgtttgtgcatgcgattcgcaaggttccatttgagtaggcccttctaatgtcatgactctaggaaaaggttatttgaatagtccatagtggcggtacaataccaatcttaatatggatgtagatatcatctacaaggaacacttccaacagaaactcctccgcaatcagatggaatttcattcaaaggcattttagaattgtcatgcgtgtaaaaaagatagttccatatggatattctatttttacatttcgtaactcgtttttgtagatatgatagcttcaactacagcatgcggcagcataatttcctttttttttcagaactcaatgaaaatctattgtaggcatcggaaaatatttatttgtttttataatttaggtacatgtctaaagattttatttatatttttttgaagatgaaatatgacaggtgacgtttcccattctccatacattgcgtaaaccgatttctggcgtttggggaaaaggggacagatcgggagagcgtgccgtccattccaaatcacctttaattgggatgaggcgctctgaaagtgttccctcaaaacagccatcgatgctgtatgcgatggtgtatgccgttgcaccttcttgttgaaaccaagtgtttactgtgacctttggtgaaagcaaaggcctttcatgcaaatatagagggttgctgtcagcccagtagcgcatattttttttgtttgtaaaccgaccgacataaatgaaaatgggcttctgaaagttcctgcactacgccatcttatatggatgaaattgaagatcatcatgcaaaattctgctcacagaacgatcggatagtcagtccaagggcagatgcgtgtttgcgcgcagaacgccgcggagatcacaatattgaccctgtcactgcttcaatgttctcaggtgatctaactgggtcgggggactccagttcttcgttttgtcgcacttgcagtttgcctgaatgtagtgacccatgtaaaaatcgatttgcggtctgggacgggagccaacggggctaaattaaagcgattccgaaatgcacgctgcgtttaaagacccgaacatccgcttgaaaagtaggcctcatcggcaaaggcacgctcctcactatttcaacgcatgttggcgactgaaccgtgtagggacaaaactttgcagtagcccctcttgaacgtggccagtagcgtttcgctatgatatgaactaactgaatggcgcgcattttaaaaaaggaaattatactgccgcacgctgtatttttacatttcttaaatcgtttccttagacattatagatccacctataactcgagaactatgtacttgtatatatattaatttggcctttagtttttaatcaaaacttacacctaaactagaggtcctcgattatataaaggaaatacgtataattctactaatcttctgctcttttccgtagcaactggggcactgagagggatccggatcagaattaccacaccggcaacaccgatccacgtggtttcggacacattggaatcatggtgcccgacgtgtacgccgcctgccagcggtaagtaatgtcaatgggaaagtcctgttctttttcaaagacgcaatctttcccgcagcttccaggagcttggcgtggacttcgtgaagaagcccgacgacggccgcatgaagggactggccttcatcaaggaccccgacggctactggatcgagatcttcaatgcacactccgtctagtctggctggcagatagaattaacttgattaattgcgcatctgccactgttccttaatagcgatccccactaggctggaccgccgagtggagtcgcaacaataaatgagaaattgtgtaacaattgggctgtggacctcattcactcgggtgcacctgtcgcagctgccgcagctgtcaacgtcggccccaaaataattggctcctgctcctgtgtcctttttccggcttggtattttcacacgctaattattatttacatcgcggacagccgagctttttgataagcaaatgtgttactcactcgcacatggggtgtttgcccagacggtctgcgagggccatgtggtcatggtgtggggcgtggatggtggtggccactaataatagtcaaatatgggagcgcagtatttgtttggtgtcgaatatggcgttttgcaatttaaggtcctgtatttggcgactcgagaacagttctcgtccagaggtcgtactgcgagtgtcccgcgttctgaattactatggagatatcccagcccagcatcggcatcttctacatcagcaaagtgctggccctggctccatatgctacggtccggaactccaagggccgggtggaaattggtcgcagctggctcttcactgtatactcggccacattaacggtggttatgggtgagttgagcatccaaaggcgggtgacttccttctgactaaacgctatccgcatctgcgtagtttttctcacttatcggggtctcctgttcgatgctaactccgaaattcccgtgcggtaggtacttttgtatctacatctatgtttcctacttgtaaggtcccagttctgtgccgttttttttttactaatctctacgggcttgtcccattcaaggattttaaagtagtgacactcggagtggagtcctgcacttttagaacccatatcttatcaaatatgtataagtaatactttcctctcaagaaggatatgattttgttgcggagggtgtcattactttgatcctaattgtgtgtatacttttctcgatttttctctatctaatcatcacctctgctcccttctaaacacattcgatcttgaccaattaattgctctgacaa

SEQ ID NO: 2048 - DNA, 703 bp, DROSOPHILA
ccctcgcggattttatcaacaggtggttggttaattgccttaaagcatcggaatgggcgacgtgacaggactgagcaatgcccaggcggacgagctgtgccagaagccggattcgtccaccaaggacttcctcttccagcaaaccatgtaccgcatcaaggatccacgcaagtcgctgcctttctacacgggcgtcctcgggatgaccttgctggtgaaactggacttccccgaggccaagttctcgctgtactttctggggtacgagaacgccaccgatgtgcctaaggatcccaagcagcgacgcagctgggcgctgagccgcaaggccaccattgagttgacccacaactggggcactgagagggatccggatcagaattaccacaccggcaacaccgatccacgtggtttcggacacattggaatcatggtgcccgacgtgtacgccgcctgccagcgcttccaggagcttggcgtggacttcgtgaagaagcccgacgacggccgcatgaagggactggccttcatcaaggaccccgacggctactggatcgagatcttcaatgcacactccgtctagtctggctggcagatagaattaacttgattaattgcgcatctgccactgttccttaatagcgatccccactaggctggaccgccgagtggagtcgcaacaataaatgagaaattgtgtaac

SEQ ID NO: 2049 - protein, 176 aa, DROSOPHILA
MGDVTGLSNAQADELCQKPDSSTKDFLFQQTMYRIKDPRKSLPFYTGVLGMTLLVKLDFPEAKFSLYFLGYENATDVPKDPKQRRSWALSRKATIELTHNWGTERDPDQNYHTGNTDPRGFGHIGIMVPDVYAACQRFQELGVDFVKKPDDGRMKGLAFIKDPDGYWIEIFNAHSV

SEQ ID NO: 2050 - DNA, 8784 bp, DROSOPHILA
tgggttgggtaatgacccgctccacgccgagtgcagcggtggcctcgaactcatccagaaagccatcgtccgccagttgctcctcgggcactcccatgtctgcagacagatcggccatcaggcgtctgatcttctgggtcttgtcccgcaacagggccgtattctcctccagattgaccacatacgaagaagcgtactccttcatcacggcattttggcgggccatgaccttggcgctcacgtttggtgttcccgcctctaagccaagtgacttctcgcgctgcttgatgagctcctggatcacgaagcccacgaactcgagcaggaagttgatgaacctcatgcctccgggcatcaccaccagatacgacttgatgttggcccaatgcagctggtgcttctcgttcagatgcttcagatactccaccgtgctggagcgaaagttcgcctccgacttcttgtcggtgatgggccagaagaagcggcgtttgaactccgcgggatccagcagacggaagaggtagtgcatcacatgcacgaaggccacctggttgggcttgaggaacatgtcccaggcaatcagcttacgcagctcgtccggcagggggtgcaccagggccagtccctgcagcttcctgtggagcttctcgctctgctccttctcttcggccttccacggtgcaattatggtccgatccatattttagcacagaaattaagtaaaatatggcggtttagtttgaagttctttgtttttgttgctgcccagtgttaccaagtggttgaattcaactgaatgaagacgttcccactgcctgtttatattgacgaaaaatgttatataaaagggataaatctatttattttccctaggaatagtaactgcgaatagcatttgtgttttttaaatgttttttataatatttcccagatatttgtttttaagtacaaatttatttccctagttactcgattggtataaatccaatgacctgccacggtcacactagattcatagttcggaaatttgtcggttgctggagtttgtggacgaatttatatttaatttttaagcacttggtaattaactaatcgacgttcatttcgaagtgaccccctgacaaactaaatagttttcggataaagctcgagcccagtcactggctgacccccaacgagccgaaaaccttggcatccgggtccaacgtagcactttctttttgtccgcggcggagaaaaatcaatatacgcatggggtatagaaatcgaatctcggcgcatatatagtatagattacagacaaataatctgggggacaagcgaacgtccgcccaccgaaacgataaccaaatcagcatgaaaatatgtatgcgacacggccgcaaaacttaggaagaaacccagtttggccatgaatcatgcaattgaatgggcccattgtgtactatatatgtacatatgcattctgatttagtgtctgttctccattcgcagatatcgggaatccggctgccacaatgggttccctattccgcagcgaggaaatggcgctgtgccagctgttcctgcagagcgaggcggcctacgcctgcgtctccgagttgggagaactgggattggtccagttccgagatgtgagtaggatgggttacataaagctgcggtcgaggcagccgcactgactaaccataaaccacaatcataccccttacctcattagcgaattcggtattccatgaaacgtcccctttaacgcgaatgcaaagtaaatgcaaagctggtgacaccagctactaagtgtatagtataactacgtgtgttacctcatttaaataaaattgaaaaatatagtggcataagtgctatatcttgatcgcacaaatgaagtatctttgagatcccccaataacaaaccaatcttttgaaatccgcagctcaatcccgatgtcaacgctttccagaggaagttcgtcaacgaggtgcgccgctgcgatgagatggagcgcaagctgcgttacctggagaaggagatcaagaaggacggcatccccatgttggacaccggggagagtcccgaggccccgcagccccgcgagatgatcgacctggaggtatacgccgccatactccctgttttctgctaaacactgttgaacttatatggctttcttgtctgctgctcaggccacctttgagaagctggagaacgagctgagggaggtgaatcagaacgccgaggccctgaagcgcaactttctggagctgaccgagctgaagcatattttgcgcaaaacccaagtgttcttcgatgaggtaagctgcggcatgagtaactccatatgggtatcagctaacaaactgcgatcggttaccgatttaccattaacaaatgccggccattgaagcggccggtaactaaccaaattttctaagcaataaccaatttcccaaccgacaacacaagtgtggcagccacgacttctagtcacataagcaatctatcccaaattacactctaaaattatttccccgtatctccccactcggcacgtatatcctccttctctgcttccaaaggcaaacgaagtgtgctttcttacccttcagtttgagtttgtacatatatatcgtaatgtgcgtttgatatcagttgatggttattgtttctttcggtcgcgttcctgggcaatcagaggaaagccatggggcaataggttctaaaatatatttataaaaaaaggtcttggaacgccctcttccttctggctgcttgtgaggaactcatccgtgtattaccctttcaaatgcttcgttttccccaaccctctgtttatatatacatatgtacctagatgtttgtacagccttattgtttattattaattatttgacttttttcggttactttattatgcgttttacattttgtttttccatatcaatcaatacacaatcaatcaatcaatcaaccaaccaaccaaccaaccaaccaacacctccccgaccaaaaatcaataaaccgaaaaaccaaaccgcacacaacacgtacacccaccaaaaacaccacccaatgacccaagtcggtgcccacggtgtacaagtcgagtggcgcatactcatccagcaaatatcggcgctatccgcagatggccgacaaccaaaacgaggacgagcaggcgcagctgctgggcgaggagggtgtccgggccagccaaccgggccagaatttgaagcttgggtaaatattgatgtggacctgggagctgggagcacggacgacggaccacgacgggaacaggggaaaactaaactcaggccaagacccactcgccttcgctctcctgctcctctcactccttgctgtttgtgttctacgcgttcatgtcctatccatgtacctttgatgagtgttccatgttttccacgcgctaggctatcgaattgatttcaaacataagcacattgtctacttgtttgctctggtgtcggtttccaaaactatgcctaatccaatccaacctaatccaatcccatatcccacatgcccacaaatcccaacaaccaactttcggcggcggttctactaaccactttctaagagttaactccaagctaacctgtttgtaagtcgagtcgaaatgacctttgcccaccattcacaatttctagcaagaaggcggcgtaaaccaaacgaccgagtcgatgacccgcgccttgatcacggacgaggcgcgcaccgctggtgcctccatgggtcccgtacagctcgggtacgtatgcaccaggacagcttcgaaaatgggaaagacgcacgctcaggcgtgggccgcagttccgtcggcaggcagatactctttgggcgaataagagtgtacataaagggataaattgtaattttaaatggtgtacttttggttatcttaacccattgggtcttacttttgtatatgtaatctactctttgttcgatttgtttatacatatgtacatacccaaagatcctatctttagaagtatcacataaagtaatcagattagtgccgcccagggagcttttgccttgcccaattttttttagctcttaaccaacgaaatgccacacaaaattattgcttactgccgccaacgccaaactaatcaaactcagaacgccaatgcagctgcgccgtcacagagaaagattaaccgaaccatgtccatttataccgtccagcttggagtcccctggaatttcgagcaataattttctgtgcaagatcccaaaatgacacatcgaatgccactaaattaaacgtcgttctcttcttatgctcctctcttccccacacaaaaatgtccaaccgaaaaataatgttgaaaatatagttacatggagaaatcaaacgaacgtgaggattatcttccatggttggtaccctgtcccttcaaaaaaaaaaaagaagaaaaaaacatgactaggtcaaacaatcagtcaaactcgtatccattagccaacgtacagcgctcatcaatcgtatttgtatccgtattcgtattcgatcggtcaatcagctgtatatagaaacatgtcattagcttcgctcgcctcgcctcgcctcgccttgcctcccagcaccgccccgcatcccgtccagaactcagagtgccacctagagtgctaatgtgtcacccattcaaccgatcccacccagtgcctcattcatcccgatcctcgctctcgtaacgcctcgcgcgtccattggtaacttgtgcttgagagtttagttttccttgtttgtcgtaaataaccggaatgacattgttggatagcccgtagcggagatctctcactaatagctgcttcgtaatcccctctagcttcgtggctggcgtcatcctgagggagcgactgccggccttcgagcggatgttgtggcgcgcctgcaggggtaacgtcttcctgcgacaggcgatgattgagacgccgctggaggatcccaccaatgtaagtatgaaatgggttggtggtcatctaattcattcatctaaatgaatcagtaagctaataacttatttgcttcgcattttcagggcgaccaggtgcacaagtccgtgtttataatcttcttccagggtgaccagctgaagacgcgcgtcaagaagatctgcgagggcttccgggccacgctctatccttgccctgaagctccagccgatcggcgagagatggccatgggtgtgatgactcgcatcgaagatctgaacaccgtgctcggccagacgcaggaccatcgccatcgtgtgctggtcgctgcggccaagaatcttaagaactggttcgtcaaggtgcgcaagataaaggccatctaccatacgctgaatctcttcaatctggacgtgacccagaagtgtctgatcgccgagtgctgggtaccgctgctggacattgaaaccatccagctggccttgcgccgcggaaccgaaagatcgggatcgtcggtgccgccaattctcaaccggatgcagacgttcgagaatccaccgacctacaatcgaacgaataagtttaccaaggcctttcaggcattgatcgatgcctatggcgtggccagctatcgggagatgaatccggcaccctacacgatcatcaccttccccttcctgttcgccgtgatgtttggagatttgggccacggagctatcatggcgctctttggtctctggatgattcgaaaggagaagggactggcggctcagaagacggacaacgagatctggaacatattctttggcggacggtacatcatcttcctcatgggcgtcttctccatgtacacgggtcttatatacaacgatatattctccaagtcgctgaatatctttggatcgcattggcacttatcctacaacaagtccaccgtgatggagaacaagttcctgcagttgagcccgaaaggcgactacgagggcgctccgtatccgttcggcatggatcccatttggcaggtggcgggagccaataagatcatcttccacaacgcttacaagatgaagatctcgatcattttcggtgttattcacatgatcttcggtgtggtgatgagctggcacaatcatacgtatttcaggaacaggatctccctgctctacgagttcattccccagctggtcttcctgctgctgcttttcttctacatggttttgttgatgttcatcaagtggatcaagtttgccgccaccaatgatagtaagctttttgcctattgaccttctatttggctgaagctaaatgacaacgttatcccatttagagccctactccgaagcctgtgcgccttcaatcctgatcacctttatcgacatggtgctttttaacacgcccaagccacctccggagaactgtgaaacctatatgttcatgggccagcactttatccaggtgttattcgtcctggttgccgtcggctgcattcccgtaatgttgctggccaagccgctgctcatcatgcaggcccgcaagcaggcgaacgtaagtagacgctagttcgatgcaccccattaatttcatagaacggcgttccatctacatcacaacatatccaagcacctcgcactccaaactttccaccttatactaactgcttctcgtttatttgtgctcccgattaacaaaattataaccccaaccaaatccacaccgaataaactaaaacacttcaatccacaaaccgtaggaagaggttagtcgtgtcgtttattgtcgatgttaaatcgaacttctctaatcgcataattaaatttaaatagtataatatgctgtcaatactttttcgtttagagaagttcgactttagtgcccccaaatgttcgtctttaacgcagttaataatatacttcacttgcaggtacagcccattgcaggagcaacttcagatgcagaagccggcggcgtgtccaatagcggctcacacggtggtggcggtggccatgaggaggaagaggagctctctgagatcttcattcaccagagcatccacaccatcgagtacgtcctaggttcggtatcccacaccgcttcctatctgcgattgtgggcgctttccttggcccatgcccgtaagtaatcaatgcagtagtaaaaacctacataattacttaaaccaagcattcttacttggcagagttggctgaggtgctgtggaccatggtcctatcgattggcttgaagcaggaagggccggtgggtggcattgtattgacctgcgtgtttgccttctgggccattctcaccgttggcattctggtactcatggagggcttgtctgccttcctgcacaccctgcgtctccattggtaagtcacctaatcctcgagaagtatgaaatggtatctaattgaacggctttctcatagggtcgagttccagagcaagttctacaagggccagggttacgccttccaacccttctcgtttgatgccatcatagaaaacggagctgccgccgccgaggagtaaataaagcggaatatcggtcagagcaacaaccaaagcacgttgagagtctcattgcgttatatgaaattaactatccaaataagtggaatctaccagttacagtaacaaacatatatgtacgttttaatgtttaattgtcgtgaatttatctatgtatgtatatcgtatagccccagcaaacgttagattgctaacaatatttaatgttcttcgtagacgttctcctgtttattaactatacttgtaaactcaaataaatagaaaaggctaaccccttggggttggcaccaaaagaagcttgcatttgggaatgcttattgggagtcaatgggacatcagctgattgatggcggaaacgaatttgctaagattttccggtttcgtttcatagggctttaaggcttcaaagtccagagtagctagctgggcatccacgtcggtaactttgcagtaatacagatagttttcagcggccagttgcttggccaactccagttgatgattgtccatgagcgtgtcatttatcacaatgagtccaggtttctggttatttagtatatccatgcaagttccggctcccgcatgtccaataattaggtctgcggacttgatgtcctccgtatttggccggaaattgtactgctctatctggattccgtagttttttcttatcaattgtatttcatcgtctgttaatggttgcgaatttccgtgctgtatgacgagtttggtgcatttccggttctgtagagctttgagtgcgggttccgtggatgcagttgatattagagcatcgaatttggtggtaccaacggtaatgtaaacagtgttcaaatgcattttctgtaaatagttaaacaacaagacacagctgttacgagttgtgcttcctcttcgcctttgccattcagccggcgtaactcatacgacgttcaaataaatggcagcctggaagctcgaaacaccggccataaccgttactttatctactaggagtgcagtaaataagtaaaaagagtagtgaaatagttttaagcaatacttgtttaagcaaaatgcttaaattcaattttaaacgtaagtattccgctttcacagcgctcagtttattttgctctcacgcagccaaagtgcgaatttggcgcacgcgatcgccatctcgctcattgtgcttccattccatttccatcgcagcttgtttattccgcttattcagttctcaaccgttagccgttacggttgtgcccgcgctcgtcgggaaaatacgcgaaagaactgtgctccgttta

SEQ ID NO: 2051 - DNA, 2937 bp, DROSOPHILA
gtcacactagattcatagttcggaaatttgtcggttgctggagtttgtggacgaatttatatttaatttttaagcacttgatgggttccctattccgcagcgaggaaatggcgctgtgccagctgttcctgcagagcgaggcggcctacgcctgcgtctccgagttgggagaactgggattggtccagttccgagatctcaatcccgatgtcaacgctttccagaggaagttcgtcaacgaggtgcgccgctgcgatgagatggagcgcaagctgcgttacctggagaaggagatcaagaaggacggcatccccatgttggacaccggggagagtcccgaggccccgcagccccgcgagatgatcgacctggaggccacctttgagaagctggagaacgagctgagggaggtgaatcagaacgccgaggccctgaagcgcaactttctggagctgaccgagctgaagcatattttgcgcaaaacccaagtgttcttcgatgagtcggtgcccacggtgtacaagtcgagtggcgcatactcatccagcaaatatcggcgctatccgcagatggccgacaaccaaaacgaggacgagcaggcgcagctgctgggcgaggagggtgtccgggccagccaaccgggccagaatttgaagcttggcttcgtggctggcgtcatcctgagggagcgactgccggccttcgagcggatgttgtggcgcgcctgcaggggtaacgtcttcctgcgacaggcgatgattgagacgccgctggaggatcccaccaatggcgaccaggtgcacaagtccgtgtttataatcttcttccagggtgaccagctgaagacgcgcgtcaagaagatctgcgagggcttccgggccacgctctatccttgccctgaagctccagccgatcggcgagagatggccatgggtgtgatgactcgcatcgaagatctgaacaccgtgctcggccagacgcaggaccatcgccatcgtgtgctggtcgctgcggccaagaatcttaagaactggttcgtcaaggtgcgcaagataaaggccatctaccatacgctgaatctcttcaatctggacgtgacccagaagtgtctgatcgccgagtgctgggtaccgctgctggacattgaaaccatccagctggccttgcgccgcggaaccgaaagatcgggatcgtcggtgccgccaattctcaaccggatgcagacgttcgagaatccaccgacctacaatcgaacgaataagtttaccaaggcctttcaggcattgatcgatgcctatggcgtggccagctatcgggagatgaatccggcaccctacacgatcatcaccttccccttcctgttcgccgtgatgtttggagatttgggccacggagctatcatggcgctctttggtctctggatgattcgaaaggagaagggactggcggctcagaagacggacaacgagatctggaacatattctttggcggacggtacatcatcttcctcatgggcgtcttctccatgtacacgggtcttatatacaacgatatattctccaagtcgctgaatatctttggatcgcattggcacttatcctacaacaagtccaccgtgatggagaacaagttcctgcagttgagcccgaaaggcgactacgagggcgctccgtatccgttcggcatggatcccatttggcaggtggcgggagccaataagatcatcttccacaacgcttacaagatgaagatctcgatcattttcggtgttattcacatgatcttcggtgtggtgatgagctggcacaatcatacgtatttcaggaacaggatctccctgctctacgagttcattccccagctggtcttcctgctgctgcttttcttctacatggttttgttgatgttcatcaagtggatcaagtttgccgccaccaatgataagccctactccgaagcctgtgcgccttcaatcctgatcacctttatcgacatggtgctttttaacacgcccaagccacctccggagaactgtgaaacctatatgttcatgggccagcactttatccaggtgttattcgtcctggttgccgtcggctgcattcccgtaatgttgctggccaagccgctgctcatcatgcaggcccgcaagcaggcgaacgtacagcccattgcaggagcaacttcagatgcagaagccggcggcgtgtccaatagcggctcacacggtggtggcggtggccatgaggaggaagaggagctctctgagatcttcattcaccagagcatccacaccatcgagtacgtcctaggttcggtatcccacaccgcttcctatctgcgattgtgggcgctttccttggcccatgcccagttggctgaggtgctgtggaccatggtcctatcgattggcttgaagcaggaagggccggtgggtggcattgtattgacctgcgtgtttgccttctgggccattctcaccgttggcattctggtactcatggagggcttgtctgccttcctgcacaccctgcgtctccattgggtcgagttccagagcaagttctacaagggccagggttacgccttccaacccttctcgtttgatgccatcatagaaaacggagctgccgccgccgaggagtaaataaagcggaatatcggtcagagcaacaaccaaagcacgttgagagtctcattgcgttatatgaaattaactatccaaataagtggaatctaccagttacagtaacaaacatatatgtacgttttaatgtttaattgtcgtgaatttatctatgtatgtatatcgtatagccccagcaaacgttagattgctaacaatatttaatgttcttcgtagacgttctcctgtttattaactatacttgtaaactcaaataaatagaaaaggctaaccccttggggttggcacc

SEQ ID NO: 2052 - protein, 855 aa, DROSOPHILA
MGSLFRSEEMALCQLFLQSEAAYACVSELGELGLVQFRDLNPDVNAFQRKFVNEVRRCDEMERKLRYLEKEIKKDGIPMLDTGESPEAPQPREMIDLEATFEKLENELREVNQNAEALKRNFLELTELKHILRKTQVFFDESVPTVYKSSGAYSSSKYRRYPQMADNQNEDEQAQLLGEEGVRASQPGQNLKLGFVAGVILRERLPAFERMLWRACRGNVFLRQAMIETPLEDPTNGDQVHKSVFIIFFQGDQLKTRVKKICEGFRATLYPCPEAPADRREMAMGVMTRIEDLNTVLGQTQDHRHRVLVAAAKNLKNWFVKVRKIKAIYHTLNLFNLDVTQKCLIAECWVPLLDIETIQLALRRGTERSGSSVPPILNRMQTFENPPTYNRTNKFTKAFQALIDAYGVASYREMNPAPYTIITFPFLFAVMFGDLGHGAIMALFGLWMIRKEKGLAAQKTDNEIWNIFFGGRYIIFLMGVFSMYTGLIYNDIFSKSLNIFGSHWHLSYNKSTVMENKFLQLSPKGDYEGAPYPFGMDPIWQVAGANKIIFHNAYKMKISIIFGVIHMIFGVVMSWHNHTYFRNRISLLYEFIPQLVFLLLLFFYMVLLMFIKWIKFAATNDKPYSEACAPSILITFIDMVLFNTPKPPPENCETYMFMGQHFIQVLFVLVAVGCIPVMLLAKPLLIMQARKQANVQPIAGATSDAEAGGVSNSGSHGGGGGHEEEEELSEIFIHQSIHTIEYVLGSVSHTASYLRLWALSLAHAQLAEVLWTMVLSIGLKQEGPVGGIVLTCVFAFWAILTVGILVLMEGLSAFLHTLRLHWVEFQSKFYKGQGYAFQPFSFDAIIENGAAAAEE

SEQ ID NO: 2053 - DNA, 6949 bp, DROSOPHILA
ctcgcgcaacaacataccatcggtcatgtacttgagcagcgtcttggccgtggagcagtcctcgaaacggatggagtagccgacctcttcgcccagttttacgtccatctcctccgaaacgcgctgggccacggacatggcggcaactcgacgtggctgtgtgcaggagactcccttgcgccccttggatactgcgaagtccacgcaccactgcgggatctgggtcgtcttgccggagccagtctcgcccaccagcacaatacactggtgcaggctgagcagccgcataaagtccgcctggtactcgaacacgggcagcgcaatgcgcttcttgtagagattctggtaccgttgtgagtacggcgtgttggtcagcgggttcatcgtgggcggttgcttgttgggcacgaatccgcccaggatttgagccactgtgccggcagcggctgccgccgacgaggaggacgcctccgggtccctggtgagaaaggagcgttacattactgccgtatgttggcctcgggtcacttacttcttcgccttgctgccgtaggtctcccccacttcgattcgacgcttggacatgctaatttatggtgattactgcacttaattctcaaaacgaagcgtttagcacaaaaaaaaacacgcgctcagtgagacctttagcatataccgaccatgctgatcgcaacttttaaaataccaaagtttactgtctgtgtatactatataagcccatggttagcgaagatcacaaccaacagcacggcagcaatttggcatttaaaaaaaaacagcagttcaagcttaagtcttttgacgagaatctatctatagaattcggttttactcaccagtttgaagaatagttgtgagctcacagtcttaaaattgacatttgacagcaatttgattggaaactgattttgatttttacagtaacaaactgttacatggattcggtattttcggcttgggttggcgctttagcgtcggccacactatcacattgtatcgattcggagggagttgaatttttgcacgtatttgaaagcgcaaagatgcgaaacaaagagcaggatatcgaatgaaagagctcctgcgagaccaggactagttgcctaaccaccatggaaatacccattcaggtagcggtgcgcatcttcccgcatagagagctcaaggacttgttgaggagcttcggccccacagagcccaaaaaggatgcgcaggcggtggatgagggggcggactccaaggactccgaggctcaagttccggcggctgagaaggacaatccgtcaatttcagagacggacccaaacgggaatgctgagcaggacagtgcggccgattcgaagacaattccagatgccaatggcaacgacagtggtcagaaggattacccagactccgcatattgcgttcaggctattcccatcagcgcttcggccctgggattgcccagtgccctgccaggcggagatcccatggacagcattgcagctggactgatacaagtcggtccccacacggttccggtcacccacgccctgcccagcagcagctcccaggagcaagtgtaccaccagacggtctttccgctcatcaccctgttcctggaaggtttcgacgcatctgtagtcacctatggccagaggggccagggcaaaagctacacactctacggaaacgtccaggaccctactctgacggattccaccgaaggagtcgtccaactttgtgtccgtgacattttctcacacatatcgttgcacccaggtgagtttactaaaaggatcttataagcatagttatccatttccattttcactttaagaacgcacctatgccatcaacgtgggattcgtggaaatttgcggaggtgatgtctgcgacttgttgggcatgggaaacatacactgcaccaacgtagatgccgtcttccactggttgcaggtgggtctgtcggcccgccaatcgttgccggcgcacaccctgttcacgcttaccctggagcagcagtgggtgtccaaggaggggctgttgcagcaccgcttgtccacggccagtttctcggatctctgcggcacagagagatgtggagaccagccaccgggacgtcctctcgatgctggcctgtgtatgctggagcaggtgatcagtactctcacagatccaggcctcatgtacggggttaatggcaacattccgtacggtcagaccacgctcaccactctcctgaaggactcgttcggcggacgggctcagacgctcgtgatcctgtgcgtgtcaccgctggaagagcacttgcccgaaactcttggcaacctgcagttcgcctttaaggtgcagtgcgtacgtaattttgtaattatgaacacctactccgacgacaacacgatgatcgttcagccggctgagcctgttcccgaatccaattcctctgctggacccttgtcgcaggcgggaccaggggacaactttggcctacaattcgcagcaagccaatggtccaaactagttaccaacgccgaggggctattttccaagtaagtgtacacattatttccgatgtgggccttttgacgacaaaagaaatttataggctgatagactccaagctaattactgaagtggagaaggagcagatcgaggagtggctcttcctcaagcaggagtgcgaggagtgtctcagctcaacagaggctatgcgtcagcaaaaacagttggttcccattctggaggccgaggagcccgaggacgtgaattctgaagcagccaattcggagtcgccaaactccgacaacgaaaacgacacagacaatgagtcgcatcggcccgatctggacgacaagatagaaagtctaatggaagagtttcgcgacaaaacagacgctcttatacttgaaaaacacgctgaatatctatccaagcatccgaaggcggttatgcaaagccaagaccgcgagattgaggcacagccgccagaagaaaatggtgatgatcgaaaagtcagcattggcagtaagtctttgccttgaataacatttttttatacagtaacatgttgattccttgctttaataggtcgcaggagaagtgttcagccaggtgctagcttaagtactgctgagcttgccatgcttaatcgggtagcttcccagcagccgcctccgcccatcgatcctgagtcggtcgtcgatcctctggaaagttcttcgggcgaaggaatccgtcaggcggctctcgctgccgccgccgccactgctcctattgaacagctgcagaaaaaattgcgcaaactggtcgctgagatcgagggcaagcaacgacagttacgggaaatcgaagagacaatccaggtaaaacaaaatataatcgccgaattggtcaagaacagcgatacacgcagccatgcaaagcaaagatttcacaagaaacgtgccaaacttgaggccgagtgcgacaaggccaagaagcagttaggtaaggcgctagttcaaggccgggatcagtcggagattgagcgatggaccacgataatcggacatctcgagcgtcgactagaagacctcagctcaatgaagcatattgcgggtgagagcggacagaaggtgaagaagctacagcaatcggtgggcgagtcgcgaaaacaggccgatgatttacagaaaaagcttcgaaaggagtgcaagctgcgctgccagatggaggcggagctggccaaactacgagaatccagggagactggcaaagagctagtgaaggcgcaaggttctcccgagcaacaaggccgccagttaaaggcagtacaggctaggattacgcaccttaatcacattttacgcgagaagtcggataacctggaggagcagccgggaccagaacagcaggagaccttgcgtcatgagatccgcaacttgcgcggaactcgtgacttgttgttggaagaacgctgtcatttggaccgcaaacttaagcgggacaaggtgctgacgcaaaaggaggagcgcaagctgctcgagtgcgatgaggccatcgaggccatagatgcggccatagaattcaagaacgagatgatcacgggccaccgctccatcgacacgagcgaccgaattcagcgggagaagggagaacagatgctgatggcacgcctaaatcgtctctcaacggaggagatgcgaacacttctgtacaaatacttcacgaaggttatcgatttgcgcgactcttcacgaaagctggagctgcagctggtgcagttggagcgtgagcgggatgcctgggagtggaaggagcgtgttctgtccaatgccgtgcgccaggctagactggaaggcgaacggaatgcggtgctgctgcagcgccagcacgaaatgaaactcactttgatgctgcgtcacatggcggaggaaacgtcggccagttcggccagctacggagaacgagctttggcccctgcctgtgtcgccccgccggtgcaggccagtagtgatttcgactacgatcatttctacaaaggtggcggcaatccaagcaaggcactgatcaaagcgccaaagccgatgcccaccggctcggcgctagacaaatacaaggacaaagagcaacgcagcggacgcaacatctttgccaagttccatgtgctcaccagatatgcgtcagctgccgcagccggttcctcagggtccacggccgaggaatccacggccctgattgagtcaaccaccacggccacggcaaccactacgtcgacaaccaccactggagccgtaggaaaagtgaaggacaaggccctggtcagcttcaggccggagcagctgaagcgtctgatgccagctccgacggccacgaaagtgacgcgtcagaagaacaagataattatccaggacgcaagtcgtcgaaactaaatacgaatttaaccatttccaggacgatattataaggttaagccaaatagccatatacaattaatagccatgagctgaaatccagccactttaataattaaggcgataatataaaaaaatgcttaaaaatgtataacagattactcccatatacatgcatacattttaatcaatagtccgacatatataccagcttgaatttattagtttactgcttgtcgtttaacttattaaagtggctggagttcgatatctttttaagtgtgaagcaatagctcagatcctggtaacaagaactgaacaagtttcgtccacagtcatgacacaaatagactacaacacatggttctcattccggctctttagctggggagcatttattttagaaacccccacacgtacatacacctagcatatgaaagtaactatcctcatgagattcaaccgtaaagacttgacctgctacttaagatactcgcaagacaaaccgtacacaaaactcgctcaaagtgttgacctaagtctccgcattgtttaacttgtacataacaataattattaggtaaccacttaattttaattgattttgttagttttagcttagttgtaaacactattgtgtcttccctcgaattttaattgaccttcgataccaattacaacatacgtactccatacccaagtgttaacctttaatattctatcaaaagcatttactctgtacaacttataaatgcttcaaatcgcagtatttgcgctaatccaatactcattttgcattaacttaaaattaaaattcaatactgtttggttgtgtacaacgtattttttattgtccattgatatagatgcagtttgcactgtactccgagtaacttaaattgatattaatgtatgtatgttccctcaatatcagcgtgtgaaaaattataaacacatttgtaagcatacatattccgccaaatcgctcggcatggctttgtgtggatattgttggttaagcaaataaatatatacaaactaaactaatcaatcagtgtttaatcagtgttttatattcaaaataaaatagttatcgtcttataaagataattaagttctacatttgcagctgaaatccaagcaaacacagtccacaaggcaacaggtgagaaatgtcccagaaatttcccaaacaatcgccccttcggacacacacacacacagaaagcgcaaagagagaggatgagagggagagagagagagcgccggtttaagcgttgtatctaaatccgatggcgagtatctgagcatccgattcagtcttgtttggaccgtcgagcgatcgagaaccggatttcagcgctagtcggcgaatcgcgagagcgtgcgagtatttgtgtgtgcgtgtgagcgtttgttttgggacaccgatacggatacgggtacggatagacggatatacggcagcggtacgcgattagcaatccgccaaccggttgcagcggtgctagtgcaccaccctacaaaaaagtgaataatagtatgcaaagtatctgaaagatagtcaagagcagagcaaagtatctgtgtttgtgtgtgccgtgcttttgtgcggagtcgccacccccgtggattagtggcaccctgctgcaaatagcccaccactctcacaagtgtgtgtgtgtgagtgttaacaattaatcgcatttaaaaaacaatttggccagccgcagtaacaataacggtaagaaaagtcggcggtaccgttgggaaattttcaccgttgtctggcaacttctttgtgcccgtcgtgtatgtataggttgggtgcagaagtgtgcgtgagtcctgcccacgcccaccgagtagcgctagtctgcgaaatcaactgcaggatgctgtaggttgatattttatcggttagatgataatagtctttggtcttccttatgatttttcgccagacgttaagttttttcaatttgggaatgcaaaaacggttactttatgcaccgtatcacatcacacacacttgcaaaagggtgtgaaaa

SEQ ID NO: 2054 - DNA, 4772 bp, DROSOPHILA
cacactatcacattgtatcgattcggagggagttgaatttttgcacgtatttgaaagcgcaaagatgcgaaacaaagagcaggatatcgaatgaaagagctcctgcgagaccaggactagttgcctaaccaccatggaaatacccattcaggtagcggtgcgcatcttcccgcatagagagctcaaggacttgttgaggagcttcggccccacagagcccaaaaaggatgcgcaggcggtggatgagggggcggactccaaggactccgaggctcaagttccggcggctgagaaggacaatccgtcaatttcagagacggacccaaacgggaatgctgagcaggacagtgcggccgattcgaagacaattccagatgccaatggcaacgacagtggtcagaaggattacccagactccgcatattgcgttcaggctattcccatcagcgcttcggccctgggattgcccagtgccctgccaggcggagatcccatggacagcattgcagctggactgatacaagtcggtccccacacggttccggtcacccacgccctgcccagcagcagctcccaggagcaagtgtaccaccagacggtctttccgctcatcaccctgttcctggaaggtttcgacgcatctgtagtcacctatggccagaggggccagggcaaaagctacacactctacggaaacgtccaggaccctactctgacggattccaccgaaggagtcgtccaactttgtgtccgtgacattttctcacacatatcgttgcacccagaacgcacctatgccatcaacgtgggattcgtggaaatttgcggaggtgatgtctgcgacttgttgggcatgggaaacatacactgcaccaacgtagatgccgtcttccactggttgcaggtgggtctgtcggcccgccaatcgttgccggcgcacaccctgttcacgcttaccctggagcagcagtgggtgtccaaggaggggctgttgcagcaccgcttgtccacggccagtttctcggatctctgcggcacagagagatgtggagaccagccaccgggacgtcctctcgatgctggcctgtgtatgctggagcaggtgatcagtactctcacagatccaggcctcatgtacggggttaatggcaacattccgtacggtcagaccacgctcaccactctcctgaaggactcgttcggcggacgggctcagacgctcgtgatcctgtgcgtgtcaccgctggaagagcacttgcccgaaactcttggcaacctgcagttcgcctttaaggtgcagtgcgtacgtaattttgtaattatgaacacctactccgacgacaacacgatgatcgttcagccggctgagcctgttcccgaatccaattcctctgctggacccttgtcgcaggcgggaccaggggacaactttggcctacaattcgcagcaagccaatggtccaaactagttaccaacgccgaggggctattttccaagctgatagactccaagctaattactgaagtggagaaggagcagatcgaggagtggctcttcctcaagcaggagtgcgaggagtgtctcagctcaacagaggctatgcgtcagcaaaaacagttggttcccattctggaggccgaggagcccgaggacgtgaattctgaagcagccaattcggagtcgccaaactccgacaacgaaaacgacacagacaatgagtcgcatcggcccgatctggacgacaagatagaaagtctaatggaagagtttcgcgacaaaacagacgctcttatacttgaaaaacacgctgaatatctatccaagcatccgaaggcggttatgcaaagccaagaccgcgagattgaggcacagccgccagaagaaaatggtgatgatcgaaaagtcagcattggcagtcgcaggagaagtgttcagccaggtgctagcttaagtactgctgagcttgccatgcttaatcgggtagcttcccagcagccgcctccgcccatcgatcctgagtcggtcgtcgatcctctggaaagttcttcgggcgaaggaatccgtcaggcggctctcgctgccgccgccgccactgctcctattgaacagctgcagaaaaaattgcgcaaactggtcgctgagatcgagggcaagcaacgacagttacgggaaatcgaagagacaatccaggtaaaacaaaatataatcgccgaattggtcaagaacagcgatacacgcagccatgcaaagcaaagatttcacaagaaacgtgccaaacttgaggccgagtgcgacaaggccaagaagcagttaggtaaggcgctagttcaaggccgggatcagtcggagattgagcgatggaccacgataatcggacatctcgagcgtcgactagaagacctcagctcaatgaagcatattgcgggtgagagcggacagaaggtgaagaagctacagcaatcggtgggcgagtcgcgaaaacaggccgatgatttacagaaaaagcttcgaaaggagtgcaagctgcgctgccagatggaggcggagctggccaaactacgagaatccagggagactggcaaagagctagtgaaggcgcaaggttctcccgagcaacaaggccgccagttaaaggcagtacaggctaggattacgcaccttaatcacattttacgcgagaagtcggataacctggaggagcagccgggaccagaacagcaggagaccttgcgtcatgagatccgcaacttgcgcggaactcgtgacttgttgttggaagaacgctgtcatttggaccgcaaacttaagcgggacaaggtgctgacgcaaaaggaggagcgcaagctgctcgagtgcgatgaggccatcgaggccatagatgcggccatagaattcaagaacgagatgatcacgggccaccgctccatcgacacgagcgaccgaattcagcgggagaagggagaacagatgctgatggcacgcctaaatcgtctctcaacggaggagatgcgaacacttctgtacaaatacttcacgaaggttatcgatttgcgcgactcttcacgaaagctggagctgcagctggtgcagttggagcgtgagcgggatgcctgggagtggaaggagcgtgttctgtccaatgccgtgcgccaggctagactggaaggcgaacggaatgcggtgctgctgcagcgccagcacgaaatgaaactcactttgatgctgcgtcacatggcggaggaaacgtcggccagttcggccagctacggagaacgagctttggcccctgcctgtgtcgccccgccggtgcaggccagtagtgatttcgactacgatcatttctacaaaggtggcggcaatccaagcaaggcactgatcaaagcgccaaagccgatgcccaccggctcggcgctagacaaatacaaggacaaagagcaacgcagcggacgcaacatctttgccaagttccatgtgctcaccagatatgcgtcagctgccgcagccggttcctcagggtccacggccgaggaatccacggccctgattgagtcaaccaccacggccacggcaaccactacgtcgacaaccaccactggagccgtaggaaaagtgaaggacaaggccctggtcagcttcaggccggagcagctgaagcgtctgatgccagctccgacggccacgaaagtgacgcgtcagaagaacaagataattatccaggacgcaagtcgtcgaaactaaatacgaatttaaccatttccaggacgatattataaggttaagccaaatagccatatacaattaatagccatgagctgaaatccagccactttaataattaaggcgataatataaaaaaatgcttaaaaatgtataacagattactcccatatacatgcatacattttaatcaatagtccgacatatataccagcttgaatttattagtttactgcttgtcgtttaacttattaaagtggctggagttcgatatctttttaagtgtgaagcaatagctcagatcctggtaacaagaactgaacaagtttcgtccacagtcatgacacaaatagactacaacacatggttctcattccggctctttagctggggagcatttattttagaaacccccacacgtacatacacctagcatatgaaagtaactatcctcatgagattcaaccgtaaagacttgacctgctacttaagatactcgcaagacaaaccgtacacaaaactcgctcaaagtgttgacctaagtctccgcattgtttaacttgtacataacaataattattaggtaaccacttaattttaattgattttgttagttttagcttagttgtaaacactattgtgtcttccctcgaattttaattgaccttcgataccaattacaacatacgtactccatacccaagtgttaacctttaatattctatcaaaagcatttactctgtacaacttataaatgcttcaaatcgcagtatttgcgctaatccaatactcattttgcattaacttaaaattaaaattcaatactgtttggttgtgtacaacgtattttttattgtccattgatatagatgcagtttgcactgtactccgagtaacttaaattgatattaatgtatgtatgttccctcaatatcagcgtgtgaaaaattataaacacatttgtaagcatacatattccgccaaatcgctcggcatggctttgtgtggatattgttggttaagcaaataaatatatacaaactaaactaatcaa

SEQ ID NO: 2055 - protein, 1201 aa, DROSOPHILA
MEIPIQVAVRIFPHRELKDLLRSFGPTEPKKDAQAVDEGADSKDSEAQVPAAEKDNPSISETDPNGNAEQDSAADSKTIPDANGNDSGQKDYPDSAYCVQAIPISASALGLPSALPGGDPMDSIAAGLIQVGPHTVPVTHALPSSSSQEQVYHQTVFPLITLFLEGFDASVVTYGQRGQGKSYTLYGNVQDPTLTDSTEGVVQLCVRDIFSHISLHPERTYAINVGFVEICGGDVCDLLGMGNIHCTNVDAVFHWLQVGLSARQSLPAHTLFTLTLEQQWVSKEGLLQHRLSTASFSDLCGTERCGDQPPGRPLDAGLCMLEQVISTLTDPGLMYGVNGNIPYGQTTLTTLLKDSFGGRAQTLVILCVSPLEEHLPETLGNLQFAFKVQCVRNFVIMNTYSDDNTMIVQPAEPVPESNSSAGPLSQAGPGDNFGLQFAASQWSKLVTNAEGLFSKLIDSKLITEVEKEQIEEWLFLKQECEECLSSTEAMRQQKQLVPILEAEEPEDVNSEAANSESPNSDNENDTDNESHRPDLDDKIESLMEEFRDKTDALILEKHAEYLSKHPKAVMQSQDREIEAQPPEENGDDRKVSIGSRRRSVQPGASLSTAELAMLNRVASQQPPPPIDPESVVDPLESSSGEGIRQAALAAAAATAPIEQLQKKLRKLVAEIEGKQRQLREIEETIQVKQNIIAELVKNSDTRSHAKQRFHKKRAKLEAECDKAKKQLGKALVQGRDQSEIERWTTIIGHLERRLEDLSSMKHIAGESGQKVKKLQQSVGESRKQADDLQKKLRKECKLRCQMEAELAKLRESRETGKELVKAQGSPEQQGRQLKAVQARITHLNHILREKSDNLEEQPGPEQQETLRHEIRNLRGTRDLLLEERCHLDRKLKRDKVLTQKEERKLLECDEAIEAIDAAIEFKNEMITGHRSIDTSDRIQREKGEQMLMARLNRLSTEEMRTLLYKYFTKVIDLRDSSRKLELQLVQLERERDAWEWKERVLSNAVRQARLEGERNAVLLQRQHEMKLTLMLRHMAEETSASSASYGERALAPACVAPPVQASSDFDYDHFYKGGGNPSKALIKAPKPMPTGSALDKYKDKEQRSGRNIFAKFHVLTRYASAAAAGSSGSTAEESTALIESTTTATATTTSTTTTGAVGKVKDKALVSFRPEQLKRLMPAPTATKVTRQKNKIIIQDASRRN

SEQ ID NO: 2056 - DNA, 8665 bp, DROSOPHILA
gtgaaaaacacctgtgcttttccaataaacttttcgtaatagttgaattttaactacttttgagatggataagtcaaagaaaaccgcgaaataacaatggtgttatacgggtatatgatttatttatgtcagtaaatgtgatgcacaatcttagcacttgacattgaacaatctattgttatgcacttactaaaatgaacgtggttagttcgtgtggcatttagttagttccgtaaacatgtaaatattataaacgattatttgtttagataataattatttggttgaagtcattcataaaagaaaaaattcccataatagacttcaaataaaattgaaggggtttttaaaacttattcatgtatatgttatgctagttttaagaatgaaaaatcagaacaaatagttatgtactatatatagaatacggggcattctgcatacaaatctatccgaatatttagacgttcaagttcgagtatcccgactatcagatatccatccgttactcagctagtgtgaatgctatttcgaaaatttcataatttttctggaatatcgatagatattggggaataaaatgagaaaaaatttaaaaactgttcaaaagtgtggtcgtgacctgttcggcgataggcgttagattgggcgtggcaaaaagtttttttctttggcaaagcgatagacatttacacgactaataaaattatgaaaaaatatcaaaacatttttcaaaagtgtgggcgtggcaattttgggtagttttagaacgttagagtgggtagagtggtaaaaactttttgttgcaaatcgatagaaatttacaagaaatgtgacatatttttcatccaatctagtatacccttttacactagaagtaacgggtaaaaaacatcaaggttaaaaaaaaaacttctttttttacagatccatattttaaccaattttaatgtcggggtaatctataaaaacccaaaagccaatcgaacaaatctgcaaaatggcaaaggtcacaaactgggataagtttgtgctgcttttgtggaagaactggaccctccaatggaaccacaagtggcagatggttatagagctggtgctgccagcgatattctccctgctcctcgttctagtccgcaccttggtggatacggagcaaaaaggagtccggtattataatgagcagaacttaacagacctcaatctgctgcagtgagtttttaccatgatatctcggtaactgttcttgtcctggcattttattattttttatttcattgtaaaaattcaattatctaaagctccctaagcgcattttatgtaattgatttaatgttattatgcttttatttgctttaaataggtgctgtatttgctacattcttaacttacttaattttttcagttctactttacgatgatttatgttatatattccatttaaatttactatagctttacaagttgtgattggccatgacatgttcaccatgtctttatatttttagatttatatcttcttcttaatattttagtattatttgggttgatagtctgcagttcagattctgctttattataacgcctataatgcagatcttaatagtaatagttttctttcctatctttattggcttatatgcgaatttttaattttgcttactaatgttcagggcaatcacccctctagattttcctatatcaaatatatgtaaatgttttttgtcttgttctggccacacaaaacctgaagacattcgttgcatagatcgtcctaccttggcaagctcatagcgctgattgcacccaatcgacggaggtaaacagatccaaaataaaacagaacacaaaaaaataatatttaacctacttaaccggtcaccctaacaaatgcaaataacaaaatgcaacattttggaatgtttcacttgcacgtttaaaacccaaaaaaatcctaatacacatcctaaaacacaggtacaagtttaataagaaagtgataaatgaaattttttgtagtgatataaaaatttaaaagttgtagcgcttaaataaaaaattaagatagtaatctgccatatactcgtattatattttctaaactggcagcaactttaaaaagagcgttaagatttcgatcattgtgtgatttgttacactttagtacctttctaaaatgatcttttcatgcacttagacagatatgacagatatgcatatatattattttatttatattgctaccaagtgacacgacagtgtcgaaacgattagggattaataaaataataataacaataattgaaattcttgaattataataaaacctgcactcccatcttaacaataattcattcaaattactaaccatatgtgttatatgcgtactcagaactcatattaatgccgattgatttgcaatgtttaggaagaatggcggcttttcaaaatttgagttcatcctgtgctactcgcccgtcaatcccgtgttgaagaaactggtagaagaggcgtggcagagccttggtaagaacaaaatctgtgagtcggaaaatgccacccaactggagttggatacggtcagtaagaacgcctttgctggcgttcagttcgacgatgcctgggcgaatcttacggagaatgaccctctacccaatgactttcatttcgcactgagattcccagcggagctgcgaacggcgacgattgccatagcaaatacgtggctaacgatgcggctgtttcccacaatcgatttgactggaccgcgaaacgaaggagacgatgatggtggcattccgccgggctatttgcgagagggatttctgccgctgcaacacagcctgtcaatggcttatttaagacaaaaatcgggggaacaggacctgccgaatgtggtgatgaaacgttatccgtttcccgcctacatatttgatcctctcctggagggcatgtcctcgataatgtcgctgatcatactgttgagcttcatttatccctgcacgtacatcactaaggtaagtgactatgccgggattgtggttattgaacttagcgtctccactcacggcatttcattcacttgcagtacatcaccgccgagaaggagaaacagctgaaggaggtgatgaagatcatggggctgagcaactggctccattggaccgcttggtttgtcaagtccttcatcatgttgaccatatcggccattctgattgccattctggtcaaaatcaattggtctgaggatgtagccgtactgacgcatgctaattttacggctttggtcttctttctgataatatacatcgtatcgagcatctgcttctgcttcatgatggccacattcttctcaagagcgagcactgcggccgccgttacgggcttaatttggttcatcgcctacattccgtattcatttaccataaatagctacgacgatctgagtctttcatccaagctcggctggagcttgatctcaaacacggccatgggctttggcatcaaactgatcctgggcttcgagggaacaggagagggtctgcaatggagcaacttcttcacgccggtttccgtagatgacacgttgactttgggagccgtgatgataatgatgctggtatcgtgcgttatttacatgattatctgcttgtacgtagagcaagtgatgccgggtagttttggtgtgccccgcccctggaacttcccgttcacccgcgaattttggtgcggcgaacgggagtacacgggcgtggaggacattcccaatgggcatgtggagcagcgggatccgaaggcctttgaaacggaaccagagggcaagcatatcggcctgcagatgcgacaccttaaaaagcgttttggtaataaaatggtcgtaaaaggactttcgatgaatatgtttgaggatgagataacggttcttcttggtcacaatggagccggcaaaactacgaccatatcgatgctgacgggcatgttcccaccaacgagcgggacagccattataaacggcagtgacatccgcaccaatatcgaaggtgcccgcatgtccctgggcatctgtccacagcacaatgtccttttcgatgagatgagtgtatccaatcacattcgatttttcagtcgaatgaagggactgcgcggtaaggccgtggagcaggaggtggcaaagtatctgaagatgatcgagctggaggacaaggcgaatgtggcctcgtctaaactttctggcggcatgaaacgcaaactgtccgtttgctgcgccctctgcggagacacaaaggttgtgctgtgcgacgaaccgagctcaggcatggatccgtcggccaggcgtcagttatgggatttgctgcagcaggagaaggtgggacgcacccttctgctgactactcactttatggacgaggctgatgtgctgggcgatcgtattgctatcatgtgcgacggtgagcttaagtgccaaggaacctcatttttcctgaagaagcaatatggatcgggctaccgattggtaagtggagttcagaatttattttatggtagatgtacctataaaacttgtgattccctcaagatctgtgtgaaacgagatgactgcgagacgaacgaggtgacagctcttctgaacaagtacattccgggcttgaagccggagtgcgatattggcgcggaactgtcctatcaactgccggatagcgcctctgctaagtttgaggagatgtttggacaactggaggaacaatcagacgaactgcatctaaatggctacggcgtgggcatcacatcgatggaggaggtgttcatgaaggttggcgcagaaaaagacaataccggcaacataaaggaccaacacgagattatgaacggaggcagtggattccgtggcgaggatgacaacgaatctgtacagtgtaagcagtgtttgaactcgatcttggttcttggactcttgataagctcaattaactgtttgcagcggacgggatcttctcggagaatcgacgactgcttcagggattgcagctgctgtcgaaccaatggaaggccatgcttctcaaaaagtttctctacacgtggcgcaacaagctccttctgcttatccaaaacattatgcccgtctttttcgtggttgtcaccattttgattataaagacacagggaactttccaggaactaaagcccattaccatttcgttgactcaatatccactggctgtaactgttttggatcggtctaatgtgcaaaacggtactggctatgaaatagctaataaatacgaggatttggctcgttcctatggtagtaattatggtctggaactaacaggcacccagggctttgaggtaggttatctttaattcttgtcttcttggctcttccttacgcataataatatcttaattttaggactatatcctggatttgggtaaaacgatacaggtgcgcatcaactcgcgctatttggtagccgccactattaccgagtccaaaataactgcctggctgaacaaccaggcgttgcacactgctcccttgactgtgaacatggtccacaatgccattgccgataagctttttggttcatcggtgaagatccaggtgacaaatgcaccattgccgtacacgaccagtacgctgctctctcagctgagcacgggcaataatctgggcacccaactggcctccaatctgtgcttctgcatgtgcttcgtgagctcaatatatattctatttttgatcaaggagcgagagtccagagccaagttgctgcagtttgtgggcggcgtgaaagtttggaccttctggttgtcgcagttcatctgcgattttgcatcgtacattgtgacggctctgatcgtggtgatcacgattgtctgtttccaggagaccggcctatccactttcggagaactgggcagatactatttattgttactgctctttggattcgccgtgttgccgttcatctacattatgtcgttgttctttagggaaccggccacaggctttgctagggtatccattgttaatatcttttgcggcatggccctttttattgtggtcgtggtgatgtcctcggagttattcgatacgaaggatactgcggacatattaggctggatattccgaatctttccacacttttcgcttgccatgagtttgaataaggtctacaccaatacagcgacaaggaatgcctgcgccaaggccggagcccttccacccattctcctctgcgagttggtgccacaatgctgcagtgagtattttacttatctatacccgtaattagccattcttaagaacgccttatgttccacattgaaacattaacattagataatcagttaggttgggtagagttgataagccaataaagcataagagatggctaaacaccttaaagacgttttaagtaaaacaaattattatcctaattattaaagtaattccccaatttcagatttaaagccgtacttcgcttgggaagagcctggcgttctgcctgagactgtgtacatggctgtcaccggagtcgtcttcttccttatcattattgtgcttgagtttagattgatcaacgaattgatgttcaaaatccgtcaattgatatcgtaagttatggccaccccgggacatgtgttccatctaatgacgtgtatcatgtttagtaaacctccaccgccaccaacggaaggtcaattggatgatgatgttgctaacgaacgggagcgaattctgcagatgtcctctaatgagctggccaccaagaatttggtgcttgaccgggtcaccaagtactacggccagtttatggccgttaatcaagtgtcgctttgcgtacaggagtaagttgaatatatgctacttattatgaacttttacccatttattttataatatttttgtaaatactgaaagctaaaaactatggtgtttaaaaatgcataaaatatatttttataatcttttctcgcttctcccttccacagagtcgaatgttttgggctgttgggcgtgaacggagccggcaaaacgaccacatttaagatgatgaccggcgatgagcgtattagctccggagccgcttacgtccaaggcctgagcctggagtcgaacatgaacagcatttacaaaatgatcgggtactgtccgcagttcgacgcacttttggatgatctgacgggtcgtgaggtgctccgaattttctgcatgttacgcggtgtccaggagtctcgcatccgacagttgtccgaggatctagcgaagtcatttggctttatgaagcacatcgataaacaaactcatgcctatagtggcgggaataagcgcaagttaagtacggccattgctgtgatcggaagtccgtccgttatttacctagatgaacccacaaccggcatggatccggcggccaggcgtcaattatggaacatggtgtgtcgaatccgtgattcgggtaaatccattgtgctcacatcgcacagcatggaggagtgtgaggcactctgtacgcgactggccattatggtgaacggagaattcaaatgcattggctccacgcagcatcttaaaaacaagttctccaagggccttatcctcaagatcaaggtgcgccgcaatctggaggcattgcgtcaagcgcgtttgagtggcggctatgcgcgaaatccggatgaacagaccgtgcccgcccaaatgtcccagcgggacatagatgccgtcaaggagtttgtcgagaccgaatatccaaattctattctgcagtgagtttatttgttactcgctgttgcttttatatttcaatctttttttttttctttaaaagggaggagtaccagggcattttaacattctacattccgttgactggagtgaaatggtctcgcatcttcggcttgatggagagcaatcgcgaccagctgaacgtggaggactactcagtcagccagacaacgctggaggagatctttctcgagttcgccaaataccagcgtgaggatacgcgcgccaatcagtgagctagcccccaaaaagatccaacacccagttgataacaccacatggcttctttttaacgggcttcttgcttcctggcttcatcttctgcctgtcgcatcgcatcgcattgccagcacctaaacaaaacgagcaccgcaacaccgccagaacatcctatttctcatacacgacagcactcggagtagttaacctgtcattttattaattttgtttagtgattttttgtttgtagatttagccaacatcctaacctaatgttaaaagctaactcagctgcatgcgtatattccttaaaaagctaacaatatcccactaactaatgcccgccctgaatgccgagctgatgctaaccgtgctatgtttgttctttctttttccttatgaaatttgtcactcctatatccagtcgcctctcggaattgaggaagctgtgcaagtgcctgctaactaatgagttttgaaccaactacctgagcgggtccgttacgatccgattttcacctgatcttacactcacagataataatgttgtataccaaagcaacgccgatgcctgaacagctaacaaatagtttctaagctcgacctgacaatagatagcagctattatgccttatttcattgtgatcatctagcgaa

SEQ ID NO: 2057 - DNA, 5766 bp, DROSOPHILA
atggcaaaggtcacaaactgggataagtttgtgctgcttttgtggaagaactggaccctccaatggaaccacaagtggcagatggttatagagctggtgctgccagcgatattctccctgctcctcgttctagtccgcaccttggtggatacggagcaaaaaggagtccggtattataatgagcagaacttaacagacctcaatctgctgcagaagaatggcggcttttcaaaatttgagttcatcctgtgctactcgcccgtcaatcccgtgttgaagaaactggtagaagaggcgtggcagagccttggtaagaacaaaatctgtgagtcggaaaatgccacccaactggagttggatacggtcagtaagaacgcctttgctggcgttcagttcgacgatgcctgggcgaatcttacggagaatgaccctctacccaatgactttcatttcgcactgagattcccagcggagctgcgaacggcgacgattgccatagcaaatacgtggctaacgatgcggctgtttcccacaatcgatttgactggaccgcgaaacgaaggagacgatgatggtggcattccgccgggctatttgcgagagggatttctgccgctgcaacacagcctgtcaatggcttatttaagacaaaaatcgggggaacaggacctgccgaatgtggtgatgaaacgttatccgtttcccgcctacatatttgatcctctcctggagggcatgtcctcgataatgtcgctgatcatactgttgagcttcatttatccctgcacgtacatcactaagtacatcaccgccgagaaggagaaacagctgaaggaggtgatgaagatcatggggctgagcaactggctccattggaccgcttggtttgtcaagtccttcatcatgttgaccatatcggccattctgattgccattctggtcaaaatcaattggtctgaggatgtagccgtactgacgcatgctaattttacggctttggtcttctttctgataatatacatcgtatcgagcatctgcttctgcttcatgatggccacattcttctcaagagcgagcactgcggccgccgttacgggcttaatttggttcatcgcctacattccgtattcatttaccataaatagctacgacgatctgagtctttcatccaagctcggctggagcttgatctcaaacacggccatgggctttggcatcaaactgatcctgggcttcgagggaacaggagagggtctgcaatggagcaacttcttcacgccggtttccgtagatgacacgttgactttgggagccgtgatgataatgatgctggtatcgtgcgttatttacatgattatctgcttgtacgtagagcaagtgatgccgggtagttttggtgtgccccgcccctggaacttcccgttcacccgcgaattttggtgcggcgaacgggagtacacgggcgtggaggacattcccaatgggcatgtggagcagcgggatccgaaggcctttgaaacggaaccagagggcaagcatatcggcctgcagatgcgacaccttaaaaagcgttttggtaataaaatggtcgtaaaaggactttcgatgaatatgtttgaggatgagataacggttcttcttggtcacaatggagccggcaaaactacgaccatatcgatgctgacgggcatgttcccaccaacgagcgggacagccattataaacggcagtgacatccgcaccaatatcgaaggtgcccgcatgtccctgggcatctgtccacagcacaatgtccttttcgatgagatgagtgtatccaatcacattcgatttttcagtcgaatgaagggactgcgcggtaaggccgtggagcaggaggtggcaaagtatctgaagatgatcgagctggaggacaaggcgaatgtggcctcgtctaaactttctggcggcatgaaacgcaaactgtccgtttgctgcgccctctgcggagacacaaaggttgtgctgtgcgacgaaccgagctcaggcatggatccgtcggccaggcgtcagttatgggatttgctgcagcaggagaaggtgggacgcacccttctgctgactactcactttatggacgaggctgatgtgctgggcgatcgtattgctatcatgtgcgacggtgagcttaagtgccaaggaacctcatttttcctgaagaagcaatatggatcgggctaccgattggtaagtggagttcagaatttattttatggtagatgtacctataaaacttgtgattccctcaagatctgtgtgaaacgagatgactgcgagacgaacgaggtgacagctcttctgaacaagtacattccgggcttgaagccggagtgcgatattggcgcggaactgtcctatcaactgccggatagcgcctctgctaagtttgaggagatgtttggacaactggaggaacaatcagacgaactgcatctaaatggctacggcgtgggcatcacatcgatggaggaggtgttcatgaaggttggcgcagaaaaagacaataccggcaacataaaggaccaacacgagattatgaacggaggcagtggattccgtggcgaggatgacaacgaatctgtacagtcggacgggatcttctcggagaatcgacgactgcttcagggattgcagctgctgtcgaaccaatggaaggccatgcttctcaaaaagtttctctacacgtggcgcaacaagctccttctgcttatccaaaacattatgcccgtctttttcgtggttgtcaccattttgattataaagacacagggaactttccaggaactaaagcccattaccatttcgttgactcaatatccactggctgtaactgttttggatcggtctaatgtgcaaaacggtactggctatgaaatagctaataaatacgaggatttggctcgttcctatggtagtaattatggtctggaactaacaggcacccagggctttgaggactatatcctggatttgggtaaaacgatacaggtgcgcatcaactcgcgctatttggtagccgccactattaccgagtccaaaataactgcctggctgaacaaccaggcgttgcacactgctcccttgactgtgaacatggtccacaatgccattgccgataagctttttggttcatcggtgaagatccaggtgacaaatgcaccattgccgtacacgaccagtacgctgctctctcagctgagcacgggcaataatctgggcacccaactggcctccaatctgtgcttctgcatgtgcttcgtgagctcaatatatattctatttttgatcaaggagcgagagtccagagccaagttgctgcagtttgtgggcggcgtgaaagtttggaccttctggttgtcgcagttcatctgcgattttgcatcgtacattgtgacggctctgatcgtggtgatcacgattgtctgtttccaggagaccggcctatccactttcggagaactgggcagatactatttattgttactgctctttggattcgccgtgttgccgttcatctacattatgtcgttgttctttagggaaccggccacaggctttgctagggtatccattgttaatatcttttgcggcatggccctttttattgtggtcgtggtgatgtcctcggagttattcgatacgaaggatactgcggacatattaggctggatattccgaatctttccacacttttcgcttgccatgagtttgaataaggtctacaccaatacagcgacaaggaatgcctgcgccaaggccggagcccttccacccattctcctctgcgagttggtgccacaatgctgcaatttaaagccgtacttcgcttgggaagagcctggcgttctgcctgagactgtgtacatggctgtcaccggagtcgtcttcttccttatcattattgtgcttgagtttagattgatcaacgaattgatgttcaaaatccgtcaattgatatctaaacctccaccgccaccaacggaaggtcaattggatgatgatgttgctaacgaacgggagcgaattctgcagatgtcctctaatgagctggccaccaagaatttggtgcttgaccgggtcaccaagtactacggccagtttatggccgttaatcaagtgtcgctttgcgtacaggaagtcgaatgttttgggctgttgggcgtgaacggagccggcaaaacgaccacatttaagatgatgaccggcgatgagcgtattagctccggagccgcttacgtccaaggcctgagcctggagtcgaacatgaacagcatttacaaaatgatcgggtactgtccgcagttcgacgcacttttggatgatctgacgggtcgtgaggtgctccgaattttctgcatgttacgcggtgtccaggagtctcgcatccgacagttgtccgaggatctagcgaagtcatttggctttatgaagcacatcgataaacaaactcatgcctatagtggcgggaataagcgcaagttaagtacggccattgctgtgatcggaagtccgtccgttatttacctagatgaacccacaaccggcatggatccggcggccaggcgtcaattatggaacatggtgtgtcgaatccgtgattcgggtaaatccattgtgctcacatcgcacagcatggaggagtgtgaggcactctgtacgcgactggccattatggtgaacggagaattcaaatgcattggctccacgcagcatcttaaaaacaagttctccaagggccttatcctcaagatcaaggtgcgccgcaatctggaggcattgcgtcaagcgcgtttgagtggcggctatgcgcgaaatccggatgaacagaccgtgcccgcccaaatgtcccagcgggacatagatgccgtcaaggagtttgtcgagaccgaatatccaaattctattctgcaggaggagtaccagggcattttaacattctacattccgttgactggagtgaaatggtctcgcatcttcggcttgatggagagcaatcgcgaccagctgaacgtggaggactactcagtcagccagacaacgctggaggagatctttctcgagttcgccaaataccagcgtgaggatacgcgcgccaatcagtgagctagcccccaaaaagatccaacacccagttgataacaccacatggcttctttttaacgggcttcttgcttcctggcttcatcttctgcctgtcgcatcgcatcgcattgccagcacctaaacaaaacgagcaccgcaacaccgccagaacatcctatttctcatacacgacagcactcggagtagttaacctgtcattttattaattttgtttagtgattttttgtttgtagatttagccaacatcctaacctaatgttaaaagctaactcagctgcatgcgtatattccttaaaaagctaacaatatcccactaactaatgcccgccctgaatgccgagctgatgctaaccgtgctatgtttgttctttctttttccttatgaaatttgtcactcctatatccagtcgcctctcggaattgaggaagctgtgcaagtgcctgctaactaatgagttttgaaccaactacctgagcgggtccgttacgatccgattttcacctgatcttacactcacagataataatgttgtataccaaagcaacgccgatgcctgaacagctaacaaatagtttctaagctcgacctgacaatagatagcagctattatgccttatttcatt

SEQ ID NO: 2058 - protein, 1713 aa, DROSOPHILA
MAKVTNWDKFVLLLWKNWTLQWNHKWQMVIELVLPAIFSLLLVLVRTLVDTEQKGVRYYNEQNLTDLNLLQKNGGFSKFEFILCYSPVNPVLKKLVEEAWQSLGKNKICESENATQLELDTVSKNAFAGVQFDDAWANLTENDPLPNDFHFALRFPAELRTATIAIANTWLTMRLFPTIDLTGPRNEGDDDGGIPPGYLREGFLPLQHSLSMAYLRQKSGEQDLPNVVMKRYPFPAYIFDPLLEGMSSIMSLIILLSFIYPCTYITKYITAEKEKQLKEVMKIMGLSNWLHWTAWFVKSFIMLTISAILIAILVKINWSEDVAVLTHANFTALVFFLIIYIVSSICFCFMMATFFSRASTAAAVTGLIWFIAYIPYSFTINSYDDLSLSSKLGWSLISNTAMGFGIKLILGFEGTGEGLQWSNFFTPVSVDDTLTLGAVMIMMLVSCVIYMIICLYVEQVMPGSFGVPRPWNFPFTREFWCGEREYTGVEDIPNGHVEQRDPKAFETEPEGKHIGLQMRHLKKRFGNKMVVKGLSMNMFEDEITVLLGHNGAGKTTTISMLTGMFPPTSGTAIINGSDIRTNIEGARMSLGICPQHNVLFDEMSVSNHIRFFSRMKGLRGKAVEQEVAKYLKMIELEDKANVASSKLSGGMKRKLSVCCALCGDTKVVLCDEPSSGMDPSARRQLWDLLQQEKVGRTLLLTTHFMDEADVLGDRIAIMCDGELKCQGTSFFLKKQYGSGYRLVSGVQNLFYGRCTYKTCDSLKICVKRDDCETNEVTALLNKYIPGLKPECDIGAELSYQLPDSASAKFEEMFGQLEEQSDELHLNGYGVGITSMEEVFMKVGAEKDNTGNIKDQHEIMNGGSGFRGEDDNESVQSDGIFSENRRLLQGLQLLSNQWKAMLLKKFLYTWRNKLLLLIQNIMPVFFVVVTILIIKTQGTFQELKPITISLTQYPLAVTVLDRSNVQNGTGYEIANKYEDLARSYGSNYGLELTGTQGFEDYILDLGKTIQVRINSRYLVAATITESKITAWLNNQALHTAPLTVNMVHNAIADKLFGSSVKIQVTNAPLPYTTSTLLSQLSTGNNLGTQLASNLCFCMCFVSSIYILFLIKERESRAKLLQFVGGVKVWTFWLSQFICDFASYIVTALIVVITIVCFQETGLSTFGELGRYYLLLLLFGFAVLPFIYIMSLFFREPATGFARVSIVNIFCGMALFIVVVVMSSELFDTKDTADILGWIFRIFPHFSLAMSLNKVYTNTATRNACAKAGALPPILLCELVPQCCNLKPYFAWEEPGVLPETVYMAVTGVVFFLIIIVLEFRLINELMFKIRQLISKPPPPPTEGQLDDDVANERERILQMSSNELATKNLVLDRVTKYYGQFMAVNQVSLCVQEVECFGLLGVNGAGKTTTFKMMTGDERISSGAAYVQGLSLESNMNSIYKMIGYCPQFDALLDDLTGREVLRIFCMLRGVQESRIRQLSEDLAKSFGFMKHIDKQTHAYSGGNKRKLSTAIAVIGSPSVIYLDEPTTGMDPAARRQLWNMVCRIRDSGKSIVLTSHSMEECEALCTRLAIMVNGEFKCIGSTQHLKNKFSKGLILKIKVRRNLEALRQARLSGGYARNPDEQTVPAQMSQRDIDAVKEFVETEYPNSILQEEYQGILTFYIPLTGVKWSRIFGLMESNRDQLNVEDYSVSQTTLEEIFLEFAKYQREDTRANQ

SEQ ID NO: 2059 - DNA, 4128 bp, DROSOPHILA
tgtatttttacatttcttaaatcgtttccttagacattatagatccacctataactcgagaactatgtacttgtatatatattaatttggcctttagtttttaatcaaaacttacacctaaactagaggtcctcgattatataaaggaaatacgtataattctactaatcttctgctcttttccgtagcaactggggcactgagagggatccggatcagaattaccacaccggcaacaccgatccacgtggtttcggacacattggaatcatggtgcccgacgtgtacgccgcctgccagcggtaagtaatgtcaatgggaaagtcctgttctttttcaaagacgcaatctttcccgcagcttccaggagcttggcgtggacttcgtgaagaagcccgacgacggccgcatgaagggactggccttcatcaaggaccccgacggctactggatcgagatcttcaatgcacactccgtctagtctggctggcagatagaattaacttgattaattgcgcatctgccactgttccttaatagcgatccccactaggctggaccgccgagtggagtcgcaacaataaatgagaaattgtgtaacaattgggctgtggacctcattcactcgggtgcacctgtcgcagctgccgcagctgtcaacgtcggccccaaaataattggctcctgctcctgtgtcctttttccggcttggtattttcacacgctaattattatttacatcgcggacagccgagctttttgataagcaaatgtgttactcactcgcacatggggtgtttgcccagacggtctgcgagggccatgtggtcatggtgtggggcgtggatggtggtggccactaataatagtcaaatatgggagcgcagtatttgtttggtgtcgaatatggcgttttgcaatttaaggtcctgtatttggcgactcgagaacagttctcgtccagaggtcgtactgcgagtgtcccgcgttctgaattactatggagatatcccagcccagcatcggcatcttctacatcagcaaagtgctggccctggctccatatgctacggtccggaactccaagggccgggtggaaattggtcgcagctggctcttcactgtatactcggccacattaacggtggttatgggtgagttgagcatccaaaggcgggtgacttccttctgactaaacgctatccgcatctgcgtagtttttctcacttatcggggtctcctgttcgatgctaactccgaaattcccgtgcggtaggtacttttgtatctacatctatgtttcctacttgtaaggtcccagttctgtgccgttttttttttactaatctctacgggcttgtcccattcaaggattttaaagtagtgacactcggagtggagtcctgcacttttagaacccatatcttatcaaatatgtataagtaatactttcctctcaagaaggatatgattttgttgcggagggtgtcattactttgatcctaattgtgtgtatacttttctcgatttttctctatctaatcatcacctctgctcccttctaaacacattcgatcttgaccaattaattgctctgacaaactgcaaacaaaaccaaccaacaaatcaaaagtgcatcttttagaatgaagtcggctacgtcgaaggtggtgacggccctggacgtgtctgtggtggtcatggccattgtatccggtgtttactgtggccttttcagcctgaacgacactctcgagctcaacgatcgactaaacaaggtgagatcacgtcaatcatagatccaccctccttttatttgttataatcacccaataaacaccccagatcgataataccctaaatgcctacaataactttcgaagagatcgatggcgagccttgggcatggctgccgtctctctgctggccatttcgattctggtcggcctggatgtagggacgtggatgcgcattgcccaggatatgaacatagctcagtcggatacgggtagctagcgctttaatgtattcatttataagccgccaaataaatcttaaaatgaaagaaatctatctttgaatccccaccttttcattttctcttcgacagagctcaatgtgcactggtacattccattctatagtctttacttcatcctcacgggcttgcaggttaacattgccaacacggcctatggactaggaaggcgctttggccgtctgaaccgaatgctttcgagcagctttcttgcaggtaagtggtaatttaaatttccaggatttttgattagttgtaaaccacccaacagagaacaatgcaaccagtgccatcaagccacaaaaggtcagcaccgtgaagaacgttagcgtaaatcggccagcgatgccatcggcactccacgcgagcctgacgaagctgaacggcgaaaccttgcccagtgaagccgcaggtgacaaggcagccgcacgcagtctaatcctcaacgtggagttactcaaattgggttattttccagccaagaacaaggggttgctcctcaaatccctggcggacagtcacgagtcgctgggaaaatgtgtccacctcctgtccaagtaaagttattccacatcccatgttttcgtgcttcttaccttcccgcacttgacagctccttcggcattgcggttctcttcatcctggtgtcctgtctgctgcacctcgtggctacggcctacttcctctttctggaactgctcagcaagcgggataacggctacctgtgggtgcagatgctctggatttgctttcacttcctgcgactgctcatggtggtggagccgtgccacttggctgcccgagagtcccgtaaaacgatccagattgtttgcgaaatcgagcggaaagtgcacgagcccattctcgcggaggcagttaagaagttttggcagcagttactcgtcgtagatgctgacttctccgcctgcggattgtgccgcgtgaaccgcaccattctgacatcggtaaggatttagactacacttaaataatatccatgtattattctaatgctatctggttgcagtttgcatccgccatagccacctatctcgtgattctcattcagtttcaacggaccaatggctaaagttatacaaaaagtggcttgttttttattaacactattaactaaacggagttcttggatattattgatctgttaaagtgtctatgtgcttgaatcaagttagcaaacaataaaaagcaaacgggttatttttcttagaacttgctaaaattcacacactcttatccatgatccattctccatcatattacaactagccatactctggggggacttagaaacccttctggtactgcttggtctccaaccgctgttgcaacaactccagctgtcgtttcgcctcgcactgggggaagttgttcaagtcataatattggggcgccaggcagcacaaccattcagctataaatgtaagaaatgcttacaaaaatgaccctgaaatgcggaagttgctactcacgtttgacatctgtcaccgtgcgaatgtagttctttgtagtcagcacgaactcattgtagatgacccaatcgggcttgtggtcgagacaagtcgacggatgcagctgcacgttctggttgtccttgatggtcagatagtagccagtgcgctccaggtgggccacctgcatgaagaagccctgcacgagggcctttcggatgtttacatagtagtccttcgaggtgaattcagtgctcgtgcgccgcaagttgaagcggtccatgattctagccagctgctggcgcacgttatccgcactctttagcgagcggaagtttatgaagttctcgtagcaccagtttggatcctcactgcctgaaagaaataaagaaatatgtctttatgtttccatttcgagtataggttggtttagtttacttactctgcttaaaggcgtgatagacattaagcaacgtcaggtggtctccgtcaatgtgggcgaatcgcatcttggcctcatcggcagctttcttcgcctcgttggggcgaacgaagcattgtggaactttggcacgtttgaattggtttagtttcgattaagcgcaagttcaaaacaatttt

SEQ ID NO: 2060 - DNA, 1350 bp, DROSOPHILA
atggagatatcccagcccagcatcggcatcttctacatcagcaaagtgctggccctggctccatatgctacggtccggaactccaagggccgggtggaaattggtcgcagctggctcttcactgtatactcggccacattaacggtggttatggtttttctcacttatcggggtctcctgttcgatgctaactccgaaattcccgtgcgaatgaagtcggctacgtcgaaggtggtgacggccctggacgtgtctgtggtggtcatggccattgtatccggtgtttactgtggccttttcagcctgaacgacactctcgagctcaacgatcgactaaacaagatcgataataccctaaatgcctacaataactttcgaagagatcgatggcgagccttgggcatggctgccgtctctctgctggccatttcgattctggtcggcctggatgtagggacgtggatgcgcattgcccaggatatgaacatagctcagtcggatacggagctcaatgtgcactggtacattccattctatagtctttacttcatcctcacgggcttgcaggttaacattgccaacacggcctatggactaggaaggcgctttggccgtctgaaccgaatgctttcgagcagctttcttgcagagaacaatgcaaccagtgccatcaagccacaaaaggtcagcaccgtgaagaacgttagcgtaaatcggccagcgatgccatcggcactccacgcgagcctgacgaagctgaacggcgaaaccttgcccagtgaagccgcaggtgacaaggcagccgcacgcagtctaatcctcaacgtggagttactcaaattgggttattttccagccaagaacaaggggttgctcctcaaatccctggcggacagtcacgagtcgctgggaaaatgtgtccacctcctgtccaactccttcggcattgcggttctcttcatcctggtgtcctgtctgctgcacctcgtggctacggcctacttcctctttctggaactgctcagcaagcgggataacggctacctgtgggtgcagatgctctggatttgctttcacttcctgcgactgctcatggtggtggagccgtgccacttggctgcccgagagtcccgtaaaacgatccagattgtttgcgaaatcgagcggaaagtgcacgagcccattctcgcggaggcagttaagaagttttggcagcagttactcgtcgtagatgctgacttctccgcctgcggattgtgccgcgtgaaccgcaccattctgacatcgtttgcatccgccatagccacctatctcgtgattctcattcagtttcaacggaccaatggctaa

SEQ ID NO: 2061 - protein, 449 aa, DROSOPHILA
MEISQPSIGIFYISKVLALAPYATVRNSKGRVEIGRSWLFTVYSATLTVVMVFLTYRGLLFDANSEIPVRMKSATSKVVTALDVSVVVMAIVSGVYCGLFSLNDTLELNDRLNKIDNTLNAYNNFRRDRWRALGMAAVSLLAISILVGLDVGTWMRIAQDMNIAQSDTELNVHWYIPFYSLYFILTGLQVNIANTAYGLGRRFGRLNRMLSSSFLAENNATSAIKPQKVSTVKNVSVNRPAMPSALHASLTKLNGETLPSEAAGDKAAARSLILNVELLKLGYFPAKNKGLLLKSLADSHESLGKCVHLLSNSFGIAVLFILVSCLLHLVATAYFLFLELLSKRDNGYLWVQMLWICFHFLRLLMVVEPCHLAARESRKTIQIVCEIERKVHEPILAEAVKKFWQQLLVVDADFSACGLCRVNRTILTSFASAIATYLVILIQFQRTNG

SEQ ID NO: 2062 - DNA, 4008 bp, DROSOPHILA
gcctcgaagttgtccagtctcttagacactaacagcgtcagcttctcaaatctcatgtcgatgtgctccttgaggattgcaacatcggtggaaggcggtgcagtctcttgggtttggtccttcgcctgcggggaatagcccttcatcaggctcatgaactgctcgaacttttcggcctgctcctccttcttcaagggactcgtgccacccctttgcagcagctcttggattcgctgcgcatccattggcctgggcaactgggtggttatgccgttgggattcggcgccacctggagcagggctccgtaaacgcagatctcgctggccgaggtgagcatcttcaggtttatgtcatttatcccggatcggtcgatttccatgtcatagcgatagggtcgcaccgcaacctctgggtcctcatcgtcgacgcaagtgccgtagatggtctcgcagtactcctgcaagggtccaatgaacagctccaccttgggagcgctgcaaatcagggtgagcgcggcgattttgaagcggttcgggatctggaagcgcagctcacaaggcggcggcggatccgccgactgcatggaaaacagcacggcgcgattctcgtcgatcacgtcgtccaagtcgggcctgcggacaaaggaggtttcaaaattacttgataaaaaccagtttcggggcgtggaatcctttgtctcacttcacaaagacgtcttcgtcggacaagcgggtggccaccagttggtccagcccgttgcccgacagctggggccaagtgcagcgcgcggtgaccttttcgcacatgctttaagtgacaaaaagttggaatttatgggagcaaaatttaaaaacagccaaatttaaaaaccaaaacacgaatatagtgatgacaaacgcgagcgataacatctgcgcgggggatgccaacctgttgcacagcgcaaactaattggacatttgaaggtagcttgacgcgctattccaataagaccatactccggagtccaatcagagaaggcaccgcatctgcgcactacgtttttccaacagaacggcaatatcgcggcctgacagctgcgaccttggacggctcccttgtaggtcaaacttcagcagaattcccacatattgcagtcgcagcaaggcggcagcttaagaacgagtacacaattatccgcagagtgatcaacgcagctaaaatgggcggcaagtacaagatcgtgatggtgcgccacggcgagtccgagtggaaccagaagaatcagttctgcggctggtacgacgccaacctcagcgaaaagggtgagtgattacatcaatttgaaatttaaacctcatatgtgggattaaaaatctgatgtacatctagtttccaatcgatgatcctttgctttgatcagtttcacaatagtattccttttcatttacccaaattaatcttcattgacctagtgcaacattatctcattcaaacttttctgtgataaaaataggtctctacaaacaaaagctttccagtgcaattttcagaagcatcaaaattctagtttgttacactttaaagtcaaaaatttgccatctcatatgtttctaaagttcagattatgcttatgagcataatttgataggttatcgcctttttttaaccctagtaatcaaattaaattaaacgcatgcctttcaattagattaaattggcttacgttcgttacccaacacggcgtatacttaatgttcgctaaacatttgcccaaacaggtcaggaggaggccctagccgccggcaaggccgtcaaggatgccggcctggagttcgatgtggcccacacctcggtgctgacccgcgcccaggtgacgctggccagcatcctgaaggccagtggccacaaggagatccccatccagaagacttggcgcctgaacgagcgccactacggtggactcactggcctgaacaaggccgagaccgccgccaagtacggcgaggcccaggtgcagatctggcgtcgcagcttcgacaccccgccaccaccgatggagccgggccatccgtactacgagaacatcgtcaaggatccccgctacgccgagggtcccaagcccgaggagttcccccagttcgagtccctcaagctgaccatcgaacgcacactgccctactggaacgacgtcatcattccccagatgaaggagggcaagcgcatcctgatcgctgcccacggcaacagcctccgtggcatcgtcaagcatttagacagtgagcatgggagacataacatatatcatatcatctttttaccatatccttgtccaatccagacctttctgaggacgccatcatggccctaaatctgcccacgggcattccgttcgtctacgagctggacgagaacttcaagccggtggtgtccatgcagttcctcggcgacgaggagaccgtgaagaaggccatcgaggctgtggccgcccagggcaaggccaagtaagcacgcaggccacacctcatgagaatccactcaaatacggcacaagtcagagcattctgattacgcttctgttcaagatgtagccaatcccattcgttgttgttgttcgcgtagcagtaattggttcatccccactacagttaataaataatttattattacactcaagaggacaggcggaggaggcttcatttattgtccggctcacttcttcttattcttcttgccgtccttggccaattccaggcccaggatgcacttgggcggcaccttgtacgtttccgtgagcagcgtgtgcacaaatcgcacctggttgccctggatttgcagctgctcgtgcttttggtgcggcagtttcaccacactggtgctggcggcggctccctgcttgcacagcttgatgaactcggccaggatgatgccgtacgcctcgatgttgctgaccagcgtcaccttcttgttgcccgatcgcgtggccagggacatctggatgaggggcttcccgctcgtatctttgccgctgcacatctggtaggagtgctccatcttgctggtgatgagggagcacatctcgcttagcgaaacctctctgttaccatacagctcgatcagagtgtcgtcggggcgcaccagcttggtcagcggatggaggagaccatgtttgctcacgtactcccgcacaatcttcttgatctgacccgccgggattccctcgccgcgcttgtaattcagcttggtgaagaaggccgccgtaacatcggtcactatgtacatctccttcagctcggagtggaacaggggcgtctcggacgccgctccattagcttcgcttgccttgacatcggttataaagttcaccacttcggggtgctccaggtccacagatgtgattttatccactcccttgctctcctcccgcaccacaatgaatccttggtccaccatctcggccagaaagttggagagctttttgtagcgcgtcttcttcaggtcgatttgctccgtggcctccgtgaccacatagagtctgtagaaattgctcgtcagcagaggcaggggcagcttctttccatggtttttcaaggcggagaggaaggcattcttgagtataagttctggtgaggcttcctccacggcttcttcgtcggactcgggagcttcctggctttccaaggtcagagcagcagtttccgtttccagttcctcggtttgggccaccgtagcgaaggtcacaggagcgggagtagctgggctggcggtctttctcctttccgtctcagacccaagagcagggaaatcctcgccagacaaggcctttgtcttgaccagcgggatttgctgcaccagactgggctcatgcgaccagagcttgtccccaaagaggtggagcatcttgatggccacaccgtgacctccgcacatgtacagttcatcgctggagcgagccaactggcccacgcccaccgcagatttgttgtttgtgaggtttacggccactgaaaaagacaatgagatcaata

SEQ ID NO: 2063 - DNA, 1479 bp, DROSOPHILA
ccggagtccaatcagagaaggcaccgcatctgcgcactacgtttttccaacagaacggcaatatcgcggcctgacagctgcgaccttggacggctcccttgtaggtcaaacttcagcagaattcccacatattgcagtcgcagcaaggcggcagcttaagaacgagtacacaattatccgcagagtgatcaacgcagctaaaatgggcggcaagtacaagatcgtgatggtgcgccacggcgagtccgagtggaaccagaagaatcagttctgcggctggtacgacgccaacctcagcgaaaagggccctagccgccggcaaggccgtcaaggatgccggcctggagttcgatgtggcccacacctcggtgctgacccgcgcccaggtgacgctggccagcatcctgaaggccagtggccacaaggagatccccatccagaagacttggcgcctgaacgagcgccactacggtggactcactggcctgaacaaggccgagaccgccgccaagtacggcgaggcccaggtgcagatctggcgtcgcagcttcgacaccccgccaccaccgatggagccgggccatccgtactacgagaacatcgtcaaggatccccgctacgccgagggtcccaagcccgaggagttcccccagttcgagtccctcaagctgaccatcgaacgcacactgccctactggaacgacgtcatcattccccagatgaaggagggcaagcgcatcctgatcgctgcccacggcaacagcctccgtggcatcgtcaagcatttagacaacctttctgaggacgccatcatggccctaaatctgcccacgggcattccgttcgtctacgagctggacgagaacttcaagccggtggtgtccatgcagttcctcggcgacgaggagaccgtgaagaaggccatcgaggctgtggccgcccagggcaaggccaagtaagcacgcaggccacacctcatgagaatccactcaaatacggcacaagtcagagcattctgattacgcttctgttcaagatgtagccaatcccattcgttgttgttgttcgcgtagcagtaattggttcatccccactacagttaataaataatttattattacactcaagaggacaggcggaggaggcttcatttattgtccggctcacttcttcttattcttcttgccgtccttggccaattccaggcccaggatgcacttgggcggcaccttgtacgtttccgtgagcagcgtgtgcacaaatcgcacctggttgccctggatttgcagctgctcgtgcttttggtgcggcagtttcaccacactggtgctggcggcggctccctgcttgcacagcttgatgaactcggccaggatgatgccgtacgcctcgatgttgctgaccagcgtcaccttcttgttgcccgatcgcgtggccagggacatctggatgaggggcttcccgctcgtatctttgccg

SEQ ID NO: 2064 - protein, 199 aa, DROSOPHILA
MGGKYKIVMVRHGESEWNQKNQFCGWYDANLSEKGPSRRQGRQGCRPGVRCGPHLGADPRPGDAGQHPEGQWPQGDPHPEDLAPERAPLRWTHWPEQGRDRRQVRRGPGADLASQLRHPATTDGAGPSVLREHRQGSPLRRGSQARGVPPVRVPQADHRTHTALLERRHHSPDEGGQAHPDRCPRQQPPWHRQAFRQPF

SEQ ID NO: 2065 - DNA, 3266 bp, DROSOPHILA
atcttggaaaggggcgatgagtccaacggctttgtgctcctggtggaaggaggtcgcattgaccagggtcaccacatgaactacgcccgtgctgctctgcacgagctctacgaattcgatttggcaatccaagcggccgtgaacaatacggatcccgacgaaacgttgatcctggtgacggcagaccattcccacgcggtcacctttaatggttacgcgctccgtggagctgatatcctggggacagctaattcacacgagaaaaacgatcccatgttctacgagaccatctcgtatgccaatggtaagctagaccttagcattatcagaattttctggtaaaacaaactttgaatgttttcaggtcctggctattgggatcacttggcgaatgactccagacctcagaacagctccaacatgtggatgcccctgaagcattttaccgctgaggagcgggctgctcccacttatcgccacttggcgacggttcccagaaaggacgaaacgcacggcggcgaggatgtggctgtctttgcatatggacctggttccagtttgattcgcggggtcttcgagcagaactacttggcctatgtgatgagctacgcgggctgtttgggtcctgccaaggacttcgatgactcctgtgaggatcacaaggatgggcaaaaggataggccgctggacaaacccaatccaaagagaaatggcgccactgttgtgggagcctccttgatccccattttgactgctgccactgcggctattttgcgcggtcgcgggctgtaattaatgttgttttaaatatattaattgttattaaagtttatagacgtacggatggcttcgttgaatgagagagtgagcgagatggaggagtgatcgttgcaacttaacaaatagatacactgaaaaatatgcaatgttttttatttttgtcatggtaaacttgaatagaatatcccggccataaaaacgtcgatggattgattcatttaagttagtttactatcgctcgcaatgacacttttgcttaagttttgagtacatccccatcgatcgctcaatcgtttatacaaaacccataaggggcctcaaagaaaagtcaacaaattaggacaaaaggatttgccaggatcctaggccgccttggcaggaacggtggccttggaggtcactttcgacgactctggttccgcatccagcttctggacgcgatgaagatcgatgcactgtcggaattgggccacctcctcaatgcacttcaaggtctccccgggatgcgcgcggtagcaggcaagcagctgggatttcaggtcctggcagggaggcactttgtgcgacgacgcggtgctgacgaatcgcttgtgcacattttctacagcattggcgtactccttctccaggatggtgttggtcttcttgaggttctcctccagcttcgccatgcgctccttccacagctcgtcattcttgattagctcctggttcatctggcgctgcacatcggccgcgctaatggtgtgtcctcctccctggacgtaaatgggcactgcagcgggataggaggatactttcggagcaggagaagcagctggcgaggatgcggctggcttggcggcagccttcgtcgttggcttgggcactggtttcgattcctccgcagcggctgcgtgctcacgagctgaattggacaagatataaatcaatagtttaatgaaaaaaacatacaaataggaatggaaactagccaatgaaaccaaaactacaccctttcaagtgcgttttttttttgtgaacaagatagaagagccactctctacaacttgctgctgttctcgttaacgagtttccactgtgtttggcgtaaacatttgcccgttttgacaattgttgcataacaccgagcagagtgaaatggtcatttccggatataactccacaatgccattggattgcttaccctgctgggatattcccgccttcagtcgcttgaccacatcgtcggatatatcaataacgccggcaggagttgggttttccattgaaacggttcggggctcgcgggattgagactgtcgggctcccatctttgaagttcctctagctgctgttcgtggagcaaaacctggaatatcggcaattggttaatcggtgtcaagtcttcgcaagctcatgcatcgcttcgatctgtttatttcggccttacccttttcggtgaaaaactacagggccaacccaacaaaaataagacgtgctcagagtgaccttaaagcgcaagcacgaaaaagacgcaaaacagctgaccggtagagtagccagattgttcgaccagggctggttgtttttgtatattggcgttgccagattatcgaatattcaaatccttcacttaagaaaccttcatttacggtggaatttagctccacaatttcccccaacttctgtttgacaacacaataagcaaatctgatgagtcgtgttattattgtttaagctttttaatgcctcgttcgtaattgttattgtgaatggtggtgtggcttatttagtagctgcttttattctgttcacacatacatattccatgttcggtttaattcgaaatacttgctaattacataaatgtggccttatcgtgcacttatcgatacatccgtcgaattccgatccaacgtacttttgaaatgtttcatgaaccgcttcgatttcgatttcgatttcgtttgtggttattttgtattccatatcactggtggtttatttttaatgattttctctcatatcgcccatgatacactcgaactcgatccaattagtataattagttattagttcaaaattctattctcaatatacatatacagttaattatacaaaaccttcgaaattactatgttctcaatttgttagtttctctatttcgcttatgctgaatggactgctcgctcatacaagatcatttagttctccatttctagtggctcataatcgctatgaatcagtttgtcgggcttcgatttcgtttcttttctatcaataaaatgctaatggtttaggtttagtactctgtatgctaggaggaaaatcacacatatgtatatattttaattttatacttttggggttcggatattattcttatgtacactcatcactaggttctcaattctcggtttggggaggaggattggggcttctccacggtcgcggatcccctaatctgaatgcgctatatggtcgtgtttacaaggttggtcgtt

SEQ ID NO: 2066 - DNA, 906 bp, DROSOPHILA
tctgagcacgtcttatttttgttgggttggccctgtagtttttcaccgaaaagggttttgctccacgaacagcagctagaggaacttcaaagatgggagcccgacagtctcaatcccgcgagccccgaaccgtttcaatggaaaacccaactcctgccggcgttattgatatatccgacgatgtggtcaagcgactgaaggcgggaatatcccagcaggctcgtgagcacgcagccgctgcggaggaatcgaaaccagtgcccaagccaacgacgaaggctgccgccaagccagccgcatcctcgccagctgcttctcctgctccgaaagtatcctcctatcccgctgcagtgcccatttacgtccagggaggaggacacaccattagcgcggccgatgtgcagcgccagatgaaccaggagctaatcaagaatgacgagctgtggaaggagcgcatggcgaagctggaggagaacctcaagaagaccaacaccatcctggagaaggagtacgccaatgctgtagaaaatgtgcacaagcgattcgtcagcaccgcgtcgtcgcacaaagtgcctccctgccaggacctgaaatcccagctgcttgcctgctaccgcgcgcatcccggggagaccttgaagtgcattgaggaggtggcccaattccgacagtgcatcgatcttcatcgcgtccagaagctggatgcggaaccagagtcgtcgaaagtgacctccaaggccaccgttcctgccaaggcggcctaggatcctggcaaatccttttgtcctaatttgttgacttttctttgaggccccttatgggttttgtataaacgattgagcgatcgatggggatgtactcaaaacttaagcaaaagtgtcattgcgagcgatagtaaactaactt

SEQ ID NO: 2067 - protein, 223 aa, DROSOPHILA
MGARQSQSREPRTVSMENPTPAGVIDISDDVVKRLKAGISQQAREHAAAAEESKPVPKPTTKAAAKPAASSPAASPAPKVSSYPAAVPIYVQGGGHTISAADVQRQMNQELIKNDELWKERMAKLEENLKKTNTILEKEYANAVENVHKRFVSTASSHKVPPCQDLKSQLLACYRAHPGETLKCIEEVAQFRQCIDLHRVQKLDAEPESSKVTSKATVPAKAA

SEQ ID NO: 2068 - DNA, 8247 bp, DROSOPHILA
agcattaatggccaaatctggcctccactcatctattgtttgcccaatttgttatcaaagcacgacccgttttctcggcgaacggactcggccaactgatttgcattggcttgacccataaatttggaaatcaaacaccgtttgatgggccattctggctctggtctggcatactggcatatccacgtcgaaagcgctgtccccgccaataaagtgggctattcgagatcggcagatatcactgatctccagccagtgcgaatgggggatggggatgggggctagtcgaaatggagtaaaagtaaacaccgaacataagcccacacaaatcgttatggtggatttggcctaagccgattaggctagaatgggagaaaatgggtgacgagcgatttcacgcgacacctgcgtacgtacctttctcactcccaactcccaactccacactcctcatttctcattagtgaaagtgaaaaatagtaaaaacgcaagcgacagttataagccaaaacccattgttacgcgtcgcttttctggcagcccttgggcgctaacaggcccataagaaaattattcgaggagccataatgccaactttatatgttacctatgttaggcccaaagagagccaaagagcgcagacaggtgcacattgttctcgatcgttgaccgcaatcaccatggttgcatctccaacacgttcgagttcggagtgtagagatccagccacaggtgatacctcaccattaccaagcacgagtgtgtttaccatgctaacaatttctttctgtttgaggttctttcgtctgcgagcatcatccacatccatcgccccgagactttcttttgcaagaattccacttccacgacgaactgcgtcccgctctctcgcgccttctctcttccttcgccagccgagctgctcccagaacttctttatctaatttttataacaagtcactcggcggcgtggaagacttcagttctgcggcgaccatcgaatggtcaagttcggtgctcccttgttcccattgcgaaagatcttgggctgcgaaagtgttttgtctcagtgtgactaggctgaaattcgggaaagactcaggcaacgaacttgttaattaggtaattgtttgacgatatggatatgactatgaatatggatatggatattgaaacgaagatgttagaatgcctcacatcatgagcactggtgtgggaacagagctatgccttttccacctccgatcgaaccgctactcagcagatgctgcccagatgcaccgactgaggaataactaagaaaaatctgaacaaaaaacgttaaccggtttacttaaacggcagtgatcggactgacggatgactatgcctatgccagcgttgaaaaacggagacaatcattctgaaaaagtgaactgcaaaaacgcagcaaactgagaaaaactgtgcagaatgcaaaagactcgaaagactccagccccagttacatatacgttcttcacgattcttcgcaattctttaccattcttcaaggttctgcagccagtctgcggcttccgtcaaaacattaggacttccgtcctggaatgggagttccccccccgacggatgccaactgacttggttcggctttcttggctaaattctgagatactcacgcatattggcagaaatctcagagtcagtgaatcctaagagctggaaattagcacagtagttcgttagtggtcccgtgattatcccacgaatcccaaattggccacattcgaagtttcgccgaatgggaaattaatctaacagtgtgatacctgccgttaaatttttggcaggctttagtcaccggagaaatgaagtcattaacacattcagaatggtgaaagttttttcctatggcgcggtccctctcgaagatcggatttctattgacgcttggcagatcgtttaattacatcatgcacctggaattggggctgaatgtgaatggagccgaagttggtcagaaggggtgtagactagacgctgttcgacattaaaaaaaaacccaaaagagctataaggtcgcagaaacaaaggcagttaaataaaagaaaaagttcgaaagtgctaaacagttaacaagtgctgattggcccaaaacagtgaacccaaaagcggtattgtgatgtgttagctcgactgattgattgatctagatagtagtagcatatgcacaaagcggcacattgaagagaagtattctttatgcttagttattattatgacaagaatgtttttgcaaggtggattcatctaatctccccctacctttgttaccaatttcaaaacccatttctctagttagtaaagaggagttccgaggtccttcagcactccctacttttactgcccatccacgcatagttggcctcttccctcagtttcctttttctaaaccttgcagtagccgcaacccacagtggttgggagaacgcttagtggggccccgcattcttggccccgcagaaactacgatcatttaacagtaatttgggcaataaacgactgttcgcactaatcgattgtgatcagcgacacagttaggcggcgctgtttccttgggctgttcatgtcgatgccccatacccactggataccggttgggtttcggtttcggtttgggtttcgtttggggattgggattgggttggggctcgacctgatcgctgcgggcgtaacacccatacccaggtgcccatgtagccatgtagccatgtacatgcatgtgtctatgctcggcagaaacagcttttgacgataatcattgacccaattcttctgccgctttctacaagatttttgtacaataacatggtcatggactcgttataatgcagcttcctgagtggccattctttacatggcactgccgaatgccgaatgccgaacgctgtatggtcatgtgcaccggaccccgacatattcgtattcatgccattccgggccagaatccactgaggaagggaaaaagaataaagaagaattcaaaagtctttcaagcattttatctctaattaagtacggctcgttttgaccgctgcagggtttatgaattatgaatcacccgatgaattaacggtatgtttctaaatatcatcttgaaagaatgaagaagctcagttttgggtggaacgtcggcccgtcggaaagtcgccacagcggattagtgtgtctggtgcgtcggcagtcatgcgttttctacatatcagctatccgtatccgtatgccatcctatccgtatctattacccaccaaagttttctgcacacatgggtattcatgagaattctgatggaataactgtgctgctagccagctagccagctaggaactttatatatgtatatctcttaatacagttatcatggtaataagtcatgcttcaagtgggctcctaacgagatactcgccaatggcaattacgcggctcgaaagccaaatgtattccctttcgtaataatattcttttctataattgaattgttgtcccgcctcgcaagtatttgtattaataattttccaaattgtccattccttacgggtttcttgagtccctaaggttcggttcctttgggtacctgaggttctggcgaaacaagctctacatggtacttggcgaaaaattagagctcatgaccccttgatggtctccacagcgcaaccgtcaatcataagcgatgcccattaacttggctgttgcgcaagagtttagctcagcggaccagaaaaaaaatcaggggatcgcgaatagtggcgaatctggtgaatagtgcacggggtcatcgacgtgagctccgttttcccaacggaatggatccaatccgactggatagaatggagtggagtggagtggagtaactggccgtgatattgtttctgcgacttcgtaattcgcgttacgccttatggcaaacaaattaatttgaagagattgagacagtgcctgcgtagtcaatttggctcgctttataaataaagcttagcgttatgccttacgattatgggccaatacaatgtttgcttatttaagatgttctataaacaggtatacccatttgcagttattggttcagaacgcttggaatgtttgaggatagataatgtatcttaagtaacagccctctatctatctttagatactcagcagcagcttgtttcttacaggcccagtgatagatactctaaatatggccaagataaacctactgcgacacctcttcctggccctaatgctgtacagtgcggccacggccaaggagcacctgcgaatccgaagacaggctgcggaatcggtgactgccgcagctccgaatgccagtaaggtgatggcctccgaggagattaaggacaagacagagtggcccggcgccaaagaaacctccaccgaaatcaataggactgagaggcccgtagaaaacgtggagacccgcaactcgggcttcgacttgccggccgcctcggatttgtccagctctctgggttccgaggaggatagcatctactacgacaatgctcccgtggactgcaatcccgagctggtgggctttgaaattgtgacagggtaagtaaagacgggtggttgctaccctaccctaatggctgctcaactgacaagtccttcgccagatacgtcttctcggcgcccgaaaagctgatggactcccagccgggcacgctaatgctcactgattgcttggacacctgtaggaagaacaaaacctgccagtcagtgaactacgagaccgggctttgcgtgctcttctcggcacatgctgatcaattaccgggtaagctacttatgccgctaaacaaaccagctcgcgacttaatcacaatcattacgaaggtgccctgacaaagtcgcagttccccgtattcactatctatgcccaaaaatcatgcctggccgtgaagccctgctcccgagcctggtacgtcgatcgtgttcagaactacaagctcaagacggaagttaagcgtaccgtgtcggtggcgtcaagacgcgagtgctttgaactctgcctcggcgaaaacgacttcacatgcaggtaggtagcgcccagtagtacagtccaaacacccaaacttcaccctcaacaaagtcaagtgaagcagaaaactgcaacccccaacccgaaaccgattattccatattcaactatgtacatatgtcccctgtagatctgccaactacgatcgcacctctggagcttgcgagctgagcgaactggatcgcctgactctggccggctcccaggccttccaggtgaacgatgggtcggattaccttgaaaatcactgtgtcgatgaacccaacaagctctgcgaattcaaacgtctacctggtcgcatactgaagacggtggactcggtttaccaagaagtgagcagcattgacgagtgccgggaactgtgcctcaactcgccatataggtcagtaacatgtccaattataagcagctctccctgatcttgggggatttaaggggactagaccctttgggtccgccaattagactatttgattgaaggcgatatcatatcacaccatcctcgacatttccatccaactcaggtgccattcgtacgactacaacgacacgggtgacatggtgtgtagattatcccatcacagtcgtgccaccttggcggatgtgcaggaacccttcctggaggtgcccgaggcgtcgacctatgaactgacttcctgctacaatgtgaccatcgagtgcggcggcggggacatgctggcacgcatccgcacctccaagctcttcaacggcaaggtgtacgccaagggatcgcccaagtcctgctcggtggacgtgaagagcgcgctggacttcgagctgcgcatgaactaccacgatctggagtgcaatgtgcgccagagcaccgccgggcgctatgtgaacgatataattatccagcaccacgacatgattgtgacatcctccgatctgggcttggccttggcctgtcagtacgacctgaccaacaagtcggtgagcaatggcgtcgatctggatgtgcgcggcgacatcatgccggccctgtccgaggaggtaattgtggagtcgcccaacgtcatcatgcggattacgtcgcgcgacggctcggacatgatgcgctccgccgaggtgggcgacccgctggccctcaagttcgagatcgtcgacgagcagagcccctacgagatcttcattcgggagctggttgccatggatggcgtggataactcggaaattaccttaatcgattcgaatggctgcccaaccgaccacttcataatgggtcccatttacaagggatcggtttccggcaagatgctgctctccaatttcgatgccttcaagttcccctccagcgaggtggtccagttccgcgccttggtcacgccctgcatgcccagctgcgagcccgtccagtgcgagcaggaggacaccagcggggagttcaggtccttgttgtcctatggccggaaacgcagatcgctcaacaccacaggtaagatcacagatcatctgatggtcttgctatcttctcttgctataactttcaacaacctgttcgcacacagatgatcatccgagaccacgtcgcgacatcgacacttcaaagaagtccgcccccagcgacatgctgctggttcagtccattcagattacggataagttcggattcaagcaagataagcaggaaagcggagacttttacgacggtaacgagaccacattcactgccaacgaggagggtcacggattctgcgttaacgccattggtaagctttaataactttcaatgtggcggctggccataaaccgcgtcttaaagaaccactttgccagctggcagatgaacggattagtggcctaatatactaataaccccgtgcgctctctctctctctctcctcgtcactaggtcttatcacggctgccaccattttcctgctaactcagctggccgtgatcgcgatctggacgtactgctaccaacgccggcagaagctgcagccgtatcagcactcctactaagcaaatccatatgcccattaatctacatagacgtctaagcttcacaaggtgcaatcaatatttacgaatattcacgaatatccatccgaatattcacgaatatccgaatacccgtcgtcctgatacaacatccgctatatttgccttatctagtcagtgcacgattttagagaaaatgaaatgaaaacgagattcaaatctgcgtgtcttgcacggtggaattcagattgcttgcatggcagccacggtgtttttgggtttgagtactcccccaacggatcacgttccctacttgcaaaggcagttcgacgacagcccgtgggttccttgaactccttttgcgacttcggaagttgactggttgacatttgtaaaaactaatgcatattacattacccttcaaacaatctaccataactaccacccctcatctgtatcgaatgcgactatcctaattaagcactataatttattgcatatcagtgacagcagtttgctgttcgcattttccctctaattgtacggaacgaactcatcttattattattaataaacttaagatttttaatgaactacccacgctgtgtgcttatttcgggcggaggtgcgggtgcgcttcgtcactagttggccggcgtaatgaacaaattgctcatgcagtaaacatatctgaaatttggctttcatatatggaaatcaactttctattggtggaacaaaagagcaaacattatcatttttattgcctgcatctggagcagcataagaatggatgagctgtggtctgacctggtctgatctggtctgggagtctagcagcctagcagttacccacgcataacgaattgtgcgaatcgcaggcagtggaatgcagacacctgcgaattattatttataactcgatggcactgaaaatgcatccaactgtaaacgcgagtcgagggcttccaggaacatgctcacttagagtcgcccaaaatgcacgagtcccgatcctcggcgcagaggccagtcagggaagccagcgattcacttttcgatgtgggcagaaggtccaaatgtcatgcttgttttctcaacttttcccagcgactcgacgtcccgtcttcattatggagtttggagtgtggagtatggagtgtggagtgtggagtatgcatgatgtacacctgta

SEQ ID NO: 2069 - DNA, 2554 bp, DROSOPHILA
aatggtcaagttcggtgctcccttgttcccattgcgaaagatcttgggctgcgaaagtgttttgtctcagtgtgactaggctgaaattcgggaaagactcaggcaacgaacttgttaattaggcccagtgatagatactctaaatatggccaagataaacctactgcgacacctcttcctggccctaatgctgtacagtgcggccacggccaaggagcacctgcgaatccgaagacaggctgcggaatcggtgactgccgcagctccgaatgccagtaaggtgatggcctccgaggagattaaggacaagacagagtggcccggcgccaaagaaacctccaccgaaatcaataggactgagaggcccgtagaaaacgtggagacccgcaactcgggcttcgacttgccggccgcctcggatttgtccagctctctgggttccgaggaggatagcatctactacgacaatgctcccgtggactgcaatcccgagctggtgggctttgaaattgtgacaggatacgtcttctcggcgcccgaaaagctgatggactcccagccgggcacgctaatgctcactgattgcttggacacctgtaggaagaacaaaacctgccagtcagtgaactacgagaccgggctttgcgtgctcttctcggcacatgctgatcaattaccgggtgccctgacaaagtcgcagttccccgtattcactatctatgcccaaaaatcatgcctggccgtgaagccctgctcccgagcctggtacgtcgatcgtgttcagaactacaagctcaagacggaagttaagcgtaccgtgtcggtggcgtcaagacgcgagtgctttgaactctgcctcggcgaaaacgacttcacatgcagatctgccaactacgatcgcacctctggagcttgcgagctgagcgaactggatcgcctgactctggccggctcccaggccttccaggtgaacgatgggtcggattaccttgaaaatcactgtgtcgatgaacccaacaagctctgcgaattcaaacgtctacctggtcgcatactgaagacggtggactcggtttaccaagaagtgagcagcattgacgagtgccgggaactgtgcctcaactcgccatataggtgccattcgtacgactacaacgacacgggtgacatggtgtgtagattatcccatcacagtcgtgccaccttggcggatgtgcaggaacccttcctggaggtgcccgaggcgtcgacctatgaactgacttcctgctacaatgtgaccatcgagtgcggcggcggggacatgctggcacgcatccgcacctccaagctcttcaacggcaaggtgtacgccaagggatcgcccaagtcctgctcggtggacgtgaagagcgcgctggacttcgagctgcgcatgaactaccacgatctggagtgcaatgtgcgccagagcaccgccgggcgctatgtgaacgatataattatccagcaccacgacatgattgtgacatcctccgatctgggcttggccttggcctgtcagtacgacctgaccaacaagtcggtgagcaatggcgtcgatctggatgtgcgcggcgacatcatgccggccctgtccgaggaggtaattgtggagtcgcccaacgtcatcatgcggattacgtcgcgcgacggctcggacatgatgcgctccgccgaggtgggcgacccgctggccctcaagttcgagatcgtcgacgagcagagcccctacgagatcttcattcgggagctggttgccatggatggcgtggataactcggaaattaccttaatcgattcgaatggctgcccaaccgaccacttcataatgggtcccatttacaagggatcggtttccggcaagatgctgctctccaatttcgatgccttcaagttcccctccagcgaggtggtccagttccgcgccttggtcacgccctgcatgcccagctgcgagcccgtccagtgcgagcaggaggacaccagcggggagttcaggtccttgttgtcctatggccggaaacgcagatcgctcaacaccacagatgatcatccgagaccacgtcgcgacatcgacacttcaaagaagtccgcccccagcgacatgctgctggttcagtccattcagattacggataagttcggattcaagcaagataagcaggaaagcggagacttttacgacggtaacgagaccacattcactgccaacgaggagggtcacggattctgcgttaacgccattggtcttatcacggctgccaccattttcctgctaactcagctggccgtgatcgcgatctggacgtactgctaccaacgccggcagaagctgcagccgtatcagcactcctactaagcaaatccatatgcccattaatctacatagacgtctaagcttcacaaggtgcaatcaatatttacgaatattcacgaatatccatccgaatattcacgaatatccgaatacccgtcgtcctgatacaacatccgctatatttgccttatctagtcagtgcacgattttagagaa

SEQ ID NO: 2070 - protein, 744 aa, DROSOPHILA
MAKINLLRHLFLALMLYSAATAKEHLRIRRQAAESVTAAAPNASKVMASEEIKDKTEWPGAKETSTEINRTERPVENVETRNSGFDLPAASDLSSSLGSEEDSIYYDNAPVDCNPELVGFEIVTGYVFSAPEKLMDSQPGTLMLTDCLDTCRKNKTCQSVNYETGLCVLFSAHADQLPGALTKSQFPVFTIYAQKSCLAVKPCSRAWYVDRVQNYKLKTEVKRTVSVASRRECFELCLGENDFTCRSANYDRTSGACELSELDRLTLAGSQAFQVNDGSDYLENHCVDEPNKLCEFKRLPGRILKTVDSVYQEVSSIDECRELCLNSPYRCHSYDYNDTGDMVCRLSHHSRATLADVQEPFLEVPEASTYELTSCYNVTIECGGGDMLARIRTSKLFNGKVYAKGSPKSCSVDVKSALDFELRMNYHDLECNVRQSTAGRYVNDIIIQHHDMIVTSSDLGLALACQYDLTNKSVSNGVDLDVRGDIMPALSEEVIVESPNVIMRITSRDGSDMMRSAEVGDPLALKFEIVDEQSPYEIFIRELVAMDGVDNSEITLIDSNGCPTDHFIMGPIYKGSVSGKMLLSNFDAFKFPSSEVVQFRALVTPCMPSCEPVQCEQEDTSGEFRSLLSYGRKRRSLNTTDDHPRPRRDIDTSKKSAPSDMLLVQSIQITDKFGFKQDKQESGDFYDGNETTFTANEEGHGFCVNAIGLITAATIFLLTQLAVIAIWTYCYQRRQKLQPYQHSY

SEQ ID NO: 2071 - DNA, 2914 bp, DROSOPHILA
cttagctcagtctacttgggttttcattttgaaatcggatctcattacggttttaccacaggcttaatacttcgtgcgtctgctcggatcgccggtcgctggacgtctgagggtgtggatccgcatctaatccactcctcagagcagcgatgtctatcaggaaaggcgaccggggcacaccgatagcccttggcttgagcgataagtcagaggcggcggaggcgtcggttcgtctgaggggtgggggcgcagagagacaacgggagattcgtctgaggagaggggtgtcgtagggctactatcgacggtcaacgtcaacgtttgctaattttcagttcgttccagctaattgattgccccggtggacatccgccgactgtccctgaaccgcgataaggcgttattatctcggcattatttgggtggtccacatccccgacacccccaccacctttccactaccatcctccgccgtgccctcttcgtcgagatttgaacagaccgaaatagatctgtactggaccttatcaccgtccgtagagatcatcattccgccgcgggtttcccagcactgttgttgtatttaccgcaaactttttggtgcttaaacggccaaaggagttggcgaaatgactcgctttctctgaaaatcacttaccaaagggactaagatcgggatgctggaaaagaatgccgatcaagcgttgcctataaggttttcgggcaacgcaactgtgtagaacgggggaagccttaacgaaaatcatttgttttcggcacgagcttataatgatcttaatcgctggatgcgatgtttctagactccaaagttcaggagccgatactaatttaataatttctaccgaaggcttgctttagtgtgacctacatcctccttttaatgaaagttcaatttattaggtggtgtaaatagcaaaaggcacccaaaataacaattaagtgattgattcagtcaattcagtcagttttttgtcattgttcactgatcctgcatgcaagacagtttctcgctgatctccagctgtgtttttatcattgtggaaagagtgatggccatgagcatatccctcaagttagtattaaacatgacgcgaaatttgtccgagtccaaaagcggcacggcagtgagagcggcgtaaagggatctcccgactacgttgtcaggttttttcttcctggccaagacatcgttgatgtagcgcagcaccaagtcaaggcgatgttgcatatccctagtggcatccaccacttgagccaactctgggacgaagcgctccatttgcttgcttgcctgttgctgcgattgcttttctatgcaacgcagagccaccaaatcggaattttcgttgctaatctccagtggaactaatgagaacatcagtcctttggtgccaccaggcactcccatctccacagcacagtacagtcgggtcgagagtcgctggttcttcagggctgcatccactagcaggtgcagtggctgtccttcgcagcattctctgacataatagtcgtggatcagggacgcggagcgggacaccgatttcccagtgcagaaccagcccagcacacgctcgttcggataggcgaacatatttagctctaggacctcggaggcatatgccatatccagatcaatgcgtttgttctccgaatgctccttgtgcggcacagtaaaacagtttgtgatctcgatgtggccctccttgttgcgacccagcaaagtgcccataacctttggtttgatcattacaagattagtggacaggagatgaatgcgcgcacacctacctgattgtcaccttttggtcggcgatcgtatgcgtcaataatttggaaaaacaccaacggctttagatacaccttagctcgcatgctaaaattcctagacatcatgagttacaaaaaaaattaagttggaaaagaaacttagcaaagcaaacttggctgcgcttgtgcctcccctcgatccagtgttgtaaaatgtaaatataacttaaaagggcacgtgccaaaatgtgctcacctatttcgttgccttgctatttagaaacttgcctatttagaaacattttgaaatggtaaacagaaaaaacaagcttaaaataattttaaattaagcatcatacattattttacagttgtgtatgctataagaacataataacaaaaattaaaaacattctgcctttttaccatatatgtatatagtttaaaatttagtaaatgtctgttaaaacgactcttaatttacgtgcatgagtttgttacggatagccatgggtatttcgtgtatcaataccttgtgaaatgggaatctcaccaagtatcaatggcagtgttccttgctcctcccatatttcgcatacggcataatgactttaatttcatactcatacaaatttcaattggcgccctatattaaaaactcagttaaggtggtaaacaaatcagactggtaaaacgtttacatagcaaaaccaatgaggccattttgcatgggaactaatttatatatttttaatattttaaaaaaatatatttatatagccgtcaatgaatattgttacccaaattcgtgataattcttcttttatgtcgagtgtatattttattagaaaatgtacaagacttttaatttaaaaactattccctgcaaagtaaattcatcgatgaataaccaaatatgcatattgctataagcccaacatattgcattataaaaatcggccatctacggcgtagatcttacacgcaggtcttgtttgaagcaagaagaatcgattgtaaaactcccgcttcttaaaacggttttagctcgataacggaatattttattcaatcctcggcaatttccatcttatacctgtcggtcgtaaagcataagggtaaa

SEQ ID NO: 2072 - DNA, 858 bp, DROSOPHILA
atgtctaggaattttagcatgcgagctaaggtgtatctaaagccgttggtgtttttccaaattattgacgcatacgatcgccgaccaaaaggtgacaatcaggttatgggcactttgctgggtcgcaacaaggagggccacatcgagatcacaaactgttttactgtgccgcacaaggagcattcggagaacaaacgcattgatctggatatggcatatgcctccgaggtcctagagctaaatatgttcgcctatccgaacgagcgtgtgctgggctggttctgcactgggaaatcggtgtcccgctccgcgtccctgatccacgactattatgtcagagaatgctgcgaaggacagccactgcacctgctagtggatgcagccctgaagaaccagcgactctcgacccgactgtactgtgctgtggagatgggagtgcctggtggcaccaaaggactgatgttctcattagttccactggagattagcaacgaaaattccgatttggtggctctgcgttgcatagaaaagcaatcgcagcaacaggcaagcaagcaaatggagcgcttcgtcccagagttggctcaagtggtggatgccactagggatatgcaacatcgccttgacttggtgctgcgctacatcaacgatgtcttggccaggaagaaaaaacctgacaacgtagtcgggagatccctttacgccgctctcactgccgtgccgcttttggactcggacaaatttcgcgtcatgtttaatactaacttgagggatatgctcatggccatcactctttccacaatgataaaaacacagctggagatcagcgagaaactgtcttgcatgcaggatcagtga

SEQ ID NO: 2073 - protein, 285 aa, DROSOPHILA
MSRNFSMRAKVYLKPLVFFQIIDAYDRRPKGDNQVMGTLLGRNKEGHIEITNCFTVPHKEHSENKRIDLDMAYASEVLELNMFAYPNERVLGWFCTGKSVSRSASLIHDYYVRECCEGQPLHLLVDAALKNQRLSTRLYCAVEMGVPGGTKGLMFSLVPLEISNENSDLVALRCIEKQSQQQASKQMERFVPELAQVVDATRDMQHRLDLVLRYINDVLARKKKPDNVVGRSLYAALTAVPLLDSDKFRVMFNTNLRDMLMAITLSTMIKTQLEISEKLSCMQDQ

SEQ ID NO: 2074 - DNA, 2230 bp, DROSOPHILA
catttaatttttgtttgttttccttgcgttgttatatgtccaaataaaaatgaaagtttgaattgtttttttttagtaatttagttttaactgtaatgtcaaatgtcaagaggtatactctgtataagaataataatgtgtaatgtaatttttagaacttgctaatctctagcaattaaaacatagcctgtaattaacaataattaattataataaccagtaacagttcatgcaaatgaaaccttaataaataataaattatataaaagaagatggaagtgttttcaatcaatgaagttacttcctattttcaggagttggaatgttacacttttttataagctgatttgaaatgcgcgccacattatatctgccttgcgcgcacgcattgcagccgaataacggcgaattaactcccctcagaggtgagtttgaactatcgattataatcgattgcattcggaaacaaaaaacaccttgagtttggtcagatcggttttgcgcgggataaataataaaatattaaatgttttctttgttaacatttcgctgtgcatgctgtctgggtacacatatacagcctatcgccttggctcactaagcccatggctcagatgtccatttggactaacattttgtgtgagtaattgaataataagaattacggagctcggacttgtaatggccgaagtactactgccgcaatgcttggttcacgttaaaaagaatcaagtgcaacaaatttaattgtatttaactattttataaccgcgcagcaaagtaatggttaattctgcttttaaatagttgacagttacaagcgaaacatagaagccgcgcaggttcctatcgataccatcgctgggtcatcgattatttgtccagctctacaggtgaaacgagcgttggcgattccgattccgattccaattccgattccaaattcgactccggactcgaatccgatttgaatcagattccaattcagtgtggtgaagagcgaaccggagtgcggacggtacggacgcgaaatctgttaaggcgggccgcaaagcaaacgctcgaaaaacgcaaaatttgtcgattgtccgttccgcttttttcttgtgtctgtgctttgcgtcgcgtgcctgcgtatgacgagggcattgcagagtcgggcatgtaaagccattccaaaacccaatactccagccaatccaagccagccagccagccaaccaagcaactgaactcaactcaaccgaatggaaacccaacccaacccaacagaacccaaccatcttgtggcaactacattattatttacttaagggacgaagtgcgaagagagcgcggaggaggatcaacgcttgatattatacttggatatatgtgtactacactggatactactggatatatatatatatatatactctacaccgcgatctatcgaatgggaatgcagcaatctcgccaaacagaacgaacacgcatcaatttatacattttatatatatataaagatatatatatctaagataacgaggaatcggcgtacaatgtaaccgcaattgccgcttcaaaccgacggcaatactaaatactggaatactgattgtatttttacgctagccacaatttgatataaactatatatcttccaatttttttgtacacctaatgttagttgaaatatgtgagcgagacgagcaaatttttgtagcaaactaaaagcgctaaatgtttacttttttatattattatatatataaatacttgataaacatatacctaatattagatctaaactaaactaactataaatcgcacacactcatacactcacacaaaaacacaatgcaataattgagttacatagttttaaacaaatgttaaaacattttgctgcaaccgtcggagatgtagtgtacaatttttagtttctcgtattatttttttttttatgtctgttttgtgtttaaattttttgtaactttttacaaagcgtaaactgtgtatgtatgtgctacattgatttttgtttaattatatcaagtttttatttaaaaaatcgaacaccaccttgcattctcctcatttgaacgtggcgctcacacttattacttatataggtcaaatacagcgggctctggtgatcaatccaatcagcagaaagtaatgaaaaacaccgaagttaatgtttaaacataaacacacaatgagaaaagagtcgtgtttccatatt

SEQ ID NO: 2075 - DNA, 5524 bp, DROSOPHILA
cgaaccggagtgcggacggtacggacgcgaaatctgttaaggcgggccgcaaagcaaacgctcgaaaaacgcaaaatttgtcgattgtccgttccgcttttttcttgtgtctgtgctttgcgtcgcgtgcctgcgtatcacaaaataaaaaacaaacaaaaacaaaacaagaatatgttttaatcaattcaaattaaaccaacaaattgcaagcaattggattcaggataaaaatttacaaaatttcaccacactaacgggaaaactgtgaaaacaatgcatttaatcaaagtaaagactaaactcgcgctaaaaatgcccgaattcgaaagaaactagcgaaaagcccaattcaaaaatcgcacaataaattgcaaagtccaaagcaacaacaacataggaacaaataaaacaagaagcaggcaacaaaagagagccaggcggagaggaaaacaacaacgaaaacagcaaaacgacggccccaaaatgttgtaccagctaagtaaagccactactagaatccggctcaaaaggcaaaaagccgttccacaacatcgctggctctggagtttagcatttctggcagcatttacactaaaggtaagcgagagggccaacaaaaacatggccaaaacacacaatagcggggacgttcgatgtgcagatctagccataagtatacccaataatcccggcctggacgatggggcctcctatcgactggactatagtccgcccttcggttatccggagcccaacacgacgattgcctcgcgggaaatcggcgatgagattcaattctcacgcgccctaccgggcaccaaatacaacttttggctgtactacacgaactttacgcaccacgattggctcacctggacggtgacgataacaacggctcccgatccgccgtcgaatctgtccgttcaggtgagaagcggcaagaatgccatcatcctatggtcaccgcccacccagggcagctatacggcgtttaagatcaaggtgctcggactgtcggaggcgtcgagcagctacaaccgcacctttcaggtgaacgacaatacattccagcacagcgtcaaggagctgacacccggagccacctaccaggtgcaggcatataccatctacgatggcaaggagtcggtggcctacactagtcgcaacttcaccacaaagcccaacactccggggaaattcatcgtctggttccgtaatgagacgacactgctggtcctgtggcagccgccatatccggcgggcatctacacgcactacaaggtatccatcgagccgccggatgccaacgatagtgtgctctatgtggaaaaggagggcgaaccgcccggaccggcgcaggctgccttcaagggtctggtgcccggaagggcgtacaacatatccgttcagacgatgtccgaggatgagatctcattgccgacgacggcgcaatatcgaacggtgccgttgcgtccgctgaacgtgacctttgaccgtgactttattacctccaattcgttccgtgtcctgtgggaggcgcccaaggggatatccgaatttgacaaataccaggtatcggtggccacaacacgacgccaatccacagtgccgcgcagcaatgaaccggtggcattctttgattttcgcgacatcgccgaaccgggcaagacgttcaatgtgatcgtgaagaccgtatccggcaaggttacctcgtggccagccaccggggatgtgacactgcgaccactgcccgttcgcaatttgcggagcatcaacgatgacaagacgaatactatgatcataacgtgggaagcggatccggccagcacgcaggatgagtatcgcattgtataccacgaactggagacatttaatggtgacaccagtaccctgaccacggatcggactcgattcacactggagagcctgctacccggtcgcaactactcattgtccgtccaggcggtatccaagaagatggaatcgaatgagactagcatctttgtggtcacccgaccctcgtcgcccatcatcgaggacttgaagagcatacggatgggtctgaacatcagttggaagagcgatgtcaactccaagcaggagcagtacgaggtgttgtactcgcgcaacggaaccagcgatttgcgaacccaaaagaccaaagagtcgcgtctggtgatcaagaatctgcagccaggtgctggctatgaactcaaggtgtttgcagttagtcacgatttgcgcagcgaaccacatgcctatttccaagcagtttatcccaatccaccacgcaacatgaccatcgaaacggtgaggagtaactcggtgctggtacactggtcaccgccggaaagcggtgaatttaccgagtactcgatacgctatcgcacggacagcgaacagcagtgggtgcgattgcccagcgttcggtccacggaggcggatatcaccgatatgaccaagggcgaaaagtacaccatccaggtgaacacggtcagctttggcgtagagagtccagtgccccaggaggtgaacacgacggtgccgccgaatccggtgtccaatatcattcaactggtggactcacggaacattacgttggagtggcccaagccagagggtcgcgtggaatcgtacattcttaagtggtggcccagcgataatcccggtcgtgtccagaccaagaatgtctccgagaacaagtcggccgacgatttgtcaacagtgcgtgtcctcatcggcgaactgatgcccggcgtgcagtacaagtttgacatccagacgacgtcgtatggaatcctgtcgggcatcaccagtctgtatccgcgcaccatgccgctcatccagtcggacgtggtggtggccaatggcgagaaggaggacgagagggacaccatcactctgagctacacacccacaccgcagtcgtcgtccaagttcgatatctatcgattctctctcggcgatgccgagatccgggacaaggagaagctggccaacgatacggatcgcaaggtgacgtttacgggtctggtgcctggtcgattgtacaacatcacagtttggactgtgagcggtggtgtggccagtttgcccatacaacgacaggatcgcctgtatccggaacccatcacacagctgcatgccaccaacatcacggatacggagatctcattgcgctgggatttgcccaagggcgagtacaatgacttcgatattgcctatctcacggcggacaatctattggcccagaatatgaccaccaggaatgagatcaccatcagtgacctgcgaccccacaggaactacaccttcaccgtggtggtacgttccggcactgaatcgtccgtgctgaggagcagttcaccattatccgctagctttacgaccaatgaagcggtgcccgggcgagttgaacgcttccatcccacggatgttcagcccagcgagatcaatttcgagtggtcgctgccatcgagtgaggcaaatggcgttattcgccagttctcgatagcctatacgaatatcaataatctcacggacgcaggcatgcaggactttgagtcggaggaggcattcggtgtgatcaagaatctaaagcccggcgagacctatgtgttcaagattcaggccaagactgccatcggtttcggtccggagcgggagtaccgtcaaacgatgccgatattagcgccaccacgtcctgccacccaagtggtgcccaccgaggtctatcgcagctcatcgaccatccagattcggtttaggaagaactacttctcggatcaaaacggccaggtgcgcatgtacacgatcatcgtggccgaggatgatgccaagaatgcatccggcctggagatgcccagctggctggatgtgcagtcgtacagcgtttggttgccctatcaggccatagatccgtactatccattcgagaatcgatccgtagaggacttcaccatcggtacggagaactgtgacaaccacaagatcggctactgcaacggaccactgaaatcgggaaccacctatcgggttaaggtgcgggcgttcaccggagcggataagttcacggataccgcctacagttttcccattcagacagatcaagacaacacctcactgattgtggccattacggtgccgttaactatcatcttggtgctcctggtgacacttttgttctacaaacgacgtcgcaacaattgccgtaagacgaccaaggattcgagggccaacgacaatatgtccctgccggatagcgtaatcgagcagaatcgccccattctgatcaagaactttgccgagcactatcgcctaatgtccgccgattcggacttccgtttcagcgaggaattcgaggaactgaagcacgttggccgggatcagccgtgcacttttgccgatctaccctgcaatcgtccgaaaaacaggttcaccaatatactgccctacgatcactcacgtttcaagcttcagccggtggacgatgatgagggtagtgattatatcaatgccaattacgtgccgggtcacaattcaccgcgcgagttcatcgtgacccagggaccattgcattcgacacgcgatgacttctggcgaatgtgctgggagagcaactcgcgggccatagtcatgctgaccaggtgctttgagaaggggcgcgagaagtgcgaccagtattggccaaatgatacggtgcccgtcttctacggtgacatcaaggtgcagatactcaacgacagtcactatgccgactgggtgatgaccgagttcatgctatgcagaggcagcgaacagcgcatcctgcgacacttccacttcaccacctggccggacttcggtgttcccaatccgccacagacactggtgcgctttgtgcgcgcattccgcgatcgaattggtgcggaacagcgacccattgtggtccattgtagcgccggtgtgggaaggtcgggcaccttcatcaccctggatcgcatcctgcaacagatcaacacgtctgactatgtggacatatttggcatagtatatgccatgcgcaaggagcgcgtttggatggtgcagacggagcagcagtatatctgcatccaccagtgcctgctggcggtgctcgaggggaaggagaacatcgtgggtcccgctcgcgagatgcacgacaacgagggctatgaaggccaacaagtgcagctggacgagaacggtgatgtggtggccaccattgagggtcacctgtcgcatcatgatctgcagcaggccgaggcggaggccattgacgatgagaatgcggcgatactccatgatgaccagcagccgctgaccagtagctttactggacaccacactcacatgccgcccaccacatcgatgagctcatttggcggcggaggtggaggccatacaaatgtggatgcaccggatagatgaatgacgagggcattgcagagtcgggcatgtaaagccattccaaaacccaatactccagccaatccaagccagccagccagccaaccaagcaact

SEQ ID NO: 2076 - protein, 1647 aa, DROSOPHILA
MLYQLSKATTRIRLKRQKAVPQHRWLWSLAFLAAFTLKVSERANKNMAKTHNSGDVRCADLAISIPNNPGLDDGASYRLDYSPPFGYPEPNTTIASREIGDEIQFSRALPGTKYNFWLYYTNFTHHDWLTWTVTITTAPDPPSNLSVQVRSGKNAIILWSPPTQGSYTAFKIKVLGLSEASSSYNRTFQVNDNTFQHSVKELTPGATYQVQAYTIYDGKESVAYTSRNFTTKPNTPGKFIVWFRNETTLLVLWQPPYPAGIYTHYKVSIEPPDANDSVLYVEKEGEPPGPAQAAFKGLVPGRAYNISVQTMSEDEISLPTTAQYRTVPLRPLNVTFDRDFITSNSFRVLWEAPKGISEFDKYQVSVATTRRQSTVPRSNEPVAFFDFRDIAEPGKTFNVIVKTVSGKVTSWPATGDVTLRPLPVRNLRSINDDKTNTMIITWEADPASTQDEYRIVYHELETFNGDTSTLTTDRTRFTLESLLPGRNYSLSVQAVSKKMESNETSIFVVTRPSSPIIEDLKSIRMGLNISWKSDVNSKQEQYEVLYSRNGTSDLRTQKTKESRLVIKNLQPGAGYELKVFAVSHDLRSEPHAYFQAVYPNPPRNMTIETVRSNSVLVHWSPPESGEFTEYSIRYRTDSEQQWVRLPSVRSTEADITDMTKGEKYTIQVNTVSFGVESPVPQEVNTTVPPNPVSNIIQLVDSRNITLEWPKPEGRVESYILKWWPSDNPGRVQTKNVSENKSADDLSTVRVLIGELMPGVQYKFDIQTTSYGILSGITSLYPRTMPLIQSDVVVANGEKEDERDTITLSYTPTPQSSSKFDIYRFSLGDAEIRDKEKLANDTDRKVTFTGLVPGRLYNITVWTVSGGVASLPIQRQDRLYPEPITQLHATNITDTEISLRWDLPKGEYNDFDIAYLTADNLLAQNMTTRNEITISDLRPHRNYTFTVVVRSGTESSVLRSSSPLSASFTTNEAVPGRVERFHPTDVQPSEINFEWSLPSSEANGVIRQFSIAYTNINNLTDAGMQDFESEEAFGVIKNLKPGETYVFKIQAKTAIGFGPEREYRQTMPILAPPRPATQVVPTEVYRSSSTIQIRFRKNYFSDQNGQVRMYTIIVAEDDAKNASGLEMPSWLDVQSYSVWLPYQAIDPYYPFENRSVEDFTIGTENCDNHKIGYCNGPLKSGTTYRVKVRAFTGADKFTDTAYSFPIQTDQDNTSLIVAITVPLTIILVLLVTLLFYKRRRNNCRKTTKDSRANDNMSLPDSVIEQNRPILIKNFAEHYRLMSADSDFRFSEEFEELKHVGRDQPCTFADLPCNRPKNRFTNILPYDHSRFKLQPVDDDEGSDYINANYVPGHNSPREFIVTQGPLHSTRDDFWRMCWESNSRAIVMLTRCFEKGREKCDQYWPNDTVPVFYGDIKVQILNDSHYADWVMTEFMLCRGSEQRILRHFHFTTWPDFGVPNPPQTLVRFVRAFRDRIGAEQRPIVVHCSAGVGRSGTFITLDRILQQINTSDYVDIFGIVYAMRKERVWMVQTEQQYICIHQCLLAVLEGKENIVGPAREMHDNEGYEGQQVQLDENGDVVATIEGHLSHHDLQQAEAEAIDDENAAILHDDQQPLTSSFTGHHTHMPPTTSMSSFGGGGGGHTNVDAPDR

SEQ ID NO: 2077 - DNA, 1910 bp, DROSOPHILA
taaaaaatacttttatcgaatccttttactcctcgagtagcaggtagttaaaatatcaatttgttcatgaatgcaaaatttgtgtctagctgattgtttataacaattgttattatagcttggtccatatagaaaaacatacttaattaaattcgagctggttatcagcgtgctatcagcatgtgtcatattttataataaattttcttttatgacctaatccttggttctttgaccggccttggcttttaaaccaatgtgttcgccccgtgcgtgataacttaccaaaatcaacggtctccattaagggcgccacatgggccaccggcttacttgcttgcagaggcacagacatcggtccctccaggctgcccacttctcgctccaggcactcaagcacatcgtccagggccaaggcgtctcccacggccaccgtgtgcttccagtgctcgtgccgcatgcgtagcacctgttcggagtgctcgcaccgccgctggaagtcgcgggcgtcgtgcaggcgacgaaggcacaggtcgcatatcacatcggtgaggttgtcgccgtgctcaaggcgcagggcgggagccagggccttcagctccaccgccagctggctagaggcgtcatagagactgtggtagagcggcggctgctccagcaggcagcagcggcagacgagcgggtggtgcggcagcagcgagagcataatacttagttgccgaaatccggacggacgatcgcggtttacactgtgagttcaatcaaggaagccccgatctatacggacgattggcatagttgttttccttgcgttgtagtcttagctcagtctacttgggttttcattttgaaatcggatctcattacggttttaccacaggcttaatacttcgtgcgtctgctcggatcgccggtcgctggacgtctgagggtgtggatccgcatctaatccactcctcagagcagcgatgtctatcaggaaaggcgaccggggcacaccgatagcccttggcttgagcgataagtcagaggcggcggaggcgtcggttcgtctgaggggtgggggcgcagagagacaacgggagattcgtctgaggagaggggtgtcgtagggctactatcgacggtcaacgtcaacgtttgctaattttcagttcgttccagctaattgattgccccggtggacatccgccgactgtccctgaaccgcgataaggcgttattatctcggcattatttgggtggtccacatccccgacacccccaccacctttccactaccatcctccgccgtgccctcttcgtcgagatttgaacagaccgaaatagatctgtactggaccttatcaccgtccgtagagatcatcattccgccgcgggtttcccagcactgttgttgtatttaccgcaaactttttggtgcttaaacggccaaaggagttggcgaaatgactcgctttctctgaaaatcacttaccaaagggactaagatcgggatgctggaaaagaatgccgatcaagcgttgcctataaggttttcgggcaacgcaactgtgtagaacgggggaagccttaacgaaaatcatttgttttcggcacgagcttataatgatcttaatcgctggatgcgatgtttctagactccaaagttcaggagccgatactaatttaataatttctaccgaaggcttgctttagtgtgacctacatcctccttttaatgaaagttcaatttattaggtggtgtaaatagcaaaaggcacccaaaataacaattaagtgattgattcagtcaattcagtcagttttttgtcattgttcactgatcctgcatgcaagacagtttctcgctgatctccagctgtgtttttatcattgtggaaagagtgatggccatgagcatatccctc

SEQ ID NO: 2078 - DNA, 702 bp, DROSOPHILA
cgatccgagcagacgcacgaagtattaagcctgtggtaaaaccgtaatgagatccgatttcaaaatgaaaacccaagtagactgagctaagactacaacgcaaggaaaacaactatgccaatcgtccgtatagatcggggcttccttgattgaactcacagtgtaaaccgcgatcgtccgtccggatttcggcaactaagtattatgctctcgctgctgccgcaccacccgctcgtctgccgctgctgcctgctggagcagccgccgctctaccacagtctctatgacgcctctagccagctggcggtggagctgaaggccctggctcccgccctgcgccttgagcacggcgacaacctcaccgatgtgatatgcgacctgtgccttcgtcgcctgcacgacgcccgcgacttccagcggcggtgcgagcactccgaacaggtgctacgcatgcggcacgagcactggaagcacacggtggccgtgggagacgccttggccctggacgatgtgcttgagtgcctggagcgagaagtgggcagcctggagggaccgatgtctgtgcctctgcaagcaagtaagccggtggcccatgtggcgcccttaatggagaccgttgattttgctagacacaaattttgcattcatgaacaaattgatattttaactacctgctactcgaggagtaaaaggattcgataa

SEQ ID NO: 2079 - protein, 165 aa, DROSOPHILA
MLSLLPHHPLVCRCCLLEQPPLYHSLYDASSQLAVELKALAPALRLEHGDNLTDVICDLCLRRLHDARDFQRRCEHSEQVLRMRHEHWKHTVAVGDALALDDVLECLEREVGSLEGPMSVPLQASKPVAHVAPLMETVDFARHKFCIHEQIDILTTCYSRSKRIR

SEQ ID NO: 2080 - DNA, 2966 bp, DROSOPHILA
gtgtgctggcttcctgttgatttcctgtcttgccagctgctcaagtgcgtgtgtgtgtgttgtatatgggttcctgttcctgagagctgagtaatgtcccccaactgaatattgcccagtgctgttggggaaaactcattccccgcccataaagtatttaagttttataaataattatgaatactaatatgcacatgtgggggacatatagaaaaattctgtagcttgtttttcatccgaagaaaacaaattttcgtgaatttccaatttccaatgaaattatttctcccattttatcggatagtgcattaacccttcggtttgatgtcccattacggtttttgtcattcgcttggcacagcaaattagcattcagccaacatatgtgctcagctgtcagtctggaaaagttcctccccgcattttccggctaagtgtgtcacattaaatgatacgcaacacttgacaccaaaatgggaaatagaagaaaactaaaacagaaaaagtcaaggaaatagaggaaaaaatagggggcaaagataaacgagttggtttattaatgaactgatggagggaaatcaatacaaaagcgaatttaaaccatataactatactgtagctactgtggtaactcgtcatttgataattgggaatgtaataataaagaaaatatatcctatttttcgactctaaacgaaaaaggttattttgctgtggaatgtatgcaaatataggactacaaaacggaagttgatttcaagtttctgcaggccgaggcaaagacaaagggttttaatggaaaggcaaaggaaaaaaggatgaaaaataaaagcttggatgaaaaaacaaatagcagttgactcaagacaaacaaacaagcagaggccaagtcaagaggtgacaggaaacaggaggcggaacgtgctcaagttcgggcggcacagatgaggtggacaagtaggcactacgttttcccccccagtccttgttaacacgtcaagccgagacattcgatttcgaaattacccccgctcgacaccacatcgaaatttctagttaaaaaaaactgagagcgacggatcgaaaaagagattgagatttgtttagccaaaatagcgaaattatgcccaagtccaagcagagatcgccaataaaagcggctacaaaaccgcttagcacaaagaagctacagtccaaagtcaaaagtgtcggtaagaccaagccgaaaatgcagcagaaatccgtaaagcaaccgctcaagaaacccatgagacgatctccgctgatgcgagccgccctccagcccaccattttgggcttggccaaggaaaagccggtgaaaaagtcgcgggtgaccttcaagaagtcacatcgtcggccgctggacgccatgcaatcccttgggatgtcccgcaggaccagactcatagacgccagtccccagagaaaggccaagggtacttcggtactgttcctgggtaaggattcaaggaccaccaagatgcccaagaaaatgaagccctcaagcgaaaagcctgcaagcgaaaaaaatcagttaccccggttaaaaagacggatggaattccgagtaatgacgaaagccgagactagggctaccgacggcgtgaacttcttctgcaatctcggcgtaaagatgcagccaccggtgactcggaaatatcaacagctgcaacaacgaggtgaagcaggatttgagggaagattggcaggtggagaaggtactagaccgggtgacggcgccttgcggagaccagtgagaacccagccatctggtctgtcatccctagtcggtaaagtcgccggtatcggtgcgttcgccaatgatgtgctggtcccgctgaccggccggttgcccatcatcgactttatctctaccaaagagttccagaatatgtctgccgcttcgaaatggaagccgcactcgcggaaaaatacccatttatagacgaccagagagagtggcgagtgcttaatgattagtgacgagtggatatgtatacaattggtaaaacgcttttgcggctttgtcatcctttaattttcaagtcttatttatccgtaaatttaatggatttttattattttcttccccaaatacaaaaaaaaaaaaaaatattataatacaagacaagtgcacatcgcacataataagaagacctagattgttcaatcttactattgtacttattcagattttagtctagcttatgttggccacattaggacacacatcgtcattcaaatgggatcgagtaacaaattccccaacaaagcatccagttaagatatttatcgtgtaacgctaaaacgatcaactaagatttaaagtctatatgttgagaaatcctgatcctatggataatggattcagtaatcaacgactctggcatttcggaacaaaaaaaaactacttccttgcacaacttcgaaacgaacgcgaaacatttacatttcgcgtttggcttattcggacataccagaaatacatattcccaaatgaaattgttggacaatatgaaatgggaatcggttttgggagatgggggacttggtcttggttcttgcgttttcgggctggatttcgggctgccttccgcgaagtcggcgggcagtaagcgaacttttgcgcaaattatctgcgtcgcgtttatttcgcacaaacaaatcgcaaaacttttgcagacggcgacccaacgacttggcctggctcccgaatctcccgaatcctcaaactccgtttttagccccctcagtgcctcccaatctcatcatcgtcctggtgcagttgtaaaagttttcccagcacaaaagttttggggccagaaatccttgctgccggcatcggttttttcgggggcatcttgcagcaatttacgggaagaaacttgagaagcaagtggaagatggaagccaggcaattgatgcagcacacccaggacaaccag

SEQ ID NO: 2081 - DNA, 966 bp, DROSOPHILA
gccgagacattcgatttcgaaattacccccgctcgacaccacatcgaaatttctagttaaaaaaaactgagagcgacggatcgaaaaagagattgagatttgtttagccaaaatagcgaaattatgcccaagtccaagcagagatcgccaataaaagcggctacaaaaccgcttagcacaaagaagctacagtccaaagtcaaaagtgtcggtaagaccaagccgaaaatgcagcagaaatccgtaaagcaaccgctcaagaaacccatgagacgatctccgctgatgcgagccgccctccagcccaccattttgggcttggccaaggaaaagccggtgaaaaagtcgcgggtgaccttcaagaagtcacatcgtcggccgctggacgccatgcaatcccttgggatgtcccgcaggaccagactcatagacgccagtccccagagaaaggccaagggtacttcggtactgttcctgggtaaggattcaaggaccaccaagatgcccaagaaaatgaagccctcaagcgaaaagcctgcaagcgaaaaaaatcagttaccccggttaaaaagacggatggaattccgagtaatgacgaaagccgagactagggctaccgacggcgtgaacttcttctgcaatctcggcgtaaagatgcagccaccggtgactcggaaatatcaacagctgcaacaacgaggtgaagcaggatttgagggaagattggcaggtggagaaggtactagaccgggtgacggcgccttgcggagaccagtgagaacccagccatctggtctgtcatccctagtcggtaaagtcgccggtatcggtgcgttcgccaatgatgtgctggtcccgctgaccggccggttgcccatcatcgactttatctctaccaaagagttccagaatatgtctgccgcttcgaaatggaagccgcactcgcggaaaaatacccatttatag

SEQ ID NO: 2082 - protein, 280 aa, DROSOPHILA
MPKSKQRSPIKAATKPLSTKKLQSKVKSVGKTKPKMQQKSVKQPLKKPMRRSPLMRAALQPTILGLAKEKPVKKSRVTFKKSHRRPLDAMQSLGMSRRTRLIDASPQRKAKGTSVLFLGKDSRTTKMPKKMKPSSEKPASEKNQLPRLKRRMEFRVMTKAETRATDGVNFFCNLGVKMQPPVTRKYQQLQQRGEAGFEGRLAGGEGTRPGDGALRRPVRTQPSGLSSLVGKVAGIGAFANDVLVPLTGRLPIIDFISTKEFQNMSAASKWKPHSRKNTHL

SEQ ID NO: 2083 - DNA, 8134 bp, DROSOPHILA
acgttttcaagggcaggcagctttgtaatttaattcaatttctatttaattgaaccaaaggcgtctttaatgtgcaactttttgatttatgagtccgcaacagcaagcggctgtcaagcaacttgttcatttcactccacttctttcttagtttccctctcttgccttcgggaaaatttaaaatcttactacgaaatttccatgcaaacgaaacattttccgccagccatgccgcattttgcgtttcctcttctttttcttcctgtttttttggcacaaatttaatttgatttgattttggccgctggacatggcaagccccaggcaatttgtcaaaaagttatatagctactgtgtatttttatgtgccggcatatttaatgacattttcctcattgcgactttttttttttgaattttcaaaaaatacaaaatacaatatcttctaaaatccatgagcaatgcccaattcttgaagtttttgatggccatgcaagtgatgtgccatttgttgagtaagtatatctgtgggcaaagatttctagcttaggcgtgtgcaatgtatgaggaattaatttgtgtaaaattggcaaacaatggaggagatgggccgagtaaaggtaagcaatttgtttgaattcgcttggtaaattaattgcacaggtttggaaaattaatggacacctgcagatccaccagtggcattgtatgttggccattgtgtggttattgaatttaagttccataagcattcaaatgaagatgctgtaattttgcaggaatatataaataagtatatggccgttattaaatgctgacccacattttgtgtactggcaaagccagttttttttttgttggttgttaaaaaccattttgattcttggcaaatctggttcaattaactgcagcccaaaatatcatttaatatcgcgatatgaccacaaaaatcatatataagaagtggcgagcctggtcaccacagcaaagcgactgaaagcgaagtctgataaagaacaatccttacaaaatacaaaaaaatatatatatttaaaaaatacaattgagcaaccaaacatggccaacattctaagttttaccatctttatggctgccattgctattggactggctttagccacaacaacgacagcaagtacaaggacacccatgcccacttccactgaaaaatccatggaaaaggacgatcccatggagtccttggaacgccgtgacaaacgccaattggtaagtgattattgaagcaaactagtcgtggcaaacttaggtgtagattttaggttaaatcaatcaatttttaaacatttacctttcctcttaatcgtattcccagaccgccaatggtggccagagcagcctggctggttccagcggcaactatcccgttttcttcgatggccttaatgtgaatcccccgctgcagccactgccgccactgcagcaacttcagcctctgcagccattgcagccgattacggtggtgactcctgtggcctccagttcgaatgcccagagccagcagccgcagtccggctggctgcctcagtttagccagaatcttccacttatcggaacctgggtgggtggcctgcccaatttgatcaacggcctgggactcggttcgctaaacggcggcttcggcactctgggcggcctgaatctgggcaacctgggactgggtgcagtggcgccggtggccgcggtgccgggccaactgctcggctcgtcacccaatccccagaccacatgcccactcacccagaagctcaactgccgctgtgagccgctcgttcagctgccgggcctgaagcccagttccaatccactgaggacgcagctggtgcagatcatgcggcagaatgcgcggaagaacgaggacggttcgcaggaggtgcgcgtaatcctgagcagcggacatgtgatctaccagcggacggccaaggatcgcggccagagtggctaccttgccatgagaattcagtcgggcaggtacttcaacatctactacagtgtcaacgagaaggagtacacggtgcgggcggatgtcaaggacacgccacccacctccgattttgacgacgagctgagtggtcagttctaaaaattggtcaaagggatttccctttacttacctacagtttttttttctatacttaatacttaactagccattttttatatgaaatgcacttaaacatatgtatttgaataagcatttaaacatatttatgcttatatgttaagcgtgcccgatttgaaccaagccgccgaaattcttcgtaaactccattaatcccttttttattcgcaactttttttttgaacttaaacaactacaaactagctgcgaaagaaataaactacaatgaaacacattttctgacgattgctccttggggacaaaaagtttagctacaaagacaaatattcatgggggtgcggcaataaacttgtttttattgccgaaaatgttgttaaagggttaacaaggtggcaacgggggggaggttgtttcttagcccttagcccaatttccaaaaaaggaactttcctaattactgaagccacttggaaaagagataaataaatatttactcaggcaatatttaagcaataattgttcgcttattattatcatttttcagtatcaactgataattattcgtgaataaaagttttaacaatggatatagaagtctttgtattttataactattaagtgctcaagtttgtatatatggcataaatagttataattttgtttgtttattagttgcagcaagccgacaccagttgaatctgctggtcatggaaaaacccacagagaaagaggccagcaaacaaacaaagagccaatgggcaaatggaaatcaagctgtaaaatgccatatccctatccccctctccaccgcccccccccccctcacatctgcgcttttccgcacttcacttttccccattttgcctttcaagttgcgctcagaagtttcgcaatgagccgggaaatggaaactggcaggatatgcccggaaaagcgaagtcgagtgcatggtggtagaggggggcgggttgcggtgcggtgtgttgtataattaaaagttcccttttgtgccgagattggtggatcctcccaaaaggcagctacattttgatccttgccagctgtgattagtcagtgaacagcaggagttctcaaatatagtaaagtagtcttcctttttttttgttaactggaggttaactggaagtttaatattaagtaaaggttaagttgtaagaaaaaaaaatagattacattttaaactgcacattaaaattaaattgtaaacataaaagaaaccaagaactattatttagtttattatttagcttttcagattgcttttgaaaagaagctaagttttggtgtttaaattgtgaaattgcgtgattttcgattatggggcccgatttgtggggtgcttaaagcactttcggtaaataatttacacagtttgtgcataaaagttgcttctgctggggccttttaaccggggcatggaagggggcgtgactggcaatgaaaccgcattgctcggtgcacacgaaacttttcacaaatcataaatggtcccaggacacacacacaaacacacacattgcagtttagttcagtgactacccagcttttcagccacccgtttcccccctgtatttaaaaagtcccccatttcagaatgaccacctccccccccccccccactccacctttgagggagcccctctcaaccaaccgcctcattggttatgccaattgcaaaaagtcctgggcaacaattgaaattgccggactcgttgatgagactttaagctctggctgcagttgaaaccccgcccctaattacgtattaccagatgactgccattaagtgttccacaaccccccgcccctcactccgcaccccttcccctgaccacagcccctcttttaaagctgaatcatcttaaagtgctggacaacaaggacgcaccattaaatccactgaatgctccacatttcggttggctttggtttgttgatgttgccagtgttgggtgggcatggcccaagggttggggggctgattcctgcgggttatataagcgttggcgctgcttctgcacccattagctgatacggcggatcagcgcgagggaggaggaatccaaacccaagcccaaagccaaagccagaccagtcgcaaccgcagacccacgtgagtgaccggcgacgactagacagtgcgagtccatgcttggatgcatacatacatacatacatatgtatgtgtgcgtctggatgtgacccacggcgatggcccctgaaaccaggatgcacctagcccagaagcaaccctcctgcgttcgccgcccctggctaccctcgaaaaactgccgcattgtgtggccagaaagcgaaaccgcgactgcaactggccctgcaatagaaaatgcactgcaaaaaaactgggagtatgtatttaaagtacttgataaagttggattattaaataacacaattaaatttaatattaatagagaagtagtattcttatcaagatgagaactaaggagctatgttaatcttgaaccaggtgtggccaactttatttttcacagtgtggcaaggataagcaaagcgaccagaaaagtataaccagcaaagatggacccatggagaacggatgcgaatcgagagcggaaagcgtgacagatagatgggttggagcagcaaggggttaatgaaggagggcatttagttcgtggtactgtggaaatgattaaaatgtattaggtgaaattaagttggccaaacagagaaatggggggggggggtttaaataaagaggccaaaatgaggttaaaacgttgcacaaagccaaatggagcctggctgggcgaaaacaaattcattaggctgcagtggcataaaaacatcatacccacaaaaagaagatgcacaacgaaaaccgaacaaagttgatttaaagtattataatctgcaacatttttgcgtatttcgagaatgcagcttgtttacccagtttgaagtcaagttagacttatctctggttaattggtttgctcgagagcagggcgcgcaaagctgctgggaaatcgtggaaaaatcgtaaagcttaataatgacactccccacacagcccctaccaccagtccagcattgggaattcacaagccactgtaaacaggtgcaaacgttgcgttgcacagcaatttcagcaacccctcttaacttttgcgcccagctttccacgttttcccttgttcaaatagttgtaaatgggcgaaaatgcaaacaaaaaacagtgatccacttgaaaggcaaaacaagaaaaatcattcaaagaggcaacaatgctgggaaaacaaaaggaaaacgaacgaaaacgaactgcaaagacagcgaccactaaataagtgaagtgcgtggacgactggacgagtggaaatgcggaaaagtgggaaagcggaaaagcgcgcgcaagaaatttgcaatgtggcgaataaataaaggatcaagcgattcccccattcaaattggcgaatattgggcggttaaatggagatacatgcacggatgtaaggcaactcgaaaaggtggcacaacaaatgaacgagataactggttaaccacgagttgtaaacgcgcaagctattgttattagtatgttaaaaagcggaataaactttttgtgtttaactacagctccatgaaatatgtatatgctatatgtaacaaacaataagcgagaaagtttgtcggcaacaaaaaaaaaagtaataaccattatgatattatgaatgcaattacattcttgacgactcgaaagaattttaaatgtataaattataacgagataaaaaaataaaatataaatcaaatttacttaacatttataacatttctagtgcaatatttactttcactatatgggttaataaaataaacttgcctgtttctcgatgttaaaccccattacttccaattggccaatcgattagaaattcaacaagagtttgccaagatctgagtcacttgaggtcgggcttcttatctggccatgtaggtatattcccgataagccctatcagcgacatcgaggcggaaacacaaaaagaccatcaaatcgaccactttcacagttgaaagtcagagctgctgaagaacggacaagaaaatggcaggtaaataggtcgtaaggccaagatgccataacaaaaaatgaaaacatttaactaggtggatgatataaaacagttaccaatctttaaagtacttaatcagttgaaactcaaaataaattaattcaattttggaaactaacttggcctagccaaataaactagtttacttgccatgaacaacagaattaaagagttataccattcggtgtgctgttaaataatcgtttcatttttccattatcccccagaccacagatggatgcacttcagcaacggcagcgtgccgccgaatgccgtggtggctggtcacgattcggacggggacaccatctacgtgggccgtgccttcttctccaacgacatgctgccggcgaaggtgattcccaacaagggcaaggcctacgtggcgtatgcgcgcgaggagcacgagctggagaactacgaggtgctttccggctacaactacgagtggctgtcggcggagaacggggaggtgccgccgggcgccgtcaaagttggtcggaatgtggacggcgagtatttgtatgcgggcaggggttatcatgccggcagcttaaccatgggcaaggtgcatccatcccacggctgcctgtatattccctacgattccgatgaggttaagatctttgcctacgaggtgctgtgccagccggaacgttggatcgacaccaccgcaacaaatattccggatggagctctggttgctgggcacgattccaacggggacaccatctacgtgggcagggtgttccgcaatggtgatctgctgccagccaaagtggtgccggcgaaggggaaagcctatgccgcctatgcccaggcggagcacgagctcaccgacgtccaggtgctgacgggatccggattccgttgggttccggcctcgcacggaaatgtggctcccggagccctgtcctccggtccgaatgtcgacggggagcccctctacgtcggcagggccatctactgcgacagcttgagtgtgggcaagatccatccctcgcacggctgcatctacatcccattcggtggcgaggaggtgcgtctggagaattacgaggttctggtgaggatctagacggacagctttgcctttattccattttttttttaataaatctattttttacacacacaacagaagtatacagattaaagtataaatttaagtttaattcgatcgacatcgagcaacgtaactgataaaatttatggtaatgcacccagtaattctaaaaaaaaagtacccctttcatagagttttggtgataatagttcaaagtggttgtcatagaaatttcgaggtattgcggatgtgaggaatttcttctatatgcgggccttatgttatcacatcggttatcaattagcaacaatcaattgattagttggccataaatttgcgtcaacttgtaacataattaaccatttgccttcgcccactgacttaacaaacactgcatcgtaaaactcagacagatatcgcagttatcagaatgtgtacatatatgcactcgatgctttataactcgacctttcgtctgccgaggtaaaaagttataggtatcgaaactctttgtaactttctttgtatattgaaaagtttattaaaacgtttcataaagttaaagtcaattcattagtggcgggcgtagcgttttatttcatagcttattaatgtgcacacgttgtaatcaatacatgttttaagcacttatttgacagcacaaagtttcccatggaaatactttttttcgcaatttattttataggaaagttgctaaaaggccttaatcttaacactatcattggcgccacctatgagatgattatctgcactaaccgtggcgccacctatgacgagctg

SEQ ID NO: 2084 - DNA, 2070 bp, DROSOPHILA
cgaagtctgataaagaacaatccttacaaaatacaaaaaaatatatatatttaaaaaatacaattgagcaaccaaacatggccaacattctaagttttaccatctttatggctgccattgctattggactggctttagccacaacaacgacagcaagtacaaggacacccatgcccacttccactgaaaaatccatggaaaaggacgatcccatggagtccttggaacgccgtgacaaacgccaattgaccgccaatggtggccagagcagcctggctggttccagcggcaactatcccgttttcttcgatggccttaatgtgaatcccccgctgcagccactgccgccactgcagcaacttcagcctctgcagccattgcagccgattacggtggtgactcctgtggcctccagttcgaatgcccagagccagcagccgcagtccggctggctgcctcagtttagccagaatcttccacttatcggaacctgggtgggtggcctgcccaatttgatcaacggcctgggactcggttcgctaaacggcggcttcggcactctgggcggcctgaatctgggcaacctgggactgggtgcagtggcgccggtggccgcggtgccgggccaactgctcggctcgtcacccaatccccagaccacatgcccactcacccagaagctcaactgccgctttgaaaccccgcccctaattacgtattaccagatgactgccattaagtgttccacaaccccccgcccctcactccgcaccccttcccctgaccacagcccctcttttaaagctgaatcatcttaaagtgctggacaacaaggacgcaccattaaatccactgaatgctccacatttcggttggctttggtttgttgatgttgccagtgttgggtgggcatggcccaagggttggggggctgattcctgcgggttatataagcgttggcgctgcttctgcacccattagctgatacggcggatcagcgcgagggaggaggaatccaaacccaagcccaaagccaaagccagaccagtcgcaaccgcagacccacgtgagtgaccggcgacgactagacagtgcgagtccatgcttggatgcatacatacatacatacatatgtatgtgtgcgtctggatgtgacccacggcgatggcccctgaaaccaggatgcacctagcccagaagcaaccctcctgcgttcgccgcccctggctaccctcgaaaaactgccgcattgtgtggccagaaagcgaaaccgcgactgcaactggccctgcaatagaaaatgcactgcaaaaaaactgggagtatgtatttaaagtacttgataaagttggattattaaataacacaattaaatttaatattaatagagaagtatcagagctgctgaagaacggacaagaaaatggcagaccacagatggatgcacttcagcaacggcagcgtgccgccgaatgccgtggtggctggtcacgattcggacggggacaccatctacgtgggccgtgccttcttctccaacgacatgctgccggcgaaggtgattcccaacaagggcaaggcctacgtggcgtatgcgcgcgaggagcacgagctggagaactacgaggtgctttccggctacaactacgagtggctgtcggcggagaacggggaggtgccgccgggcgccgtcaaagttggtcggaatgtggacggcgagtatttgtatgcgggcaggggttatcatgccggcagcttaaccatgggcaaggtgcatccatcccacggctgcctgtatattccctacgattccgatgaggttaagatctttgcctacgaggtgctgtgccagccggaacgttggatcgacaccaccgcaacaaatattccggatggagctctggttgctgggcacgattccaacggggacaccatctacgtgggcagggtgttccgcaatggtgatctgctgccagccaaagtggtgccggcgaaggggaaagcctatgccgcctatgcccaggcggagcacgagctcaccgacgtccaggtgctgacgggatccggatt

SEQ ID NO: 2085 - protein, 246 aa, DROSOPHILA
MANILSFTIFMAAIAIGLALATTTTASTRTPMPTSTEKSMEKDDPMESLERRDKRQLTANGGQSSLAGSSGNYPVFFDGLNVNPPLQPLPPLQQLQPLQPLQPITVVTPVASSSNAQSQQPQSGWLPQFSQNLPLIGTWVGGLPNLINGLGLGSLNGGFGTLGGLNLGNLGLGAVAPVAAVPGQLLGSSPNPQTTCPLTQKLNCRFETPPLITYYQMTAIKCSTTPRPSLRTPSPDHSPSFKAESS

SEQ ID NO: 2086 - DNA, 7650 bp, DROSOPHILA
aagccaatacaatgcaacacagctgaatataaatcgttcattggaattcgtcgcactcagaaaccctcgatcattcgaaatttatttaacaatgtgcggagccttcgagttcaggaagcctggtgcggaataaacaaaagcgaagccagcctgcactacattctacggatcggtccgcctttatggggtccctttataaggcgatctgccagtcaaactggaatataattggtatgcacttgccggccagggcgaacactcccgagggactgcgtccgctgtccagccggcgaggacaagacaacagcatcgcatttccccgccgctctgtcaaataattacaagagtcgagataaattatataccaccagagatcgggcgaaacaatatgatatctgcagcatcaatagccacagacatagtcatgggaatttgtggggctctcggctatgccgaaaataaaaaattatgaaaagcgaaaaagatgagctaagcgtgcatgccatttagcggaaaaacccgaaaacaaatcgcaaagttcagcagatgaacaatgtctgccaattctgggtactaaatcgttaggtggagtgggaaaaccgcaaactccgcaaactccgcagctccacagctccatctccatgcaagtggcagacttgctccttaacttcggctgagaagcagccaccgttagttacataacagcccagcaggcctttgtgaagaggagatgcactgcagccacttgactccgaaaaacaatgctagtgcgagtgcgagtgaaataatgattcgcaagtttccgttggctcccagttgggttccatgggaagcgttaggaacgcttcactatatcacgctgaaccagaaaccacacacttattacttattaatggggggcaggaaacactttcggttcttgggcgcggaggaaaccactccgaattaccacccgctgcttgccacgtcgaattaactggcattccaatgggcctggcttatgagtataacagttctttgccttccacagagcactccggtgggaaccactatattccgtaatatccaggcgttggacaaggacgctggtgtcaacggactggtcgagtacttcatagccgagggcagtcccaactccaccaacgtagagaagtacagtgcggacgggtacggcacattcgccatatcgtttccacaccagggtcaagtgagtacccgaaccaaatcctctcacatatctgggttagatacagtttagcctctcctttcctcaggttacggtggccaagactctggactttgagaagattcaaacgtactacctaaccattgtggcctcggtaagtgcagcgctaataatttaaatactacaaagggttaattaagccgtctgcttcggcattaccacaattaaagtttgcgaagaaaaggcccgcaattaagtgcttacttttaccgtcggcatttcatgtggcttcagtacctttcactcgacaactggagtcgctatagaaggggaacgaccatatgtttgctccctattcgtaataaattatatatatgttttctctccaggatcgagcacggaatacggcggatcgtctttcctcgaccacaacgttgacggtcaatatagccgattccaacgacctggacccatcgttcatctatagcggctgcgtttcgcttgacggcgcctgcataaatccggagtactccgcatccgtgccggctggctccctgctgggtgtgctcacggtgctgcccgagcggattcaggcagtggatctggacaccattaactcgccaatacgctacagcttcgccagcggcatgcccggcaactacgccgactacttccagatcgatgagagcacaggggtgctgaagcagacgaaagctgtggacacttcgacggcgaagaagtatgacatcatagtgaaagcggaggaggtttcgcccggaccgcagcgattcacaacggccaagctggaaatcttcgtgaagccagtggacgccaatccgcccgtgatatcgtcatcccaagcggagggctacgtggacgagaactcgcccattggcaccagggtcttggacgcgcacggtaacccgatatcgttcatgaccaccgacgccgacctgagcgacagcgatccgaagccagactacatatacgagctgacgacgccgtccttcaacgtgactggcgatggcatcttggtggtgaacgaggagaacctcgatcgcgaccctccggcaccgggtcgttttaagtttcaggtggtggccagggaaccgcggaccaacgcggccagtgctccgctgagtctcacggtccacctgcgggatgtgaacgacaatgcccccaagctggccatggtggcgcccatttccataacagccggggatcagagcgagagccggctggtcacccaggtcacggccactgacaacgacgagggtcccaatgccgtggtgacctattccatctaccatgtgtccaacaacggcatccagaagttcaccatcaacgcgacgacgggtgagatcaggacccagggtcgcctgctggccggggagcagtacagcatcacagttcaggccaccgacatcggaggactctcctcccaggcgatcgttgaggtgagcgtgaccccgggaccgaacactaagccaccgcgcttccagaagcccatctacgaggtgcaggtcagtgagggagcggagatcaactccacggtcacagtggtccacgccgaggatcccgagaacgatgcagtggtctactccatcatatcgggcaatgatctacgccagttcgccgtcggtcaggagagtggcgtcatcatagtgataaggaagctggatcgcgagagcctgacccgctaccaactgatcctgaaggcggaggataccggaggtctgtcgagcagcgccaccgtgaacatcaaggtgacggacatcaatgataagaacccggagttcgaggcctccaccttgccgtacgtcttccaagtggaggagggcaaagcgcaagcctcggtgggagtggttcacgccaccgatgccgacgaaggtatcaatgccgagatcacctactccattcccaccgacatacccttcaccatcaatgccacgtcgggcgagattctcaccgccaaggaactggactacgagcagttgaacgagtacaagttcgtggtgaccgccaaggatggagctccggatgcgcgactgggcactgccagtgttacggtgatggtgctcgaccttccggacgaggtgcccaagttcagtgatgcccgcattgatgtccacattccggagaacgaggagaacttcctggtggccactgtgcaagccttcgatcccgactccatgccggagatcacctatgtgctccgaaagggcaacgcagagctcttcaaggtttcggagaagagcggagaggtgaggaccattaagggattggactatgaaagccagaagcagcaccagctgaccattggaaccatagagaacgatggcaatggaccaggcgacacaatcctgctggtggttgatgtggaggatcgcaacgatctgcctccgcggtttataacagttcccgatccggtgaccgtgaacgacgaccagggcataggaaccattatagccactctgcccgcgatcgatggcgatggcacttcgccgggaaatgtggtgcgctacgagatcgtgggtcgcggcaaggcgcccaaatacttccaagtggatcccgacaccggagcggtgcgcataagagatgaactgcgcaaagaggaggacacggagtaccaggtggacatacgggcatacgacctgggggaaccacagctgagctcggtggctccactgcgcgtcgacgtacaccatcttttgtccagcggcaataatgaaatcaaattggacaataagctggaaagtggaacgggcatgagcagtgaaagtataggcttggccttcagcgacgacagctacaccaccagtgtgccggagtcaatggaagccaatagcacccttaagctcattcagattgtgaattccaagacgtctggcgacgggccgccggcattcaggtgtgaattcgtcagtggcaacggggggggcatcttcaatctgagctccgccgatcatggctgtaacttactgctcatccaacctttggacttcgagaacaagagctcgtacagcctccagttgcgcctgacatcgcatcgctacttcgtcaatcccctgaaggacaccaccagcgtggagatcatagtccaggacgagaacgacaacgcaccggagttcgagtttaacaggctgcgcggccagcaagacaccttctacacggtggtgacggaggaaatggatgttgacacaaccattttgcaggtgcgagccacagatcgtgattcggggaaatttggaaccgttcgctacactctctacgacgacgatgaaaaccgggttaacatggtgagaaatctatactctacattaggcaatgaatttttttttttgataattatcatatgatgtttccagcccaccagcttcttcatgatgtccgaagacactggagttctacgaactgccaagcacttcaagaacgaaaacgactttccactcacctttttggtggaagcccgtgatagcgatggccaggagcagggatcccatcgcacgagggccaggatagtggtcaataagctggcggacatcaaccgcatggcgctatccttcccgaatgcagcgcccagcgatctccgcaactactacacggagctggaggagctgctggacaagaagaccggcctggtcagcggcattgaacggatgagcagccagaagtacctggccaagaacggatcggtgatcgagaacccggctgctacggacatatggttctacctcatcgatcccaagacggagcagctcgtcagccgtaaggacagcattgtggagaccactttactggaaccggctgcgcgatcggagctgaacatagccctgccgcgagccacagccgagaatatatcgtttcccctggagaggaaggagcacgttcacaaggtgggcaactaattctactactactttttcttaggatatactatatatagctttggcacttccaggtcaaagccgccgtagccatcgacaacgaagtcttccccttcactctgattgccatatcacttgttatactcatcctgggcacgattggcatcatttacatatgcatctcttggtcaaagtgagtggataacatgtaacctctatttacttttacttaaatctttgcatacacacttgctctttataggtacaagaacttcaagcagcggatgcgccagtactcctccacgaatcctccccgctacgatcccgtgatcgttaaccagcaggcctcgagtgccagcgaaaccatagccaacatgaaggagtacgagacccagatgctggccatggcagtgccaccggatgtggacgatgatctgcagctggactttagtgccaagaaccatgccttctcgctggacaatgttagctacataacgcacaaggagaacaccaacggcggtggccagtccagtccctcccactcggatgccaccacggccacgattgccactctgcgccgccataagaatctcaataacgccagcatgaacaacaatctggccatcaacaacaggcagaacaccttcaatagaaccctggagatgaacacccgcaacaacgccaatccgctggcatctccgccgaacggagccctctcgggcaccctgactttgggccgcatcaagcaccagaacagcaaccactaccagaacggcgcctacaacatagacccaactgggcccaacaacatggcccatgccaagaacaatgcctacagcaccatgggcaggcggggaaacaccttcggcgacgtgggattgctcaatggcaacggggagctgatgaacgccacgctgggtcggaatggccagctcaacaatcgcctgtacggcggagaggtgcccatcaccaacccgctgtttcaaaggtatgcatagcttacttcctagtttataactataactataattggtaacaccctctatcctgcagatccaattccgatcacaaccacctgagcagcaccaatgagaacgtgtccttcgggaagagggactatggccaaatagggttctcatatctaaacgatctggataggtcggaggtggaaacaactacggaactgtagggaatacactaggaatattctggtttcgatacattttacagacttgttaatatacttagctgccaatttgtaattttaatagtgcattttaacaacgagagcggttgccatcaatttatgatcatagcacgagcaatctgtaaatacctgagcggagatgcagaatggaggaactgataactaatatatttaaccgtgcttaagatcaaataattacagtcattatatttaagcgaacgcagagtgcatacttcccacacacttacgaaactgccagacgcagtcgttttctttaggaattgttgaaaacatgtacatgcattaatataaactgtttaagttgtataaactatggaaagccaataaatgtaaataaatagatttttaacttaagagtgcctatttattaggggttccttacacccgaatgcaccaaaaactacaatggctgagtacaaaaccaactgacattttcgtgtcggagatttatatctaggtttctatgattgcaacagtaaacatttaatctacgagggcttaaaaattagtttaagatctgtttggggcgtactccctgggcttcacgtcgcccttgttgtcttcgccatgtgcggtggtcacgttgagggcttgactcgtatacagcttatccgaggggtcctcctcctccttttttatggtgctaatcaagctggtggactgggtctcctcctcctcggtctccgattcgcatttctgtgaagtaaagggaattgcaagcatgagaagaagagatactttgggcttttttctggatttgggttagtatggtgggttattacgtttactacgctattagactagttcatgagggcatcgaaccagggcatgtgttctatgccctcgagcaagcgcaacacttcgttcacattgctctccgactcgtcgatatcaaagttaagttcgttattgtcttgcacggatggttcttctaactcaaagttgtctgcgatgaggttatcttgagcctgactttcagctggaccaactgagtcgttggacccgccatcgccctcctcctcgaggcctaagtctacaggatcgctctccacaccgtcatcttcaatggctaagcccaggtcactgtccatgtccaggaacatggagtaatcatcgtcgagggagtttgccagatcgtcaactccgtcaaggtcaaaatcgaatataccattggcaaaatccaagaggtcatccccctccggctgcggctcattccgtgggtcttctccgacaaagttatcgagaccacggcctgctgcgaaaatactttctaccggcggagtgctgggaacttcataaaactgggggatgagaggtcggcaatttattcagggtcgatcacaaagggc

SEQ ID NO: 2087 - DNA, 5080 bp, DROSOPHILA
atgagtataacagttctttgccttccacagagcactccggtgggaaccactatattccgtaatatccaggcgttggacaaggacgctggtgtcaacggactggtcgagtacttcatagccgagggcagtcccaactccaccaacgtagagaagtacagtgcggacgggtacggcacattcgccatatcgtttccacaccagggtcaagttacggtggccaagactctggactttgagaagattcaaacgtactacctaaccattgtggcctcggatcgagcacggaatacggcggatcgtctttcctcgaccacaacgttgacggtcaatatagccgattccaacgacctggacccatcgttcatctatagcggctgcgtttcgcttgacggcgcctgcataaatccggagtactccgcatccgtgccggctggctccctgctgggtgtgctcacggtgctgcccgagcggattcaggcagtggatctggacaccattaactcgccaatacgctacagcttcgccagcggcatgcccggcaactacgccgactacttccagatcgatgagagcacaggggtgctgaagcagacgaaagctgtggacacttcgacggcgaagaagtatgacatcatagtgaaagcggaggaggtttcgcccggaccgcagcgattcacaacggccaagctggaaatcttcgtgaagccagtggacgccaatccgcccgtgatatcgtcatcccaagcggagggctacgtggacgagaactcgcccattggcaccagggtcttggacgcgcacggtaacccgatatcgttcatgaccaccgacgccgacctgagcgacagcgatccgaagccagactacatatacgagctgacgacgccgtccttcaacgtgactggcgatggcatcttggtggtgaacgaggagaacctcgatcgcgaccctccggcaccgggtcgttttaagtttcaggtggtggccagggaaccgcggaccaacgcggccagtgctccgctgagtctcacggtccacctgcgggatgtgaacgacaatgcccccaagctggccatggtggcgcccatttccataacagccggggatcagagcgagagccggctggtcacccaggtcacggccactgacaacgacgagggtcccaatgccgtggtgacctattccatctaccatgtgtccaacaacggcatccagaagttcaccatcaacgcgacgacgggtgagatcaggacccagggtcgcctgctggccggggagcagtacagcatcacagttcaggccaccgacatcggaggactctcctcccaggcgatcgttgaggtgagcgtgaccccgggaccgaacactaagccaccgcgcttccagaagcccatctacgaggtgcaggtcagtgagggagcggagatcaactccacggtcacagtggtccacgccgaggatcccgagaacgatgcagtggtctactccatcatatcgggcaatgatctacgccagttcgccgtcggtcaggagagtggcgtcatcatagtgataaggaagctggatcgcgagagcctgacccgctaccaactgatcctgaaggcggaggataccggaggtctgtcgagcagcgccaccgtgaacatcaaggtgacggacatcaatgataagaacccggagttcgaggcctccaccttgccgtacgtcttccaagtggaggagggcaaagcgcaagcctcggtgggagtggttcacgccaccgatgccgacgaaggtatcaatgccgagatcacctactccattcccaccgacatacccttcaccatcaatgccacgtcgggcgagattctcaccgccaaggaactggactacgagcagttgaacgagtacaagttcgtggtgaccgccaaggatggagctccggatgcgcgactgggcactgccagtgttacggtgatggtgctcgaccttccggacgaggtgcccaagttcagtgatgcccgcattgatgtccacattccggagaacgaggagaacttcctggtggccactgtgcaagccttcgatcccgactccatgccggagatcacctatgtgctccgaaagggcaacgcagagctcttcaaggtttcggagaagagcggagaggtgaggaccattaagggattggactatgaaagccagaagcagcaccagctgaccattggaaccatagagaacgatggcaatggaccaggcgacacaatcctgctggtggttgatgtggaggatcgcaacgatctgcctccgcggtttataacagttcccgatccggtgaccgtgaacgacgaccagggcataggaaccattatagccactctgcccgcgatcgatggcgatggcacttcgccgggaaatgtggtgcgctacgagatcgtgggtcgcggcaaggcgcccaaatacttccaagtggatcccgacaccggagcggtgcgcataagagatgaactgcgcaaagaggaggacacggagtaccaggtggacatacgggcatacgacctgggggaaccacagctgagctcggtggctccactgcgcgtcgacgtacaccatcttttgtccagcggcaataatgaaatcaaattggacaataagctggaaagtggaacgggcatgagcagtgaaagtataggcttggccttcagcgacgacagctacaccaccagtgtgccggagtcaatggaagccaatagcacccttaagctcattcagattgtgaattccaagacgtctggcgacgggccgccggcattcaggtgtgaattcgtcagtggcaacggggggggcatcttcaatctgagctccgccgatcatggctgtaacttactgctcatccaacctttggacttcgagaacaagagctcgtacagcctccagttgcgcctgacatcgcatcgctacttcgtcaatcccctgaaggacaccaccagcgtggagatcatagtccaggacgagaacgacaacgcaccggagttcgagtttaacaggctgcgcggccagcaagacaccttctacacggtggtgacggaggaaatggatgttgacacaaccattttgcaggtgcgagccacagatcgtgattcggggaaatttggaaccgttcgctacactctctacgacgacgatgaaaaccgggttaacatgcccaccagcttcttcatgatgtccgaagacactggagttctacgaactgccaagcacttcaagaacgaaaacgactttccactcacctttttggtggaagcccgtgatagcgatggccaggagcagggatcccatcgcacgagggccaggatagtggtcaataagctggcggacatcaaccgcatggcgctatccttcccgaatgcagcgcccagcgatctccgcaactactacacggagctggaggagctgctggacaagaagaccggcctggtcagcggcattgaacggatgagcagccagaagtacctggccaagaacggatcggtgatcgagaacccggctgctacggacatatggttctacctcatcgatcccaagacggagcagctcgtcagccgtaaggacagcattgtggagaccactttactggaaccggctgcgcgatcggagctgaacatagccctgccgcgagccacagccgagaatatatcgtttcccctggagaggaaggagcacgttcacaaggtcaaagccgccgtagccatcgacaacgaagtcttccccttcactctgattgccatatcacttgttatactcatcctgggcacgattggcatcatttacatatgcatctcttggtcaaagtacaagaacttcaagcagcggatgcgccagtactcctccacgaatcctccccgctacgatcccgtgatcgttaaccagcaggcctcgagtgccagcgaaaccatagccaacatgaaggagtacgagacccagatgctggccatggcagtgccaccggatgtggacgatgatctgcagctggactttagtgccaagaaccatgccttctcgctggacaatgttagctacataacgcacaaggagaacaccaacggcggtggccagtccagtccctcccactcggatgccaccacggccacgattgccactctgcgccgccataagaatctcaataacgccagcatgaacaacaatctggccatcaacaacaggcagaacaccttcaatagaaccctggagatgaacacccgcaacaacgccaatccgctggcatctccgccgaacggagccctctcgggcaccctgactttgggccgcatcaagcaccagaacagcaaccactaccagaacggcgcctacaacatagacccaactgggcccaacaacatggcccatgccaagaacaatgcctacagcaccatgggcaggcggggaaacaccttcggcgacgtgggattgctcaatggcaacggggagctgatgaacgccacgctgggtcggaatggccagctcaacaatcgcctgtacggcggagaggtgcccatcaccaacccgctgtttcaaagatccaattccgatcacaaccacctgagcagcaccaatgagaacgtgtccttcgggaagagggactatggccaaatagggttctcatatctaaacgatctggataggtcggaggtggaaacaactacggaactgtagggaatacactaggaatattctggtttcgatacattttacagacttgttaatatacttagctgccaatttgtaattttaatagtgcattttaacaacgagagcggttgccatcaatttatgatcatagcacgagcaatctgtaaatacctgagcggagatgcagaatggaggaactgataactaatatatttaaccgtgcttaagatcaaataattacagtcattatatttaagcgaacgcagagtgcatacttcccacacacttacgaaactgccagacgcagtcgttttctttaggaattgttgaaaacatgtacatgcattaatataaactgtttaagttgtataaactatggaaagccaataaatgtaaataaatagatttttaa

SEQ ID NO: 2088 - protein, 1563 aa, DROSOPHILA
MSITVLCLPQSTPVGTTIFRNIQALDKDAGVNGLVEYFIAEGSPNSTNVEKYSADGYGTFAISFPHQGQVTVAKTLDFEKIQTYYLTIVASDRARNTADRLSSTTTLTVNIADSNDLDPSFIYSGCVSLDGACINPEYSASVPAGSLLGVLTVLPERIQAVDLDTINSPIRYSFASGMPGNYADYFQIDESTGVLKQTKAVDTSTAKKYDIIVKAEEVSPGPQRFTTAKLEIFVKPVDANPPVISSSQAEGYVDENSPIGTRVLDAHGNPISFMTTDADLSDSDPKPDYIYELTTPSFNVTGDGILVVNEENLDRDPPAPGRFKFQVVAREPRTNAASAPLSLTVHLRDVNDNAPKLAMVAPISITAGDQSESRLVTQVTATDNDEGPNAVVTYSIYHVSNNGIQKFTINATTGEIRTQGRLLAGEQYSITVQATDIGGLSSQAIVEVSVTPGPNTKPPRFQKPIYEVQVSEGAEINSTVTVVHAEDPENDAVVYSIISGNDLRQFAVGQESGVIIVIRKLDRESLTRYQLILKAEDTGGLSSSATVNIKVTDINDKNPEFEASTLPYVFQVEEGKAQASVGVVHATDADEGINAEITYSIPTDIPFTINATSGEILTAKELDYEQLNEYKFVVTAKDGAPDARLGTASVTVMVLDLPDEVPKFSDARIDVHIPENEENFLVATVQAFDPDSMPEITYVLRKGNAELFKVSEKSGEVRTIKGLDYESQKQHQLTIGTIENDGNGPGDTILLVVDVEDRNDLPPRFITVPDPVTVNDDQGIGTIIATLPAIDGDGTSPGNVVRYEIVGRGKAPKYFQVDPDTGAVRIRDELRKEEDTEYQVDIRAYDLGEPQLSSVAPLRVDVHHLLSSGNNEIKLDNKLESGTGMSSESIGLAFSDDSYTTSVPESMEANSTLKLIQIVNSKTSGDGPPAFRCEFVSGNGGGIFNLSSADHGCNLLLIQPLDFENKSSYSLQLRLTSHRYFVNPLKDTTSVEIIVQDENDNAPEFEFNRLRGQQDTFYTVVTEEMDVDTTILQVRATDRDSGKFGTVRYTLYDDDENRVNMPTSFFMMSEDTGVLRTAKHFKNENDFPLTFLVEARDSDGQEQGSHRTRARIVVNKLADINRMALSFPNAAPSDLRNYYTELEELLDKKTGLVSGIERMSSQKYLAKNGSVIENPAATDIWFYLIDPKTEQLVSRKDSIVETTLLEPAARSELNIALPRATAENISFPLERKEHVHKVKAAVAIDNEVFPFTLIAISLVILILGTIGIIYICISWSKYKNFKQRMRQYSSTNPPRYDPVIVNQQASSASETIANMKEYETQMLAMAVPPDVDDDLQLDFSAKNHAFSLDNVSYITHKENTNGGGQSSPSHSDATTATIATLRRHKNLNNASMNNNLAINNRQNTFNRTLEMNTRNNANPLASPPNGALSGTLTLGRIKHQNSNHYQNGAYNIDPTGPNNMAHAKNNAYSTMGRRGNTFGDVGLLNGNGELMNATLGRNGQLNNRLYGGEVPITNPLFQRSNSDHNHLSSTNENVSFGKRDYGQIGFSYLNDLDRSEVETTTEL

SEQ ID NO: 2089 - DNA, 2518 bp, DROSOPHILA
cggcatttcctgataataacaggaaaattttacttgcgctttttcttacaatcttgctgtggatcgaccctttcttggcccctctgccaatcgcttcttcttgaaatacgatctgtgttcacatattttctttttgtggtacacacacatatataagagcacgcgtgcaaataaaccgaggctttgggcgataagccctgaattgggttttataagaacctggagtaaatattgggcagagtccttagttaaaagtacgtgctatcatcgttgtagaggtgaacatacaatattatggaaatttttaagaattagcattcttggtaaaatgattttaagtaagctgtcaaatgatcagatactgaaacattagtaatcgtcacatagccataaatttaattgcgtcatattgtttttgggaattgttattttagctggtgtacgttttgacaccacatcttttaagctttaatcttattttgattccacattttttcacgatttctatttcaaatgtcttgttttttcaccttcggttttcagtttttttttttgtatgctggctatttcgtcactttctcctcgcagtggcgtttggcaatcaaccgcttttggtttgcgacactgcgacaaatatgataagataagacgactgggcataggaaatgcttgccaaatccattgttgggcaataataatgcaatgcccaacgaaacagttccacgaaggaaagctctactccttagcatttagatatgtaaatatgtacatagatgtatgtaggtcccgagattacgacgttcttctgtatttcggtttgtaccgacggacagtctggtcgcctgtgtagatcaactcactatgtgatttagattaagaatgtataatatgcattagatgcgttctcaatcaatgtcaactgtcaatttcatctacctggtgctttgttttctagtaataatagacaaccgacgggtttaaaaactcagaaccaaccttttctagctaaaatatatttatttaaatgtatagaaaaaatgttaaattattgtatatgtggtaatgagtagattatctcactgcttagtattagtatttggaatatcaagaaaccattcatttgcttaactcggcattttcttcaatgaatgattcaataagaaaacagaatgaatatttcgacagcttgaattgggtaactacgaagaaagtggcgtcatgccacaaaattatattatataaatatattcactgtaatgttaaagttataggtggtcgactcggtgtaattgtccctccagcacccctaatacttagagcagcctcttcctaggatgcgggcgtgggcctcagctctcgatgccctccgcctctaactgggcctcaatgatatctgcgtgcaggcgcaccatgtggttattcaggttgccaacgctctggtagcacttgtcacagtactcacaggcgaatggcttctcgccggtgtgcaccaggaggtgggagttgaggtggccacgagtgaagaaggccttcgagcagcgatcgcacttgaagggccgctccatgttggggttgtgggagcgcatatgggtgcggaggtcggacttggtgggccagctcttcgagcagcgctggcactcgaatatgcgcggcttggcttcgccggtgtgggtgcgcaggtgggacagcagctgcgtgcgcaggatgaagcggcggtcgcagtgctggcagccgaatggacgctccgttgagtgcaccgacttcacgtggtagcgaagactgtgccgcgaggcaaagttcttgcggcactcctcgcactggtacctcatctcgcccatgccgtgaacggctgtcatgtgcagcttcagctgaaagttgcgagtgaacttcttttcgcactcggggcacgggtgcaaggatcgcgggtgcacggcaccagaggccttcctctccttgggcttgacgttatcctggcgcggcctggctctccgcatcttgggcttttctgcggcatcaggtgccggctcttcggatgattccggcggcgttgggggctcgactgcaaagagctcggcggtctccggctgatgatgcggagtgtttaggcttcccgaatctaccgacgattcccagtacgagggaatatcatgttcactgtgcgagctgtcttggaagtccaggctttctgcggtggtgaaaaagttatagttaaggtatggaactttaaaggacaatataaacaagggagagcgccaaagtcaccagcatgtcaaccaaattttgcaagctgcactaatttacgatcaaaaacaaagtaactatatttcatattaaattcatttatttcttgttcacttttctatggcagctgcgtgaatattatattgtatatgaatatatatatatatccgatagctgataactttacaagagagagtttagtttagtgcgtagaaacggactgacttggaacggactatatcgaatctgttgttgatactgatcaatatatatatat

SEQ ID NO: 2090 - DNA, 1213 bp, DROSOPHILA
atgaaatatagttactttgtttttgatcaaagcctggacttccaagacagctcgcacagtgaacatgatattccctcgtactgggaatcgtcggtagattcgggaagcctaaacactccgcatcatcagccggagaccgccgagctctttgcagtcgagcccccaacgccgccggaatcatccgaagagccggcacctgatgccgcagaaaagcccaagatgcggagagccaggccgcgccaggataacgtcaagcccaaggagaggaaggcctctggtgccgtgcacccgcgatccttgcacccgtgccccgagtgcgaaaagaagttcactcgcaactttcagctgaagctgcacatgacagccgttcacggcatgggcgagatgaggtaccagtgcgaggagtgccgcaagaactttgcctcgcggcacagtcttcgctaccacgtgaagtcggtgcactcaacggagcgtccattcggctgccagcactgcgaccgccgcttcatcctgcgcacgcagctgctgtcccacctgcgcacccacaccggcgaagccaagccgcgcatattcgagtgccagcgctgctcgaagagctggcccaccaagtccgacctccgcacccatatgcgctcccacaaccccaacatggagcggcccttcaagtgcgatcgctgctcgaaggccttcttcactcgtggccacctcaactcccacctcctggtgcacaccggcgagaagccattcgcctgtgagtactgtgacaagtgctaccagagcgttggcaacctgaataaccacatggtgcgcctgcacgcagatatcattgaggcccagttagaggcggagggcatcgagagctgaggcccacgcccgcatcctaggaagaggctgctctaagtattaggggtgctggagggacaattacaccgagtcgaccacctataactttaacattacagtgaatatatttatataatataattttgtggcatgacgccactttcttcgtagttacccaattcaagctgtcgaaatattcattctgttttcttattgaatcattcattgaagaaaatgccgagttaagcaaatgaatggtttcttgatattccaaatactaatactaagcagtgagataatctactcattaccacatatacaataatttaacattttttctatacatttaaataaatatattttagctaga

SEQ ID NO: 2091 - protein, 287 aa, DROSOPHILA
MKYSYFVFDQSLDFQDSSHSEHDIPSYWESSVDSGSLNTPHHQPETAELFAVEPPTPPESSEEPAPDAAEKPKMRRARPRQDNVKPKERKASGAVHPRSLHPCPECEKKFTRNFQLKLHMTAVHGMGEMRYQCEECRKNFASRHSLRYHVKSVHSTERPFGCQHCDRRFILRTQLLSHLRTHTGEAKPRIFECQRCSKSWPTKSDLRTHMRSHNPNMERPFKCDRCSKAFFTRGHLNSHLLVHTGEKPFACEYCDKCYQSVGNLNNHMVRLHADIIEAQLEAEGIES

SEQ ID NO: 2092 - DNA, 18296 bp, DROSOPHILA
ttaattttgtgttgcttttaggcaaaggcgagtgggaaaaattacatacatctaacaacaaatgcaccaacgtttttcatcatctccatcgttattagcgtcaatattcatcaatatatatttatcattatcattagatcgtaatcgtaaatcgttatcgtcattgtctgactttccgctagatccgcaaccgttcgcaatcgcattcacatccgcatctgcatctgcatctgcatctgcgtcccgtcatcgtcgtcattattcgtagtcagctactaaacattgtcgtacttatagttaaccaccatgcaatgcaatgcacttgtgcctcaacatcactatcaccggcaaaacatcggtgtgcatgggtggggtgcctgtgcctgcgtctgcatgtttacatattcatataggtcaatatatatcaaaaaaacacattatcgtcaacataactaactcgctataactcttggctctcgtatataaacatcaacataaacaaacaacactctagcgcttaacgaactccagaaagccctcattttcgctcttctctatgtttttataatcggatcttaacctatataagtgggtgtatatatctatatatatatatatatattgatatatatatatatacatattttatattatatttcgcttcttttgtttatatccaactttgttctaactaaaaactatacacctttgtccgctaccgtttgaacacccatatctcatctcatatgccatatgccatatgcctaatgccaaatgctttgctctgatgttcgctcatttccgtcaccgtctagctggtggatgtacgttcacctaaactactaatcgtacatcaatgagtgcatccaaaaaaaaattgctttggacaatttgctacattaagttggctgctgcggctgcgtcgtaataaatttgttctgtctgcggtcaaattggttagttcaggtctgtggttacgtttccgtatccgttttcatttccgtttcctgtcgttgtcagtgttgttgtttttgttgttgtcgctgtggctgctgctgtggttgctgttgttgttgttgttcttgttgttgttgtagttgtattagtatctgttgttactgtgatgcatcatcagtgcggcgtcttctgctgcggctgctgatttgttgctgctgctgttgctcctattgttgttctcgagactggtcgacatcgaactcgaggcggcagtgtccaagttgtggtggctgttggtcatagagattccttggaaggtacccaaatggttggtcccgactgggaccaaatcatcgatttcactttgctgtaaatctcctcgatggtatcgccttggacaacgcctgttcggtggcaaataaaagaataatcataagatgtcatctctataagatgtttttcatattatcttgaccatacccgtaaagtattcgccgaattcttgctccattttaatcgcccgctcgtaagtcttcttggcctgctcctccgtcatgcgacgattcatttccctgtaaaaacaaaaccattaacatgggaaatccttagtcgctggacatgcggaaaacctacatcactgaatccaccgacttgggcttgatgaacacggcgacgggatacagctgggcaacttggagtcgcttgatggcgttcccggacacgtccaggatgcagtgtttacccttctcggccacttcgcgcacgctggccaccgatgtgccgtacagattgtcgttatactgtcccgcctcgatgaacagatgattctgaatatcccgttccatttgctcgcgagaggatacaaagtggtagtccctaccatccacctcgtactctcgcttgggtcgggtggtgtctaaatggaaagaagcatatgtcgcactttgtttaaatatcgaagtatttgtaggaatcaaaaaaaaaaatcgtccgtccaaccgggggcgccacaaaaaaaaagtctgtacgacgaaacataatgcactacttacgtggcacacaagagccgaacttgtcgggatactctgatataaggtcatcgttgatgcgatccttcaggggtcccagaataatcaccgggcgcgtgtagttgatggacaaacgctgtacggcctcgtaggacaacacgttctcctcggaagctggaaagtagggtaggcatttttggattaggaccttgacgtgcaggtgctctacatcatcgcaaagtgttctaaatgagcggggatcggagggggaatggaaggtgggaaattcattgggacaaatatatcttgggtttcagggagtctacaaacaaacttctaattcggtctatattgcaattggaagttaatatttaaagagatccataaagatcaaggcaagtcagttaggattagaaaatgtgtatactatggttaatttcagctagttggcagttgctttctacgaaatttaagggtttattggaaaaatttgtatctcaaagttaggttcgtttaaataaagctctcgcacacaaaaaagtacaacaaaatttcaattgataatattttccaaaatgaattggcaaaataatagagagtacaaaatcagtcaatacttgtcaagttatacattacttatcaagcattcactgtgcttggtggataacttaaaaatcgagcagaggaaacattcgaaggaaataatgttcaatgttcaatcggggcacctaagaaggagtcacttaaaacttaaaggtacaataaaatgatgtgaaacgtagtgacgaaatcaaacgaaaacatatccaaatgtaaatgcaaaatgtgggatggtaatcaaagccactacacttatgtatgtcttggatcgtatacatatataggatatagaaatgataataatgttaaatagtagtacatagagcaggcgatctacgagcaaacagttaacagacagttggcagacttgtcttacatggttacataactacatacatgacatcatgatgttacatacatggcacacaaaaactttggacaacatgaaatcaaaatctgtgtgtctgtgtgttgtgagtgagtggtataattatgtttacatcattagaactagcttattaggtgattaacttgtctttggtggaacccaaaaggtatgggttatcatacatatatcttttggctgctgaggggtttttgggaacgcagtcgcacttctcctttaccaggtggattatgggatttactcacttgacgccttgtagaactcacagatcaacacattttgggactcatttacagagacacgaacgttgagcgctacggggtggattaacaactgatcgattaagccaaataaaactccctcgatttgtacaattcctttatttcagtttcacttctggttgggtttgtttttgggtttcatcttaacccgcattaaaaattcacaattatctctgaactctaagacgaacggttttcgtgggagcgatattaaatctgatttaattctttcaaacaaaaactgattttgcggtggttcggttcggggtggcacatgcaaaagacacgacactatgcaagcattacatgaaaacatcaacaaaccaactgaatttgaatcgatctagtactctatatacctacatatatagagagacgtgtgtcgacgaggtgagtgggtgtgtttttttgggctagctaagaaaaggggactgggacaaacaactatccaggcacaaggagaaagtgtactctaggctcagctcattcgggtggggggatcggatcttttccacatccatgggggttaacttctgttactgctcgggtgatgctacgcaatatggcaaccaattaaaaaaaataataataataagaagagaaatatgcaaacgataggaggtgtggaagtgtcagttgtgtgattctggtgggttcacataatttgctatcatcattcgattctacgcaactatcaacaattcacaacaattgaagaacttataaacaaactataaggtcaaatattaacaaaacacgatgtgtccgaggaaattttatgaatgcgtttggaaattcacttaaatcttgaagacagtttgtatgcagcatttgcatggttttaaataatataaaaataattgttcaactagcaagaatgaagtttttggcttaaacgttaatactccggatacacgaaatgaatttaatgaaaggaagaaaaacaaaatctactaaaagcctatgcagaaagttattaattcaaatagattctcttgcgataaagcgccatagagatggatagatatatagcggagaaagaaacagatagagagtgatggagtgagacagcttgagtgagagacaaagcaagagataggcagaaatcaaagaaagaacgaaaaatataaacaagaggaatagattttgcaaaaaatttggtttcattgtattcataactaaatatttaactttcattctttcgtttctttttaagtagaagaaaacataagctttgttgtatttttcactagtattacaaaaagagaagagacttgttgcttttttttttttttttttgtttgctgttgattcttgtggttgttttaatttatattttttgtgattgttggttgttcagatgctcgacttacgatagtcagcatcattattctccaagtagatcagagttatctgctccatatcgggtaactccaccctgtagataatctcgcctgagcagtgattagtcgatagcgatgatagcgtagttttagaagaatttagtagttggttgttgtcgcagttcgtgagcgcatggttataacaaatatatatgtatacagagatatatatatcggtggtcatattgttggtttcaatttttttttttgttgttcgttttgtttgattgatttgagaagttaaatatttatatatagagcgatattgatatgtgtggtatgggattgtgtgtatatttagagcaagagaaaatattgtgagttaaacagaggtttacaaattaaggattttgtgtttagtttcggtgtggttccatcaaaatatatagttcgatatatatttagaaacagagaaacagagagcgagagagatggagtgacgttgcgtttgcgttttacgcacagttataaatcggtagtagatatagtagtagaatagtagtagattcgaacggtagtagatgttgttgtcgttgttgttgaagtagttgtagttgttggttggttggttggttggttggtagtagttgagtagtaggcaaacaacacaagaattcaaagtagttcacagacacaggggttaaatgtaaaagaagaacaaaaataccaaaggattaacaacaaatcgaaatcgaaatcaccatttactcatgtcttgtactgtctgtctgtgactgactgagaactaaaaaaacaacaaaaaaaaatggaactcgaaaaggaaaatgagggatttgagtttgggttcttagttgcgagttcctttcctgtctacgagtgtgatttattcgtgtgcattccgaactgagaattgtccaaggaaatctttatttcggttgtctgttatctgggtggtgtatctgtatgatgatctgttctgtattcacatcaagtacgccattccagttacatttatatgtacagtatatatcgcatcgagtgtggcaacattgaaacacgacgtgtgattgatacaagcgcataataatagaacagcaagttgcgatcgaaatggtatacagtttgatttctgtctgcatgtccgtatatgtatgtacacactatgcaatgtgaacaaccaggggaatccaaagtattaacttaaaagacgaacagaaacccctacaaaacagagatcatctccctggaagatcatcttgggattgtaagaagattcgatgtttggtcttcctgtacaactttttgtgtcgcgacggccagatctattcagatatcctatgcaaatcagacgtacatccgtagacgtacatttaacatatgtacttcccttcttttttttttaattcctttatacatttagtgtacatttaatggacatttacatgcatatgatagagttctttcgaaagttacatttgggcgattcatttattccgcaatagtcttgcggagcggttagatatatggaagataatgggctatatatatttggagaatcttggcatgtatttatagcgatagagagtgatgtacgagtagagatcgccagatacatgtgatgtacaaatgtattgatgcaaataaaaagcgctgaaaaccaaaatctctaacggaaccaacgaaaaatcaagaaacagtaatcacgtgtaatgttttgatgtatgcatgtatgtaaatatgtatgttatgtatgtatatatgcaggtaagtggttattcgcatgtgtttctgctgaaactgtgttagttcttacagcaaatgcatttctatgtatgaaaatcgaaagttagcatggttaaatgtatgttacgtcttttttatgttcagtggatttactcagatatatagatagattgttatgtataagtagatatgttggtaaattgatctgatcgagtacatacctccttcagcattggcatcgtcttgtgtgtagcaaagcataaaggctagaaaacgaagagaaaacaaacgagaaaccgaaagggaagagaaaagagagaaaacagaagagaagaaatcgaaagagatatgtttggtcagtttaaaacagaacagcggttgaaatcggttcatttgagtagacacaacattatatattattataattgattaaaaatgtgatcttgaatggaacttagtgcatcgaataccattaattgattagctttgaagtgtaagctttatgtattatattcaaataagaaatatatgtaagaaccattcaagatttttgtaggttttaacaaccatcaaaatgttccttctttccttctgtatgtattataataggaacaggatggcaagtagttaaaggttgttgctggttttcagaaaactgtttaaagtcgtagtgatgtagatatttgatgaaagcagctggactcagagatttaaggttggattttttttttttttttgatagagagaagagcgataagaagataaatgtactgtcagtagagagttgcgggaggaaaagcttttttaaatgaactaaagaacgaaatcaacttggtttcatatctcgatgggctgttgatgatgtatcgttagatgtacattgatgtaaaacgtgcaaccctgccgctgaagaacactcttcggatacagatacaattacgattatctttagcttaatccaagactatatacacgatagatggccatgaactatacaactccccgcgaggactaactgttagtaagatcgtgtgactatagcttactgtctaatatgtgtatggctgtgttcgtatacaagttgtgttgtgtatgtgtgtgtgattgttaaccatgactagaccatctgagaagccctgacacctggatacatttacaagcggatacaactcgacatttataccgccagcttcggttgtgtttggaaaacttttcacctgacatggtcggcacttacgttgcggttcatttgactggttgttgttgacattattgatgtcaatctcgctggtgctgctcacaactccattggctaaacatatagttcgggatcggggcacacacaaaataatacaacatccaacatccaagcatatcgaatgggacaggaaatgtgtgagtatgtttatgtttcagtgtgattgattcgtcggttcgtcgatggatccgatcgtttcatccagaatttggtaaatatgggtagaatgagtgtttggacatcacggatttcggtggggaaaacatatggaaataaacagaaatgtaaatcatataaaatgcataaaacaaaacaataaaaaatcgattgggtctatgggtaagtcttatgaaccagaaacatcaaacgaaacatttatctaatttattttaataaattaataaacatcaactcagaagataaaaacacaacgaaatgggacaggaagaactttaagcttttgatgaccattcttatcaaatgtttcctgtgtgtaaagaaaatttgcatcctttcatgcccacaagttacaaagtacttaacgacttttctgaatcttatgatacgtatgatgattaacttaaaaacatatattacggcatgaaagacttaactatgagaaatcaccattggatagaagaaaaaaaaagaacaggacaaggactttgacagtgagttttaggtgatctcgctatagatgtttcaacgacatttatatatctccttatctccgtaagcagaacagacacaaccacaagtcaatcaaacatccgcccaaaagcacacacactcattcacacagaaattcagtagagaaagtcattgagccttaagcctaggactaaaccaaaaacgccttcagtttgagttgctcgatgttctcccattattggccatctccgaagaaagagcgaacgattgagactgtgagacagagtcggactgctggcttcccttgacttggtctacttacgctcttggtcgctgccatcttcattcttctcatcgcgactcttcataaacggaaatttgcgcgagaatgtgaaattctttttctttcgatccaatgtcgattgctgtgagatggcaaatacgaatggttaatatgataacattgttaatatggcaccactcaccttatccagattattattagctgccgcatgtccctggaacttaacgctgcggtccctagctcgcattttgcgctcccaacgccttttcgatggtacaataccgatttgctcgtcctcgttgtcgccgagaactcgtcgtgcctgccaccattcatcgtcggaggcattggtcacgtgcaggatatcgccgtgcttaaagggcaatcctcgcgagggcaatccatcatcccgattcggatcgtagtcaaacagggcgcgcacatacagcgatcgcttttgcgtggtgcgcagcagcgttcccgatccgccggcaccgagggcagcctgttgtttcaactcttgaatgcgtgcctcgaagcgattgtactcctctgggcggtactgcgccaacagggtcaccacaccgccagaagtctgaaataataataataatattatttgaataattgttacgattttcattcactttgactcaccttgagcgcctgggctgcctcttcgtgggtggcgtgcgtgagattgacattgttcacgctgagcagctggtcgccacgcttcaactccgacccgagatccgctgggccgccggccaggatgaaggacacatagataccctggccatcctcgccgccaacgatattgaagcccaggccctgcggtcccttctggatggtgatggtgcgcggttctctgcgaaaacgtggtattaagtattcgtatatagagaaaagtgatcgaggcactcacctggttatatcctcggtgctgacagcgcgtggagttcctggtggaacggcggctaggacatttgtagaggcgtatcgcgacccgggctctaggttgttatcagaaatttgtgattttggtttaggtttatcggtcgtttttgttgcacattgaatgggagttattgttattattattattattattattaagacatgacagagatagacagatagataaagagggagacagagacagagatagagagagatagatatagagcggttaataatgccttgagaaatataatgttttcttgcggtttcagcgcgtccagaattgtccagacagagatagacaaacgcaaaagggacagagacagctggcaccgacgagaaagagaaagaaactgtttaaagtaaaagactgcgacaaaaactgaggccaacggaaacagaaacggaagacaactgaacggaaactgaagattgcacttgatatccccgccacaacacaaacacacactatacacaggcatacacgagatcccaggcacaccaataccgcttaataacaccataatatacagcacaacaaatcaacacaaagatcgcttgatcagactataatggtctgatccagaacacaactctagaacactaggcgcaacttttgagggcgggatgttcaaatcaacagcatggcggtggaggagagactacaggggaaggcgggagagcagcttccagcgtgtgaaaatgaaagccatttttttttctagagcctcaaattaacgtggcacagcagcaatagcagtagatatttttggccggacgaggaggggaaatattggtattggagcatatatacgaacgggatgtacacgaggaagaattgggatgattggagtaaggaattggactcgcttcaagtgcctttattagaccatagattccataaatgcactcgagcggttccaaaaaaaaatgcacaaaatagtttaagtataaacaattcagatgcaaaaacgaattggtaattaaacacagataaataaagatacaatttctcagggcatgaattcgaaaagtattaatagaaaaagatacacaaatgcaaggtgagagcaactgttcaaattcgatagtcaaacaatagcaattataaatcataaatcatataaaataaaatgttatagaagaaaaagaaacgaaacaaagaccagagatgagggcccagcacaagtgcatttatgcgaggagatcgcaggaactccgataaacacattcgaccgggacattgatgagcataaattagttacaacagaatatcggttaaataataaacaaatgaatcgcttacggcgcggctggggtgattgggatcggttgtttgtttgattggattcgacaggcagggcgggcatggaagcattgttatagaaggagttggcgggtggagatgatgctgctgctgctgctgctgatgctgctgttggtgttgctgctgcaacagttgccgtcgtgctgctgctgctactgttgttgttgttgatgctattaatgttgttgatattattgctgttgctattgctattgctattgctaatgctaatgctgctgttagcgccaagcgacggcggcaacttgctgctactgttgctggctgtggccgtggccgtgactgtggtgactgtggtgttgctgattgtgttgttgcttgcaatgactgatgcagatgcagatgcatttgctgctgctgctactgctgcggctgcttgtggtattgatggtgaatcgacaaccgtctgtcccatactatttagcgcacctgtcgactgcgaattgaccatcggcgtcgcatgctgctgctgatgcacctgactttggctctggctggtggccaactgcgattgggactgcgacaattgttgtccggatgaaaggcctcctcctccgccgccggacgcactggtggtcagatgctgtgtctttccaatgatcagcgtcaccttgtcggtgatcgatttcaacgtggccaccgccagttcgtgcgttacgttctccaggttcttctcgctctgtcggaaggatatacaattatcaaattggttactagcaataaaaaagttaataaacctaccccgttggtgcgcactgcaatcagcttatctccgatggagagacgtccgtccacctgcgctgctccgccgtccatcaacttggtcacatagatgccattgtcgccggggatgtgctggttgccaatgccgccggcaattgagaagcccagtcccttgccgcccttgaccagatcgatttcgatgaccttcggtccgctggccgcactatcccgagcatctcctgccgccgatcccgctgccggggtggtggccgttccacgttttcgcttcacatgcagcttaacaacattgcccgccttcttgagggcatccacggcggaggcatgtggcacatccaccacggacacatcgttcaccgatacgatgatatcgttgatgctcagacgtccatcggcggcagctgctccaccggaaatgagcttggtgatgtagatggaggtgtcggtgccgatgtgcggattatccgtaccgccggcaatggaaaagcccaatccggagttgccgcgctccagctgaatgtcctcgtataaccagctatcatcgccattcacctggaggagatcgaagatcattaaaatggttcataaagagattagttgtttggaaatcattacacaatgaatacatagtttgaacaatgtgtggtgagtgagtaagtgttttagtgttttgtgtagtgaaaatgtaatgaaagctgtttttattatgtgagtacataaatgaataacacaaatatcaaaaatgatatacatatgtttatgcataaaataatcagtcgatttaagctccaaacatttatggaatttatggatttaaatcattgtttatgatatttcataataaaatcttgatcgtattgaacttttttcaagactgtaaacataatatgatcatacatagttgggtaataggtatgtgttttttgagtacccattgcacccaagttaaatacacaaattgttaattacatatttacatggatgcgtcgttaggtcactttctttaaaacaaatgtagccagcgattcacttgtttcagttgtaaattgcatggttattgctcgaaatatctagaaatacgccccgaaaagcattctttcgagctaatttcataaatatgcgcttcttcgcttttcagcgacttgtgatgtcattgcatggataattcagttaggcagcgaatacataaaacaacatgaagagagacaaaacacacgacgatcataaaattgaatgcaaatgcagttaagacgacgacaaacaacgttgatgttttggcccgtttccattttcgattttactacatattgcatgaaattggaagaaaaacaatatatgatgatgattgtctaattacagacataggatcttttaaattaaatcttatatacatttacgcaaaaccaacaaaaagttttaactatctttaaatgttgcaatttcttatttttgaaaatattttgcaatatgaagttgaattcgacaatggcaacaggtgggttaaggttctaatctcgttttcgatccatctgttgtgtggcttacctttgtggacgatgccttatggagctgtagaaggtgatgaaagtgaaagagaaacgtttagagaggatgcccaattggttcagtgactcattagcatacggtattaaccctacaaagcccccacggccgcaccctcgccggagatggtgaatcggtgtcaatggcattggagtctcgaaatatcttgaattaactgggccgtgcagccaaaactctcgttgcaattaacaggcgaccaaaataaaataaaaaaaaaaacacatacaaaaaacaaacaacaaatggatgaaaagcaacaactgtgcgctaaaaatggcaacaaaaaccacagcttgcacaactcgcagcgatcttagcgggttaaggggcgggggggtagggggttgcggcatcgttaaacgagttcaattgattagcaggccagtgtaaatgaattcatcaagcggcgacgacagcaacattaaccccaagatgctgtacattatgcactgcaaaagtgggcgtcgctccacccctccccagcccacttaacccgccatagacccacccataaattcccatatcggacgctcttgtctagcgaaaaattgccaattaaccctgggagtgggtcaagtcaagtatacgcctagggagcctaagcaggcgagctaaaaatattaatatatgctctttgggttaatcgctggaggatacttcgtgctgcagccacagtggtgtgtcgctaaatgcgatttctttcgcttctgattacaattaacgattatatgtcaaatagttgaaatctctttagaactcatatatgtaactcaagggaacatgaaaagccgaaagattaacgctatttcatttcatgtagtttaatgtctgtaattacagctaaagacgtgttacatctgcgagaaacccattagcgggcaagcactgtacgcggccacttgggctaacaggttcgtgccgcttctgcttccgctgacaactctggttacactttttccagcccaaaaagaattataaaagaagaaaaattacatcataaagttaacaatcggaactcacttaattcggtggggtaggaatgtgacggggagggggcgccatgggcgtgttgggacaaacacacacacaagactttgagccaactaagctccaagcaaaaaaaatcaacaaaaaacccaaagaaaaaaaacctcaacaacagcacgctatattaacggggccaacgagctacaatcggtttttttctcttacttctacactttttttttcgtgggccttgtttcttgtttttttttttttttttgtaaagttgcacacccttgaaattagtagctggcactaaagccaaatcatatcacatactatatggagcacttatcttatctatgataaacatatgcttgggaccacaagcacactgaaaatgcggaaaaccgaaccgcagacgataaaattcttaagtcattgtaagaaaaccgaagaagaattccaaatgcacatagaattttcttacttaaggaatagagatgccatagtttcgtaagcacaaacgctcaaatcaaatgaatcataaaattatagtctattaaagtgcctattcgattactcgcgttgcatgcaaagcggggaaaatgaaatctaataggcaatgcaacgcgctagtgaaaaattctaaacgagcttttcaaggcctaaacgaataatgggaataatagttaatagtaactagtcacgttcaaggcgaattggaaagtctttggtattactgcaatgtaaaaagtaagcaatgctaaaaattaagagcacatttcgaatatgtgatcataaaagtgtatagctcataatttgcagtatttttagttagcagcaaacagatcataaagactagaaaaaccagagacccaattgctaacgataaacaaacatgagtcacacgagaaatgcgtgagaaatccgtggaaagaagtcaaatctatatagggatatggccataaaatagtatagactactgatacatatgccacataaaagcgaagattatagcataaccatatgtgtatgtatgtatgtatgtacatgtacatagctgattaataatccgcaaataatccacggccagtgagaaatttgaatgcgtcaagctgcgttgcacttcattgatcaaatcgagtatagaaatgttggcaaaatgcccaggggtttactgtatgcgatcggacgtgacaacggatcgtggtcgaaacacctgcgagggaaacgaaatcgaaacggaaatccaaagccatattccaatattgtttcattccggccacacggggagcggtgggtggtactaaaattatggttcaatacgtaaacttgtccttcgcgtccatttgttgttgttgctgttgttattgccgacagacgcgtgatgtgtttataagtttttgcggaaaaatcggatgagacatacatatgtatatactggatgcacagggaaagccacctttgatttaaaagtggatattcgggaaaatgggtttcatagttataataccagttagaagagatcaaaggatctgtgattaaactctggaacttatttttcaaacattttatgcaaccttctcatctagccagtgtccactgtaaattccttggtttttgtgggtggtataattttcgaaaataaaacggtttctgtcaaaaattagaagagcgagtgagagggaaaatcgaattggggacaacaacaacaagtacgcctgtgcggaatattaagggcacccaccagcagcaacaacaacaacaacaagagtggtgagaacaataacaaatccaacaagagaagaaccgttgatcggagcattagaaagagacgaaggaaagtctttttttttttgttcttttacttttttttctgcgatggcaatgcaaagacgctagaatgatgacaacgcaccaaactgtgtgagtgcgagtgtgcgcacagtggtgggcaaaaatatagaacttagttctatatgcgtagttctatgcgtaaaaaaatgtaaatactaaccaaaaggaataatatattcgttataaactttttagacctttttgcacaattgaatttataacttttatacaatttgcacgtaaattaaaaccattcttaagaggtaaacaaagcctagaagctgcgtaaacaaatactaaaatgcacaaggggtaaacaaatccacatttaaacggaagtaattaaaaaaaatttgccactaaaagcgtgcccccggctgttcgaacacttgtgtatcgcttgaatcgaggaaaatcggctagctttcagtccgcctgcgaatttgatttgaaaacaagaaagaacactatagtcctcatagtctcgcgactattcgatactattactcagatagtgaagcgctagacagattgagatataaacagttttttggtcagattgacttggctagtgatcctgctcaattatatatatacttccacctgttacatactcctcaacgaatccagcataccccacgacgagtagagggtaccataaaccatggaatcatcgcgcactatatgtatagaacgcagatgcccagctttttctacatatatccaacagatattttgcttgctggctatacatctacatacatacatcctattcgtatatgtgtgtagaattgataatggatatagtaagaccgatttttaccgaatccagattgaagagtgacgaaactttcttgatgaatccgccgccgctgccgccgccgtcgcgcttctttttcctcgttgtcatatcgcagcggcttttgtttaattgattttataacttattgttatacttggttttttaatcttatggcgttcgagggttaaagttacagccgcgcacaaacaacaacaacaacacacggacaaatgccggcgctgctgcctctgcttcctcttctcttcttcttcttcttgaactcgattcgttactattttatttgccgcctgtgattatccaactttttgcactagacaaacgaaaatgcacacaattgcgaacagagaggttgacttttgaaacatctatatatttaaatcgcacgcacgagcgtgttgtttgtgttttagcgatcgggaaactgaaaagaggccgctgccaccgccgccgccgaaacaacaaacacaacacacggagcacgcacgcacacacacgcacgtacgtatgcacacagagtgtgcgagagaggaagagcgagtttttttttcggtataccgacttaaattctctcacactctctctctctgtctccttgttttgctggcatttttccccctccgtgacgatcgataggtggcggtctatcgttatcgcttgcgctggcaatgctcgctccctttctcacactccggttatatgtcaccgccaactgtattgcaatgccaatgactcataaacaatgcactcgtctttaattacttgtgttcacatttccattgcacaaaacaaaataaacaaacaaaaaaataaagcgagcaaccgaacgcgacgaaaacaacacacccaactagtagaatcgatttttgcagctagctcggcctatcgattgccaacagagtgaccacatggtgatcgttcagttataccaaaaaatactagttatctatacaattaataaaaaatttttaaagttgtttttaaaatatgatcaactgtttttatggtgcgcaaaaatctgtcgcatttcaatcaatttggtaatcattattaaaacagcagaagcgataatggcattccgatttttattttgtagaaatggttcgtgtcaacgctaagcattccgaaaataaaacagttttaaaaatattgaattttcagcctacagaaataatcatattcaaagcttaaaataaaaatcaatacaaaccataaatcatcaaggcaataaaaacgaacgaacaagtcaaataagaagcgcaaaatgtatgtatattttttaaatggggttcacatggtatgtttcttaaatcaaaatcaaatttaatttggcaacttaaaacattattaataaccaaaacatgcaccaaacttaagctaaaattataaataagcttgatttaatgt

SEQ ID NO: 2093 - DNA, 3454 bp, DROSOPHILA
cacaaacaacacgctcgtgcgtgcgatttaaatatatagatgtttcaaaagtcaacctctctgttcgcaattgtgtgcattttcgtttgtctagtgcaaaaagttggataatcacaggcggcaaataaaatagtaacgaatcgagttcaagaagaagaagaagagaagaggaagcagaggcagcagcgccggcatttgtccgtgtgttgttgttgttgtttgtgcgcggctgtaactttaaccctcgaacgccataagattaaaaaaccaagtataacaataagttataaaatcaattaaacaaaagccgctgcgatatgacaacgaggaaaaagaagcgcgacggcggcggcagcggcggcggattcatcaagaaagtttcgtcactcttcaatctggattcggtgaatggcgatgatagctggttatacgaggacattcagctggagcgcggcaactccggattgggcttttccattgccggcggtacggataatccgcacatcggcaccgacacctccatctacatcaccaagctcatttccggtggagcagctgccgccgatggacgtctgagcatcaacgatatcatcgtatcggtgaacgatgtgtccgtggtggatgtgccacatgcctccgccgtggatgccctcaagaaggcgggcaatgttgttaagctgcatgtgaagcgaaaacgtggaacggccaccaccccggcagcgggatcggcggcaggagatgctcgggatagtgcggccagcggaccgaaggtcatcgaaatcgatctggtcaagggcggcaagggactgggcttctcaattgccggcggcattggcaaccagcacatccccggcgacaatggcatctatgtgaccaagttgatggacggcggagcagcgcaggtggacggacgtctctccatcggagataagctgattgcagtgcgcaccaacgggagcgagaagaacctggagaacgtaacgcacgaactggcggtggccacgttgaaatcgatcaccgacaaggtgacgctgatcattggaaagacacagcatctgaccaccagtgcgtccggcggcggaggaggaggcctttcatccggacaacaattgtcgcagtcccaatcgcagttggccaccagccagagccaaagtcaggtgcatcagcagcagcatgcgacgccgatggtcaattcgcagtcgacaggtgcgctaaatagtatgggacagacggttgtcgattcaccatcaataccacaagcagccgcagcagtagcagcagcagcaaatgcatctgcatctgcatcagtcattgcaagcaacaacacaatcagcaacaccacagtcaccacagtcacggccacggccacagccagcaacagtagcagcaagttgccgccgtcgcttggcgctaacagcagcattagcattagcaatagcaatagcaatagcaacagcaataatatcaacaacattaatagcatcaacaacaacaacagtagcagcagcagcacgacggcaactgttgcagcagcaacaccaacagcagcatcagcagcagcagcagcagcatcatctccacccgccaactccttctataacaatgcttccatgcccgccctgcctgtcgaatccaatcaaacaaacaaccgatcccaatcaccccagccgcgccagcccgggtcgcgatacgcctctacaaatgtcctagccgccgttccaccaggaactccacgcgctgtcagcaccgaggatataaccagagaaccgcgcaccatcaccatccagaagggaccgcagggcctgggcttcaatatcgttggcggcgaggatggccagggtatctatgtgtccttcatcctggccggcggcccagcggatctcgggtcggagttgaagcgtggcgaccagctgctcagcgtgaacaatgtcaatctcacgcacgccacccacgaagaggcagcccaggcgctcaagacttctggcggtgtggtgaccctgttggcgcagtaccgcccagaggagtacaatcgcttcgaggcacgcattcaagagttgaaacaacaggctgccctcggtgccggcggatcgggaacgctgctgcgcaccacgcaaaagcgatcgctgtatgtgcgcgccctgtttgactacgatccgaatcgggatgatggattgccctcgcgaggattgccctttaagcacggcgatatcctgcacgtgaccaatgcctccgacgatgaatggtggcaggcacgacgagttctcggcgacaacgaggacgagcaaatcggtattgtaccatcgaaaaggcgttgggagcgcaaaatgcgagctagggaccgcagcgttaagttccagggacatgcggcagctaataataatctggataagcaatcgacattggatcgaaagaaaaagaatttcacattctcgcgcaaatttccgtttatgaagagtcgcgatgagaagaatgaagatggcagcgaccaagagcccaatggagttgtgagcagcaccagcgagattgacatcaataatgtcaacaacaaccagtcaaatgaaccgcaaccttccgaggagaacgtgttgtcctacgaggccgtacagcgtttgtccatcaactacacgcgcccggtgattattctgggacccctgaaggatcgcatcaacgatgaccttatatcagagtatcccgacaagttcggctcttgtgtgccacacaccacccgacccaagcgagagtacgaggtggatggtagggactaccactttgtatcctctcgcgagcaaatggaacgggatattcagaatcatctgttcatcgaggcgggacagtataacgacaatctgtacggcacatcggtggccagcgtgcgcgaagtggccgagaagggtaaacactgcatcctggacgtgtccgggaacgccatcaagcgactccaagttgcccagctgtatcccgtcgccgtgttcatcaagcccaagtcggtggattcagtgatggaaatgaatcgtcgcatgacggaggagcaggccaagaagacttacgagcgggcgattaaaatggagcaagaattcggcgaatactttacgggcgttgtccaaggcgataccatcgaggagatttacagcaaagtgaaatcgatgatttggtcccagtcgggaccaaccatttgggtaccttccaaggaatctctatgaccaacagccaccacaacttggacactgccgcctcgagttcgatgtcgaccagtctcgagaacaacaataggagcaacagcagcagcaacaaatcagcagccgcagcagaagacgccgcactgatgatgcatcacagtaacaacagatactaatacaactacaacaacaacaagaacaacaacaacaacagcaaccacagcagcagccacagcgacaacaacaaaaacaacaacactgacaacgacaggaaacgg

SEQ ID NO: 2094 - protein, 960 aa, DROSOPHILA
MTTRKKKRDGGGSGGGFIKKVSSLFNLDSVNGDDSWLYEDIQLERGNSGLGFSIAGGTDNPHIGTDTSIYITKLISGGAAAADGRLSINDIIVSVNDVSVVDVPHASAVDALKKAGNVVKLHVKRKRGTATTPAAGSAAGDARDSAASGPKVIEIDLVKGGKGLGFSIAGGIGNQHIPGDNGIYVTKLMDGGAAQVDGRLSIGDKLIAVRTNGSEKNLENVTHELAVATLKSITDKVTLIIGKTQHLTTSASGGGGGGLSSGQQLSQSQSQLATSQSQSQVHQQQHATPMVNSQSTGALNSMGQTVVDSPSIPQAAAAVAAAANASASASVIASNNTISNTTVTTVTATATASNSSSKLPPSLGANSSISISNSNSNSNSNNINNINSINNNNSSSSSTTATVAAATPTAASAAAAAASSPPANSFYNNASMPALPVESNQTNNRSQSPQPRQPGSRYASTNVLAAVPPGTPRAVSTEDITREPRTITIQKGPQGLGFNIVGGEDGQGIYVSFILAGGPADLGSELKRGDQLLSVNNVNLTHATHEEAAQALKTSGGVVTLLAQYRPEEYNRFEARIQELKQQAALGAGGSGTLLRTTQKRSLYVRALFDYDPNRDDGLPSRGLPFKHGDILHVTNASDDEWWQARRVLGDNEDEQIGIVPSKRRWERKMRARDRSVKFQGHAAANNNLDKQSTLDRKKKNFTFSRKFPFMKSRDEKNEDGSDQEPNGVVSSTSEIDINNVNNNQSNEPQPSEENVLSYEAVQRLSINYTRPVIILGPLKDRINDDLISEYPDKFGSCVPHTTRPKREYEVDGRDYHFVSSREQMERDIQNHLFIEAGQYNDNLYGTSVASVREVAEKGKHCILDVSGNAIKRLQVAQLYPVAVFIKPKSVDSVMEMNRRMTEEQAKKTYERAIKMEQEFGEYFTGVVQGDTIEEIYSKVKSMIWSQSGPTIWVPSKESL

SEQ ID NO: 2095 - DNA, 2558 bp, DROSOPHILA
gttaaccgactaccgttttgtaatttatttaagtaataaaataaatatacgtacgttatatggtacgtacgttgcgcacctggccgtctgaattgccccgtactttgggatgctgctccatggacgtggatatggatgtggatgtggatgttgctgcatggatgccgctccatggatgtggatatggatgcgatgctgacggtgggtttgttgtcaagcgaaagtgcgcttcaagtgcaccaagcacccacttggccaaagtgaatttagtgtcaagtgcaggaaaatgtgaaaagcagatgcgagttagtttttcatatttaagcagcacttcacccaacagcagcagcagcagcaacaacaacaacgcggcgagccactcacactggtcggttgtctatgcaaaatggattacttttggccttggggaggtcgtatgtcgcaagtccattagccgcctttctttcgtgatcgagctagatgctttcgttttttttttttgagctaatataagttggttttaattacgaacggcttgtattaagccaaaaacttatacaagcactttgagaacaaaatgtttgcatttaaattagagattgttgcacaaagcaagtgaaattccaccgctagtgaaataaaaaaaaacaattttctgagtctgagtaattaattcattagttcttttaatgccttacgattggtataacgcccgtgaagatcgtaaaaccacagcagatttcaatattttcgtgaacgcatatgttatatgttatttcctgtatttcttagtttagtttgtatttttttttgagttttttatgtattgtagtaggctatgtatggaattcatgtgaatttcaaatcgtaagccaggctaacttcactatattacacttatttaaagccctatcgcacgtgcgaaaagtcgagcgtcgtagcgttacaaattccgtctagagttttcaatttcgaaatatttgactgaaggaatatcgaaatggaggagtattcgcgcgaaccgtgtccttttcgcatcgtggacgattgtggcggggctttcacgatgggctgcttcggaggcggtctcttccagggactaaagggattccggaatgcacctcaagggctcaaaagacggttcgccggcggattggcggccgtaaagtccagatcgccaaccattggcggaaatttcgccgcatggggctgcgtcttcagcatcgtggattgcagcctggtgcatctgcgcaagaaggaggatccgtggaactcgatcatgagcggagcgatcgccggtgggattctgtcctcccgaaacggagtagccgccatgttcggaagcgccatcattggcggagttctgctctcaatgatcgagggcgtgggcattctgttcacccgcatctccgccgagcagtttcgcaattctgatccgcagaacgatctaggcagagcaggcgcgtttgcttctggatccggaatgggatcaggcgatattaattcatcaccgggctttgagttccccgtagtgcagcaggccaacgcaacaagctaaatttctgttctcattctgcccgtcaagccggaaccttaatgaataattatgatttctttcgttgtttactttcgctccatgattttgtgtgcctccacctcctcgtaaaaatcaaaatttcaagcttaatatattttgtatacttaggcaacatccaaaagctttggtctttaattttactaactaacgctcaaatctgttcagacccggtgataattttctgcaaatatgcaccactgtgcaccatctagaagcgacgtgagggtggcagatcgaggaccaggacttttggttcggggcaggaatttcacccggcagctccttcagagcaaaacaatgacgcgccgcatttagaagcctttcgctctcgctgccgcacatgcctcaccgcaccgcccttaaccccatggtgccctacgagcatcagaacaacgtgcaactccctacccattcctgccccaaggtgctcgttccgttgcggatgtcgttgacttttcaagtcgcattagaagcgacacggcggcgtcgccttcgcggcagttgggtgggtgtttgggtgggcgtttgattgggtggggcataaaaatacatgtaagaggctttcagcttattgtttggcactgtcgcgtttttatgattgcacgcaagactctctggccacgcctcctccttctgttcctcctgctccacctactcctcgtgctcctcctcctccaactcctcggtcgtctggcttctggctttgggcccttgtctcggcttaattttattgatattacacgtacttgacgtcgacgaccaggtcgaaaacagccatacccatacccatacccatgcccatttccatttccattcgcattcccaacttctggctattaatttttacggcttacgacttacggctgcctcgcataagcggccggtagatggcgctccgcagttgatcaattttttacatctattggcacttacttgccgcgatatattatatatttatgcc

SEQ ID NO: 2096 - DNA, 558 bp, DROSOPHILA
atggaggagtattcgcgcgaaccgtgtccttttcgcatcgtggacgattgtggcggggctttcacgatgggctgcttcggaggcggtctcttccagggactaaagggattccggaatgcacctcaagggctcaaaagacggttcgccggcggattggcggccgtaaagtccagatcgccaaccattggcggaaatttcgccgcatggggctgcgtcttcagcatcgtggattgcagcctggtgcatctgcgcaagaaggaggatccgtggaactcgatcatgagcggagcgatcgccggtgggattctgtcctcccgaaacggagtagccgccatgttcggaagcgccatcattggcggagttctgctctcaatgatcgagggcgtgggcattctgttcacccgcatctccgccgagcagtttcgcaattctgatccgcagaacgatctaggcagagcaggcgcgtttgcttctggatccggaatgggatcaggcgatattaattcatcaccgggctttgagttccccgtagtgcagcaggccaacgcaacaagctaa

SEQ ID NO: 2097 - protein, 163 aa, DROSOPHILA
MGCFGGGLFQGLKGFRNAPQGLKRRFAGGLAAVKSRSPTIGGNFAAWGCVFSIVDCSLVHLRKKEDPWNSIMSGAIAGGILSSRNGVAAMFGSAIIGGVLLSMIEGVGILFTRISAEQFRNSDPQNDLGRAGAFASGSGMGSGDINSSPGFEFPVVQQANATS

SEQ ID NO: 2098 - DNA, 2905 bp, DROSOPHILA
ctaaaaacgaaaactatactcccaaaatgaatcaaaagaaatcaaaaactgtcgcagaaaggcatttacattactaactaactgccagaaatacaaatacaagtacatatatacaaaatacaaaaagccaagaagcaatttgcaaacactaaacaaaatagaaatcacagagacaaacaagaaattgttaaacattacaaaacactcagagttaagcaaacgaggtcccagagattcaaagctttccaagaaaacgaaacaaaccgattttgtcgctgtaaattccggataaaaaacactcgtgtcgagcatatttactccgtccgtttgtatttgtatttgcacacacttgatttgggacaccaactaatgctgacttcatttgcaatctctgaaccggaaccatgtaaacagtacgaccagtattaaccaaaccgaaatcattttatcgatataagatactacccgctaccactaccactactaccaataccaataccaataccactaccattacccacgacagtactgcccacattgactcattcacaaggcgaggactcggaggagcaaacaataagtattcgagtatttactaatcaaaaccacaaactaaaagagttgtacatagcattaaatacacgtaagcacgtgtgtgcgaacgtgtgtcggatatggatatatttaatatatatttaatatatatttatttaatgaagcgaagacttaactagactaagtttgggcggacagaaactcaaagttgtgtagacttaaagcggtgtggtaattaatcaatcgcgtaggctaagtccattgattgcaacccgaccattgacattttttaatattttcgtttgtttatccacccgcctaatttgtgtttgtttacgttttttttttgtattttatcttatctcccccttatgctttccattcgattcgaaaccctcgcttttgtggctaaccaactgcttgcgcactgctttgccgacatacccagaggtgagccataacgcatacgccccgaatgccccaagtgccccgagtgccccgttgccggaagcggatgcgagcggtggtgctggctacggtggtgctgcgggcggtggtggaagcggcggatatggtggtggtttctcggctggcggccactccctgtaccccagcctacccaactcaaacggcggcggcggtggtgcggctccctacaatccatatggcagtggtggcggcaacggtggatacggcggctacaatccctacaacggcggctaccagccaccatcttctggcggctatcaacctcaagctcctggcggataccaacccagaccgggctacacgccacccgccccaggctacgataacaacggtggtggtggtgcccagaaacccaaggacaaagagggcggcttcttctccaatttcttctcgaatccggcggtgagtcaagcggtgtccggtatcattgcaggccagatagccaagcaactgcaaggcggcggagccggaggaccaggtggtggacagccggctggcggctaccagccaagcggtggctatggcggaggaccagcagcaggaggcggcggatccggtggtagtaacatacttggcggtctcttgggatccgttctatccggcggcggtggtggtaatgcaggcgctggcggcggtagtgctagcagcttcctggggagtctgctcagcggtggaaattccaacagaggcgctcagcaaggaggcggaggttctggaggactgggcgacatcttcagctcgaaaaactttggcggcctcttcagtgagaatccctcatccaggagcggcagtccctcatcctcctccgacggaggagccaagggctatcccacccaggcaccgggcaactattatggctaagctgcagcgactgaagtagctagcctagcattccatgtggagatcgactttggagtctcctttcaaaacagtctttttttcgtccttcggcaatgtaatcaaatggagaactttcaacgacattaactgaaacaatattgaaatatataagcatattattcgaaactattaatgacgatatacaaatacaatacatatatatatataaacatatatactcgataaatgagagaacagtcagatgtaatttgagataccgtgcgcgtagaatcccccagaaaacaacagatcccaattcgaagttcatttgtaaatagaaaagtaactgatattgaatttaaacaagataatatacgtaagaattgaaagccagctcatgcgcgttttaattgtgattggttgttgtgtaaatgggccaaaatgttgatcctcgagttggtaagtattgtagaatcgaagtttgagacaaatgtacgtcctcttgaggataatattaaagatatcctttaaacttattcatttattgttaaaacatatttattttattaagtaaagtttagtttagacaacttgctaatatgtgtaaataattattaacaaactttaattaaaaaatgcttgtacgatttgtaagaagtgttcaccacagcgttaatccattgaaaaaaacataattttagacatattttacctcaaaattttaaatttctttaacaatttgtaagtttgatgggttacatatcactaattcaatgcccccttataacttaaaaatcttatttttagaaaaggtaaaacataactagtattaatttttttcgttggctgtaaagttgttggacatgcaagtgaacttcaataaaatagatttgagtagccagccacccagccacaatgtaagttggccaaaagcatatgtacatatgtacatttcgagaatgctgtggactcacgtctgtttggctagccccccccccaaataaatggaaagtgtaaatgg

SEQ ID NO: 2099 - DNA, 807 bp, DROSOPHILA
cagaggtgagccataacgcatacgccccgaatgccccaagtgccccgagtgccccgttgccggaagcggatcctacccaactcaaacggcggcggcggtggtgcggctccctacaatccatatggcagtggtggcggcaacggtggatacggcggctacaatccctacaacggcggctaccagccaccatcttctggcggctatcaacctcaagctcctggcggataccaacccagaccgggctacacgccacccgccccaggctacgataacaacggtggtggtggtgcccagaaacccaaggacaaagagggcggcttcttctccaatttcttctcgaatccggcggtgagtcaagcggtgtccggtatcattgcaggccagatagccaagcaactgcaaggcggcggagccggaggaccaggtggtggacagccggctggcggctaccagccaagcggtggctatggcggaggaccagcagcaggaggcggcggatccggtggtagtaacatacttggcggtctcttgggatccgttctatccggcggcggtggtggtaatgcaggcgctggcggcggtagtgctagcagcttcctggggagtctgctcagcggtggaaattccaacagaggcgctcagcaaggaggcggaggttctggaggactgggcgacatcttcagctcgaaaaactttggcggcctcttcagtgagaatccctcatccaggagcggcagtccctcatcctcctccgacggaggagccaagggctatcccacccaggcaccgggcaactattatggctaa

SEQ ID NO: 2100 - protein, 258 aa, DROSOPHILA
MPQVPRVPRCRKRILPNSNGGGGGAAPYNPYGSGGGNGGYGGYNPYNGGYQPPSSGGYQPQAPGGYQPRPGYTPPAPGYDNNGGGGAQKPKDKEGGFFSNFFSNPAVSQAVSGIIAGQIAKQLQGGGAGGPGGGQPAGGYQPSGGYGGGPAAGGGGSGGSNILGGLLGSVLSGGGGGNAGAGGGSASSFLGSLLSGGNSNRGAQQGGGGSGGLGDIFSSKNFGGLFSENPSSRSGSPSSSSDGGAKGYPTQAPGNYYG

SEQ ID NO: 2101 - DNA, 3023 bp, DROSOPHILA
ctccataaatctgctatgaacgcggagtgacgcgaactgagagcatgaaagacagaagtggaaaatgggaagtaatacaataaagagaccaaactctagaaccattttctgttctactttgctttctcttttgccttttttatcaacatcgtcagatgtgctctccgctggatagcactctttttaatttattactccgtttctcctatttttgagcattagctttttgttgctattatatatatgctttactcgtagagtaaagtgttatactagatgagataaaaagtacgtaaaagttataaggaattataagttgttacattttattattatttgctaacttctatcgattttttttaaagaatttcgaaatattttgtgcaacgatgtgccatacacgttatttattgttattttattttaatataatggttcacttttaatttaaaaattttgaaatacttccttaatggccattgatgcatgcttctggtattgcaattgaaaagcattaagaaacaaaaaaaaacgcaaaaataatctatttgcttatgcgtgtacctaatacactgaacaaaatgcttttaagtgtcaatgactttgaaatatcattatcctttcaacagtctttaaatgttataatttcaatttaattaacattccatcatatctcataatttttgcatatttttcgttcaacctaacaattctatgacattttttgaatttcgtatatttgtattttaaattgtatttacattacaaccttaaattttgaaatcaactacttttagagagcatgactgctttttaattgcatagggttaaaagttaagcaatatgtttggttttatatttttatagactttacaggaagcttgatctatacaacgtaaataggacatattttcgaatcttattcgaaaaaaaattaatagatccactaaatggcacgcctttttgtgcttccgctggattactattaagtaaatttgattcatcctatcatgaggccacatcccagccgaaaactatttttttggtgattcatacgaccgctaatggccaacgagaacggtagcggctgcagtcttttctcaaggactccggaaataagccaattggaatcgagactgccgcggaagactaggtctgccttgggcagatcaatctggtatgccaccgtggccgtcgactcttgctggcggatattcgtttccacctcgactccgatctgtagctgatcactggccttctggtagtaactaaggtggaatccggcgggtcccaaagtgcaagaccacacggtatcaccgaaggcgtaacgtcccaccgctgataatacagccacttggcgtccgggcacattcggcccgtagtgataggcgaactccgatcctagcgccagacgtttggtgacggactgcaagtactggcacacaaatactccggaactcgtaaaaaaccccggattgcccattgtcagggtcagcgtgtagtctctgccgcgatagtcccccgtcagctgggtgcccaccagctttgagtcctggaactgcgaggcaaacttgcacctcaaacgagaggtcagttgatggataacgtttgcattaagattgcccatcggatcgatctcgccaagaagaaccggaaaggcttcagtcggcccgtattgtttggtacccacgtaggtagctccaaaacgatagccacttggaccagccgaattcatgttaatggtgtgggtcacttggaagtggttgctcagacccttgttcaccataattttggcgccttcgaaggtgttggcctggatgtcgcgacagcgactgtgcagttcctcaagagttccgggatttgtcaattcgggctttttagcttccgcctttaaggcctccaccatctgtggcggcactccgccggaatactgcggtgcctccggcaagcgtagtccggcggacagatgtccacgcccacgagaggactcagcgtctgcggtggacgccattacgttgcccattctggaaccgttttggatctaacgtgattaaattttttttcttttttgcttctaccaaaattgttttccgttccggcgttgtgtgtttgtgctcaaacttcaaaataaatacaaaaacaaacttatatgctgtcaaggagcttcaaatttaataatttttctgattgctttgattcgggcttaaatgatcaacttcttctaagcaaagcttggacaaacagaaacactcagcagaaatccaaacgaagtaaatcgagaattgaagctcatctgtttagttggttaatattttgctgaactttagtaagccccattaacatataagatatatctcatctttaatttttcaattaatttacctcattctacgcccaacgaaaaaaatagcgatatcattgcggtaataataacacttatttaaggtttctatccaccgtaagtataaaatgcttcagtttaatattttaaatcattcagggagcaaatgctacgcctaattttaaagttatttcacacttaagtcgtacacatacagaatggggaaaataactttgcgatacttacaacaaaatccgctcaaagtgactgcataatgtgtgcctatcacaaccaagacatctcctaacttagccatataccacaggctaatacacttttggctcagaatcggtgaagcaaaagtcgaccaactttattttgctacaaacacagtaaacaaacttcatctgcgccctaaacaacttatacatacgcataaaaaagctcattgactgaaagatacaagcaactttgaagaaggaggaaaagcaggcctggctcggttagctgagtgggtgtgggtgaaaaacttgccaagaaaatatttccgacgacatccgctttccgttcggagacgccgcgcattgctgctggctgggtgtcagaagaaaaaggagtcctggaaccattacaaaagctaataaacgcacactctctctcacataaataggcactgagagaa

SEQ ID NO: 2102 - DNA, 1023 bp, DROSOPHILA
atgggcaacgtaatggcgtccaccgcagacgctgagtcctctcgtgggcgtggacatctgtccgccggactacgcttgccggaggcaccgcagtattccggcggagtgccgccacagatggtggaggccttaaaggcggaagctaaaaagcccgaattgacaaatcccggaactcttgaggaactgcacagtcgctgtcgcgacatccaggccaacaccttcgaaggcgccaaaattatggtgaacaagggtctgagcaaccacttccaagtgacccacaccattaacatgaattcggctggtccaagtggctatcgttttggagctacctacgtgggtaccaaacaatacgggccgactgaagcctttccggttcttcttggcgagatcgatccgatgggcaatcttaatgcaaacgttatccatcaactgacctctcgtttgaggtgcaagtttgcctcgcagttccaggactcaaagctggtgggcacccagctgacgggggactatcgcggcagagactacacgctgaccctgacaatgggcaatccggggttttttacgagttccggagtatttgtgtgccagtacttgcagtccgtcaccaaacgtctggcgctaggatcggagttcgcctatcactacgggccgaatgtgcccggacgccaagtggctgtattatcagcggtgggacgttacgccttcggtgataccgtgtggtcttgcactttgggacccgccggattccaccttagttactaccagaaggccagtgatcagctacagatcggagtcgaggtggaaacgaatatccgccagcaagagtcgacggccacggtggcataccagattgatctgcccaaggcagacctagtcttccgcggcagtctcgattccaattggcttatttccggagtccttgagaaaagactgcagccgctaccgttctcgttggccattagcggtcgtatgaatcaccaaaaaaatagttttcggctgggatgtggcctcatgataggatga

SEQ ID NO: 2103 - protein, 340 aa, DROSOPHILA
MGNVMASTADAESSRGRGHLSAGLRLPEAPQYSGGVPPQMVEALKAEAKKPELTNPGTLEELHSRCRDIQANTFEGAKIMVNKGLSNHFQVTHTINMNSAGPSGYRFGATYVGTKQYGPTEAFPVLLGEIDPMGNLNANVIHQLTSRLRCKFASQFQDSKLVGTQLTGDYRGRDYTLTLTMGNPGFFTSSGVFVCQYLQSVTKRLALGSEFAYHYGPNVPGRQVAVLSAVGRYAFGDTVWSCTLGPAGFHLSYYQKASDQLQIGVEVETNIRQQESTATVAYQIDLPKADLVFRGSLDSNWLISGVLEKRLQPLPFSLAISGRMNHQKNSFRLGCGLMIG

SEQ ID NO: 2104 - DNA, 2671 bp, DROSOPHILA
cctttcggcaattatttgacttttcctgtacttgctttatatcatcatctgtatttacaacaacatccctttcacacatgcaagtgcaagcaggaggacaaccaccacacagagacacaaaaaaaaactaaaaggtgcaccgttaaaaaagtttaatgtcccttttttagtcctgcaggcaaatcaaggtaacttttcatgcttctcttcacttgatcctttttcacgcttttcgcttctccttctgaacttctacacttcacagaaaccgacaccgactgtatattttgctatgtatattatacacggacacacactcactggcaaaaaggacatgcgtttggcacagccttcgggcattttatgtttaatataaataagtagcggcagcacgttggagaatatatattacggttttctgctctgctcacgggaacactagttctagttgggatcagtgtgaccagaggcgcgctgcgtgtgcagcccaatcagaagtcctgggcaaacgttcaaagcgagcgcgggaaataggtccgcaagcattgcaagtattacctttggatttagcagaaatgcattaatattacatttagtattacattttatacaggaaatggcagctacatttgtgtgttcaaagttgcgtaaatatgaattccaattggaaagttgccgataggtacttatcgagtggaagcactatactatcgatatggaataactttatttattctaataaacatttaaggaacacctactatttcattctaagcccctttccagcctaattaaatttaaatgtatgttgaaatgatccaatttcaattctattttcctttctgcataatattaagccatctatcaacaatatttcatcattataaaagaagagattaaaactatccaagcaaaggattacaacacaatgcattttaaacgtacgaaacgaaagatgtatttattttcggtacgctaacgtagggccgaccaaacaattgagttgcgctaccgaattaaatattaattccggaactcgaatcacggatttcaatttcgggctgggtgcagactacgggccacatactttggatgtcggcggcgaaacgcagcgcggaaaaaaatgtgcttacatgataattttttgtttaaaaatagatttaacagtaggacagtgacggaagcgtccacggactcggatacccagatcccggtgtcggtgtcgattaagcgaacaaatctacaggtcgccgccacctcgcttttggagcatctgagcgaaccgctgggtgataagcagcgacgtgtcgatgaatcggtcgacgcagttgctcaggcacgtctcggtggcgtggtccagcttggtactcggcttgccgatgcacttctcccagcagatctcgttgaactcgtgtatctggcgacgatataatgtgcgagggcatattgttatgattacgaatggttattatgtgtatgggggaacccggctcacctgcgcgttgacctgtgccttctgtttctcaatcaagaggaactcctgcagctccttgtcattgccggaaaggttctcaaaatcggacatcgtgtgattttcagtgagcaatctacaaattgaccgggctcgtccggaatttcatatattctaaggtttgaggttatataaacgacactgacagctgtgaactgtggaattacaaaaatcgatgtgtattcgatagcaaagctattcgatactggaaatgccgtgcatattgcactgtttgcactgttgtcatatttaaatggcaagaatatagacgccatagagcaaataacagtatatttttttttcttaagcatcctcctcctgccaacgagggtatacaattttcaagaatacatttctaaagtaagttgttatttatatttactgagaactatcgaaaaagaactagaacctcgcgttgccaaccactggttcgcaaggtgcgatagtacaggttattggacaatcgatgacaaagtggctcggccgtcggccaatcgatatcgtgaggtgcaaattgtccgatgaatttcactgaaattcgtggcttgtattgtagcttcgcaattgcagcttcgtttcgacagcaggcccactttcagatcgaaggcgtctataatcgccatccagtcccgtcgccctgttcccacaacgccccacaaatttcgggatctagctggcgtttcgggtgtctaatttcggaccagtgcactgtgatttccgatttccagtttactttgctgacggatcgcccaagtggcgaagtggttcttgctcggaaagttggcgcttgctaaaagaaggagcagtccaggtggttccccgccagtggcatcaatggaactcgcgctggagtttggggcaaccttgcaactgcaagggtaagagcatcgccgattccaggagcattcgcagtaagcccaaaaatagcaactcaagtcagtcgcggtggtcattgttattggcaagaagaagaggaaacggatagaacgcggcaaattcctaggaaagctcccatgatctagcttcagtgcggccgcgtaaggaaactgctccagccaaggaactgggcttgcaggagcagcagatagcacccagcccacaagggaccactcaccgacaatcctctcatggccctggcca

SEQ ID NO: 2105 - DNA, 593 bp, DROSOPHILA
gtcgtttatataacctcaaaccttagaatatatgaaattccggacgagcccggtcaatttgtagattgctcactgaaaatcacacgatgtccgattttgagaacctttccggcaatgacaaggagctgcaggagttcctcttgattgagaaacagaaggcacaggtcaacgcgcagatacacgagttcaacgagatctgctgggagaagtgcatcggcaagccgagtaccaagctggaccacgccaccgagacgtgcctgagcaactgcgtcgaccgattcatcgacacgtcgctgcttatcacccagcggttcgctcagatgctccaaaagcgaggtggcggcgacctgtagatttgttcgcttaatcgacaccgacaccgggatctgggtatccgagtccgtggacgcttccgtcactgtcctactgttaaatctatttttaaacaaaaaattatcatgtaagcacatttttttccgcgctgcgtttcgccgccgacatccaaagtatgtggcccgtagtctgcacccagcccgaaattgaaatccgtgattcgagttccggaattaatatttaattcggtagcgcaactc

SEQ ID NO: 2106 - protein, 88 aa, DROSOPHILA
MSDFENLSGNDKELQEFLLIEKQKAQVNAQIHEFNEICWEKCIGKPSTKLDHATETCLSNCVDRFIDTSLLITQRFAQMLQKRGGGDL

SEQ ID NO: 2107 - DNA, 20453 bp, DROSOPHILA
taccttattcgctagtaagcactaatcaaacaaaatcgtgcactaaaaacttagtataaatatcgttagctttaatataaagaaaatgtgttacgcccgttggcagttttcccgttctcgttgctatatgtactttctccttctggccagtttagctacaacgagcaacaacaacagcgcaccggaaacggaaatgggcgacgcttggcccacaaaagcgagaaggccgagcgccttaagcgtcttaagtaagtaacgattcgttaaaaagccaggaaaatgggcaaaaaggcggataaatacactggcgtgctcccaattacactggcctcaccaatggcgatttaaaattgtgggcgttaccgcccacgttccgtgccacatgaataattaagctgaaaatgcggttgcagtgtaacatgcaacttaaaaaatcgaattcaaattccatctgttgtctgaatatggcactaaatccggtctttgactcgattcctggcaaaaaactagagcaatgtatttatcatacggaatgttagtggaaggtgggtatctttgtcctcattttggtcgcctcatatattaaacaatatgaataagacggtttgaatttagcttaacttagcgataaactatggttgcatcgttttttaattaatcacaaaatgtagcaacaacgatattttcaaccttatgcgttaaatgagttaaatgttgagcaatttaatcaaagcctccgaaaaattaattaatttgtttgattcttttgtgaagacccgaaatgaagtgcaaatgggagcagcctcgaaattgcgaactaatgaattctttgagcagaggggggggggggctaattacacagccagctgttttccacctccttggcttttccgcgagctgattgctctgccctcgaggacttttccacgccgggaaaatggcggggtaaaactaggtggactcaaaagcgcgcttaagcattttggcttgaatgccgttgttatggcgaagttggtaatggtgttggtgttgaatttggctttgatgttgatgttgatgtggatggaggctcacgaggactcgcttgcgctggtgtgcgtttgggtatgtctgtgtaagtgactgtatctgtatctgtgactgattttcaactgaagctgttggcgcatatcattaaattgcaggaacttacagtctgggacccgctcctcgatttggatccctgctgctgctgcggattctgctgctgcggggagcgggaactgcgctgctgcgcttgctgctgcttttgctgctgctcgacagttggctccttggcattttccgtgtccgattcgatgcgcatgcgctgattctgcgaaagaaacccaaaggaagagcgatcagtaacgatatcgaaataatcgttccgtgtatcaaactagcgttcgatatcgttgttattcttaattgccacattcctagccatttctcatgataagacaactcctccaacttatatattattaagttttacatttgcacattggctgttcataaaaatcgatgtatgtacatatcgtaaatcgctttttgtatatcgataggattcggcgctacctttccccacttacgttggcacaacagcaggcatatcgcgaaccgataccaccccccgattcattgtccttttcagtttccttctccttttccttatcctttttctgccgctccctggattgatgttgatcctgttgttgttgttggtggtagtgttgttgctgttgttgttggggaggcggcgccgtcaattgacgtcgacgtcgacgcattcgcaccggcgaccgcgaaccaacataatttgaaaagcgacgcctcgaatgtcgcactatcgacacccagtcgatcatttttcacagtgtactcgtatccaaatttcccccgcgatatgttttagtttaaagctcttgttctattttttttatcggtgggatttggttggttttcagttgttcactttgtgcgtttcattttatcttaaaaaataaatttgtgagagttgaaaaatgatcgtatggattcacaattcgtctcgtttggtttattgttattaatttattcatttatatcatcttgtgttgtaatttatttaaagaaatcatgtaaagcgctcaacatcaacagtacaatgggatgcccactttgccactgaagagttgcgatagcaacaagttgggtgcaagcagccggaaaagcggaaaagctggaacgactggaattgaaatcggcaccctcgttgtctttgtttgttttccaccggctacacacacacacgcacacacacgcacaacaacagataaaaatctgtttgcgatttccatatttgccactcgcaaatgggacaaaagcatatacaaagattgctttttcgcagcaaaactttttggtaggtgaatatttgaaaaaataatacacaaagaaacacaatttattaaccggaaataactgattccgcttggtaatgctaaatattttccaagtttgaaatgagtcattaatcacaaccatcaattttctgcgaaccctgtttatttggttttcattgaggaatatttgatttgtgatcacttggccagcatcaatatttacatttaaaatgtattattttatgatttgtgtttacattagttttgatatcttcaatgttgagatataaaacagtaactctagatgatttttcacaatttctatttggtttctagtgagatttttattgtttcggagcaaaaagttcgtttggcgttcagatttttatcgagtgtatgccaaggtccaaaaagcgaatgccgaacactttttgtttacagtcggagcggagaaacatgtgttctcatgtgcggatgttctaaaaacgaaagattctatagtagctgctgtgggaaaatgctctcgaaactagcagcagaaaatgaaaatccaaagcgcgtttttggcatgaaagaaacgcaagaaacggcaggcgatgcgagctgccaaaataaatagattgatatattgctcgtctcatttatgttgtttttcttgttgctttaacgatgttttccaatgccagacggccatgaatgaaaaactcgacgagtggcagtgaaagaaaccgaaaaaagtcggaaaatagcagggaaaccgaaaagggctgagttagcaaatattcaagcaaatatattcaacttattcatcaagactgtggtctgtaaacgaaataccgaaaatacgtattaattttgtatggaatttcgcactaaacataaacgtgtcaaccgtatggctgtgaatttattaagaattccagcaattaattaaagtaatggctcaattaactgctgtgcaggtttaatcacttttaatttgcgccacctggtggtgcttttaattggtgagcgattgctgttgggcacgtggggcgtatacgtaatatttggaagcatgcctgatgttgctcatccgccccgttgttcacctgccacctagcaatgcccccaaactgggtcttgttttatgtatcttgttcgttttttttttttcttctctttccccattcgatgcgtacattctgtgttacaattatgtaaaatgtttgttttttggcgccaaagtcgatgagtgatggacacgcatgtggcagggaaacacgaagaaaagcgaggaaaaaatattagccggccagcgactgataacgacgccaaagggaaaacagaaatattgacttgaccacgatacagctcacacaaaaggaaaacgaaaataaactactttaatatcggtttttaagaaatgttgcacgttgaacacgcagtgggtttttcttagtttttattgtgtaatgtttataattaatttataaaatgttctgtttttttttttaacatcccatgtgcgcattaaatagctctattatgcgttaatctacaaattatacacatttttaattaaaattttaagtttttgcttggaaaaagccaaacaaaagccatgcgaattgtgaatcaaacgttaatattttgttttttttttttgtgcctgcccacgtttaacgagggttaaacagcgtctggtgggttaaagggtattccccgcacccacacacgcacacgcaccacctacacacacacacacttggagaaggcagacagacacgcgccgctatgcaaaattgttgtgcgactcgacgcgtcaacggcacgactgttactaccgcctttgccgttccgtttgccgctgccgtttttcctttacgccatatgccaccacccaccggcgtcccctcgccacggattggcccagcgcccagcaccaacaccccaccccccccccccccccgagaggaataccaccgcacaccagaccacaccagacccacgggtccatgtccgttcgccaaaaaccgagtgtgttcgtgtgttaccgcctctgtcgacgtcgctgccggcggcgctgcctcggcccggccaaacaaaaaataaaataaaaaagcaagaaaaaaactgaaaaaaactaaaaaaaaaatgaaacaaaaaaataatacaacaatttggcaacaaaacagagagagcggcaaaagaaataagtaatgggaaccttgggcaatcattcattggttagcactgataacaaacatttgccggcagcatccttcaaacccaagacagatttaccgaagcgatgcagtaaagcctcgctatgcgaaaatttgcacaaaaaaatatatatataaaaaacgaacaagaaaaagtaagtcaagtgtactttttcgttgattttctacgccagacattgtatatttgttacacaatagaaacaaaaggtgttccatatgcgagtgcacactgtagccgtcaacagtttaccgttcgtctagcgcctatcgtttaccgttgcccgatttgtgacgtgtaccagcgcgccgtttcgctatttcgccgttccgatttcacgatttctgaatttcacgactcgacgacttgacgaccctccgatttttagtacgcatgtcccaggcgacaaacaacaaaaaggcaacaacaatgcgggcgcgaaaggacaacaaacaaagtaaattgccgaccgtgggtgcaagtgggacggcagcaggcggtgcgagcgggacggcaggcgaaagcgaaaggtcggaaatctgagcctttgtgtctgctcctagtttttctttcctttttcgttaatacatatatatatatttttttaatgtgtaggtatagtacagcgacatcaatcagctcaaacggaaacgaaaaggatacgactagcgattaccttccaaagtttgcgtatttcgctgatttataactataatcatatgtttggttgaaggaactcaaacttgtgtagctgttcttggaacaattggaacgggtatttaaaacataccctatagaaggggtatcacttgaaggggtattgcattccagcacatgtatgatgtacatacatacatacatatctatttaatttccaagtgccccaccaggttgtcagagccacttaagccgcagcaattcgaggggacatctgggcgtaaggacattcaaccgcctcgctctcgaggattgagcaccactaccgcccatttccaagcactcaccacgtgctcggatcccgggacatgttcaagagatttcaattagctatgggggcacctaatgcctgtgctctcgattcttttattttattttttttttttgcattaactgcatgcatggggccaagtgggggtcgccacttaaatgggacgaaggatattagcctgtctatgcgcataactgagatttttagaacaataagagcttatacccattaagcagtgagttaataaacagttaattatactcggtaattacatacctacatatgtatgtgttatgtttgtttagattcccagagtttgtgacagaatggcagatggatattaggcatatgtttatgatcttaatgggaatgatgtatgctgtgcgtttcttaccaagatctcttccaattcactcttaaatgttctgctgagggcctcggcctgcgcttgggcactcacattattcgcgatcggattctgattgagtgctgattggttggtttgattggatgaggcgtcgttgttaaactcataggcgcaattgcgattgaggtttgaagatttgataaactgtgcgattttcggggatagtaagcagtagtagtagtagtagtagtagtagtatagtagtagtatagtagtatagtagtagtatagtagtagtagtggtatagtagcatagtagtatagtagtagtagtagtatagtagtatagtagtagtagtagtggtagtagtatagtagtagataagtagagcagtagtagtagtataagttgtagtatttgttgtaggcgtggagtggaagaagagaagaacagagaacagtatagagtagagcagatcgagtgagatgcaaacaacggcggaaacggaagttaatgctatcgggtttcaaaggaaattcaaataatttaaaaaaaaaactccaaaaaacaaggtaacatatatcattgcatacttagtggcacaatttaagaaccagagcatctaaaaactcgtttaaataggcaaaatctaggaaagtagattgaacggaacaatatagggtatatattaaactcgaagagaaacaggccaagatatatatatacatatcaaagaaaatgcactcctaaggaatggaatttaggatcaaaacagagaaagaatacatttaaggagagacataaccatctagattcaagaacaggtcagaatacagattaatataaacactattgaggatatatataaaagtaccaacatatgtcataaaaagggaactaattatgaaaaaataggaatagaatatatgaatgaatggatgaataatcataactatgaattttgcagcagaataagtacgtttcacgaaatgacagttaatgatgttcaaaagataagatcggtgtaaacaggtggatataagttcactagttgggttttacatattccccagcactaactttcggcccaaaaaacacaggatttataaatactatataaaacaatttaagttcctcgatcaaacagatcctactcacatcagctattttgactgcctggccatccttttcccatttggttgcaatttgcaaggtctccgctgtcttttgttgtatgctcttcgagtcatccaataatgtcaattcatagaattcttgtatatctgcaattgaaggaaatacataattaataagagtataataattataattcttaaaactattttcttatattattcgctgttttgttctagtttaaggagcaatcatggttcagcagtaaacattatttcagctttcagaaaaaactttccacttttaaatgtataaatatatttatataatattgtatacttctgtgagacaggtatcgctacaaagatgttttccattctacatttgaagtatattcaattcttgtttctattctacatttttataatattcaattttagttttaaaaacatcttatgagcaggtttctgtcgtttcagaatgacacgagaatgtcatacatttttacaagcaaaaaaaaactaaatttaatatgtatttaatatatgctatcaatatataatcaatagacttgtattgcaatatacaaatacttcagctctgctctttctatctacttcataaatattatttaatttttcgtcattgatgacgcgttttctgcaaattctgccatgtttgcgtgtagataaaaagttttcttccaatactcaaattctttcaatttcaattctgaaagaaaagacaacgagttagacaatttggccatttaatcggaatacaaatttgcttacctcacacatgattgttccttccgagaagaaactctattcaaatgggcagcttatcgaccgtttttaaggctgttgtttgtatttttttcgatatttccgaatcgaacttgcttttgattgcctactcagcggaaaaggaaaaaatcaagctcaaattcgagcgagagctgctgagtaaataactccttcacaccagaacggattcttggattgtgaaaacaaacagggaataaataacaaaaaaaaaggggccactgcggttaataaagttgaacacattgaataacgacaacaagcaactaaagtgcaatcgaacgaataaacaaacggatcgaaaactttgttggcattctgcagttaacttgtggtgcgaaagtacactgagaaaaatgcaacaaccaaccgccgagtgatcggaaaaatcaagttaaacaacttgatgcataagttaaataacatttagatgttatcattctttaaagacaaatcagtaaatattgaattcaaaaatttttcaatgcttacatacatttttaaaatcaagtgtcgccttaattgtttcatagatattacattatttaatcctccactaaaccagccagcttctttaaattcacattgtccgtcggtgtgaaatgggctttaattgttggcttagtgcagtgccataggaggcatcgagcagcttttgctcgggaagcggaaatcagaaactgtcagaatgcatctcgaatgcatacatttcaatgcaaactgacgccgccactgacagcggaagggaatgggcgttgggggtgtggctgtgcttatacgaacacacaatatacccatatgctgctgccaatatgtttcgcttcaacagcagtcaagtggcccaaatgggggaaactaaaatccgacttttcagggagaaaaaaaaagaagcaaaattgaaacgaaatccatggcgcccatttaatttcctgcgccccaaaacagggcagccccaaaaagagcaagcgagacagctggtcggatagaacgagagagagagagagagagagcacgtaattccatggggcattgctgggccaccaatatattgcatggaaaagtacgcgcagtcattgaaatgtgtgtacataaagtacagctcactgggaaactaaaggtttcccgggggaactgtgcaaggcaatttgaaactaaatatttcaaatttgcaaagctgaaaagaaacaccctactaatattaatcaagcagacgaaactttcgaaaacgttttcgaacattattacaagcttcagatacctaaaaaaatatatgttggccctacgattaaacaagcagcttagcatatatacaagaagttgcttaaaatttgtaaatcttcaatggagaattgcctgtattttatcgagagaccactgtaccacgttatgcaatggattcggccacttgaactcaaaatgagttatcgaatgctttagaatgctttcccgaaaatgcccttttaagcattgttatttttttcattcctccattatttgtgtgccttcaatttgtgttctgcatgtttttcatcggtatttgtgtttgttttattttttattgcggccacattttttagctggcctcagctgaatgccaatgccgttgaaaaagagatgctaaacttcaggttacaccatctctctctatcttcatctcgctgtggggaattccaggaaatcgataagacccctcaaaagtatccacaatatatttgcatacatatgtatgtatcatttacaatagcaggggataataatagcagcgatttcaatcacaatttatgtaacttaaagtagcaaataacttattgacttatagtaagctgcgtatagatttaaaaattaatatcttatgcttgttacagtttatctcacgtatagtggttttattcgcttgaccgcaatcgtatctcactcgtaaacatatacactagtgtatgtatgtaaatgtaagtgtgctgcagatgattccaattctaggccaattaaattgggatttcgcccgcacatggctcttcatgaccttttgcccccccccgtcccgcacacaacccctggcgcatccttatctctatccttcgcttcaacttgagtgtcaattgtggtgcctgtgcaacactgagaaccaagccaaaaactatggcaaaaaaaaatcaaactctgatgcccaaacatagtttttccaacgatattactcatacgcagtgttattcggttgcacagtagtagtgctttcaaacgcagttgaaatgttttcagtgttattacagcataacagattcaatgcaaatatgttcaacaaaagcgggaaagagacggaaagagactggaatctaacctcaagtttgatactatacccaaaacacacacacacacacatacgtttcgggtgtttgggatgcggctaataccttgttaattatttcacacgcacacacatgcatacaccacctcaaattcccttgggtggaccttaactgtgggttgatttcaaggctgtgaactctttttatcgtaatacatgtgacccatatctatcataagaaaaatcaagtactggcatcgtgtttaaaaactctcttcttcaatttagtttagctttccttctaaactagcagagcgacgtgactgatcatgttctgtcgaagtgcgaccctgcgagtttttaagttaaggtccacccttgtgtttggccatacaaaagctcctgttttctaacgtgtcacgtgtttggcttgtttgcatttgagtttgtgtgtgcttgttagccgtttaacatttctgacacgccaagcgcagccactgaaactgtaacgataacgggagaagaggaagcaccagcgggatacgccgaacaagaggaatagggacaagaagaaccaaaacaatgggaagaatggaaagaggtagggggagaggacccaagcgaaacgaaacgaaaaggattatgcaactgccactgacagcgggcaacacaatttgcacccaggggtccaatagaaagggacggggtcacagagcgagacgcggagcgagcgggagagagccataggggactagaatgagatggagcacggcggtagagcagaacttttgcaaattatacaacaggcaagacccacaaaacagacaactgcaaaccaaccgcccgtctcgaaatggatggacatatggacagagagagatgagaggcggatacgttgctgaaaaaaagaaaagatgggcgagcaaaaaaaaaagtgtactgcaaacagtgctgccaaaaatccaaaagtagctaagagctaatccagacaaaactgtcaaatgagaaaaacaagctgtcaaatcttgggcaaaaatgtctcaataaatgggaacggcttaaaaaactgcttaaatatacaatgataaggcaacaatggcagggaaattaacttttcttaataggaaagtatttagttatagtgataattaggttcatcttaagcttgagactataggtaatatgagggaaaccaacaagttgctagtgaaaatcaatggctccttcgccatatgccaccaaaatgcactccatgatgcaactggagcactaatcaggccgtctatcgacccttttgagtaaccagagtcggtaaagaaaaaaaaaacaagctgaattagccgcattactatgggacgcttgctgtttccattgcgctgcgctgcttggtctatttgacccaaatcctatgcaatattatcgttttgctgtcgctgttgctgcaattccctttgttgctactttgtgctcactgcttgcttgtcaagtgaaaataatttgcaacgcgaggggagggacaagaaaatcgataggcgataggcaatggacgatagacaactgcacagataagaactacttttcaaggatctttctttccggctcatcaactactttctaacaatcttggcacaaagttcgcaactttgtttgcgtttaaagtttcagaatcaatagacgatgatgatgagcttggttaaggctcttgcttataacgaacttgtgaaaaacttatttagcacactgacctatataataaagtatttcacaaaaatgcacttatctagcggcaattatttagatatttttaaaggcaaaaacttacgagcgacgcgaatagcgtctaagatatacatataggatattttcatcgatttaatcgatacattatcgattactcacctaacagcgcttgaaacaagcgagatttaaatatgcgtataacgcgttcgattgcaatacgcagcgcccgatcctgcggctccgaaagtctcgcgtggtagtcctcgagcagctcgagagcccgatgagcttctgaaatatatagagaaaagaatatggttagtacaaatgatcttcgattgttttattatgaaatcaacccaaaagaccaagggattctgcctgcccatttttccccactggattagtgcctactctgtatgtccgcaatgcgctcctcctcatcctgactgatcgccagacccgcctggccgaagatcgttgaccagaagcccctctcggaaccctgttccgaaccactttccccagccgcatcctgtacgtgggatctctgcttgggctttggcttcgccttgctcttggccttcaactgcagctccgattgcgatttctcgagactttcccgctcgagagtctcgatcatggtgcgaaatcggctcagttccatgcgcaaaccctcggcactgtggcgactcgacgaagagacggagagtccggaaatgccggagagaaggcgacaacgggctgcgcccgaggatgacgacgacggaccctcccactcgtcgcgcgaagcatcgctctcggacttctcaaagtagccagactccacatccggtgttcggaccatcgaagtggaggacagcatgtgtccgtactcgagaagatcctgggcggaatagaagcattcaacggactcgcggacactatcgcgcagggatgttggacacttcggaggctcgggatccggttcggttacggtctccatttggtgttccatcacctccagttgcgaatccccatccatatcgctagctttggcagctactgccaccggattggtatcatcgatttcttggcgcacttctatggcttccgccgacggctgtaccaagaccaccaaaggtggctggtcttggtcgcagcgaatctgtgccttcttctgcggcagcaggcactcctcctcctcgggctcctcctcatcgtccgccggagaggaatcctccgccggttcatcatcgtcgtggaatgtcttgtcatcgctactgagcagtccctcgttgggatcgctgctcttctcccgctccgagtccgtatccgaatccattaccaggaccagccaagaagacacctctcttcgcgcccaagtgccgcactcaactggctagacttttgagctctattatggttctatagtttggtggctgctaccgccgataaatcaataaagattgacgctttttaaacatttttcaccgcttgtcggacgccagttattaacgcttttttttttttgtttttttgtttccatgaagggtgtgtgcctaaaattccccatcctaaatgctttaacttgaaaatctgaatagcaacgaagttgtgtgttgctgcgcatagtttgatgtccccatgcgaagaggtcaggggtcaagtgccataccgtcgctggcttgtcattcgtgccgcgtttgccaaaaaattaaacacataatttattattataatcgagtcgcattatggtcccaaaacacacgcacacacacacacatacagagcacacaaaccaaactatacatactcgtatctaaatgaacattgtatctgtggccgcagtttgatgtcctcagcacgcgtcaaacgccgacgttgaccttcactgaccatttgcgaggctgctggcagcgcttttccccggttttcccattttccgtctgctgcggctcctctctttccccctcccccttcccccttccgcaccatttcatttcatctcttctgttggccatttgagttgcccaaatatgatttgtatgtgacataatcaaataaaattctttgtctgcattaatttagctggttttttatgtattttttttttttttttttgttgcatagcttccaatgcacagttggatacattgtttgtttggccaaaagtgccatctcgtgtgtaattggaagcagctttgctggctaactttgcgcagcacgtaaaagttaaatgatctactaaaattacaattgaaaaactaatgccaactttctatatactatatggtgcttaaaactttcaccagcaaatcaatgcagttttgcatagacatagcttttttaataggttctaactttatttcacaatagttaaggttatttttctaaatttgttatgcatagaattatgtaaaatgtgatcttaaaccattgtgttaagttttaaactactttttcaattgctgaaaactggcaaacagttttcactgtccaccattcataaggtccattcaattgaatggatttccacgtaatgccaaagacagatatgtagaacagaaaataaaaaaagaagaagaaggagggaaaggtgggaaaggtgggcagtgaataaaagtgcaatttttcgcttaccttgctttttcactggcattctgtgagcggtgtttctgctactatttatggtggtgctggtggaaatggcagcggaaatggcggtggtgcagcagctttgattgtggttcaacgccgccgaactgggaaaagcgtgggtcgcaattttgagaatttactggagtcgctttcgagtggaaatgtgcggaaaaatcgctttggcttttccttgagttctcctccttttagtttcgccagcacatctgtatatatatctgatatatatgtatatatatatatatactattcgatggtgttttatgtacaaatattgttttgttagatactttggctttcgaacaaagttcgagatttgttgttttttttttaattttgcgctttcagtttgctagtttattttttaatttctttatatattttacttttcgttttcttggggcagctttgtggttacattgacgtgtgcgttttctctcgatttctttgcgattttcacatttcacagctcaatggctcctcacattcacattcggttctatagcatttatgttgcactttatattgcaatgcgactatcatcgaaatgtcgtactttcctcgtcacaacacaacaacaccaacacaaaaaaaaactcagatcgtttatttgcttacttcgcgttcacttgatttgattctatattgcattcaccatctgaaagtcgaaagaaaaacaagtggagaaggtttgaggaacacggctcctttggattttttctcaacggcacccattttgttgtataatcataaaaacaaaaaaaaaaaaaacaaaaattacgaaaattgcagacacacacgggcgcagttgaatgcgcttccgattgcaacaaaatgggtacagtggtaactcgctgcgtggtatttcgtatctaacttctattgatcaaatattaatagcatattcttcaatatgcaaatatttttatgagaattttagcagaattgtaaagtatattcaatgtttcagcatcagttaaatatgatgctacactgaaaatattcctataatattataaaacaccgttgtccattatcgagtgaccactgtagctgactctttttttcagacactcatatttgggaaataagaaaaattgaatagcgtcgcagcgatgtcgaaattctcgtctgcccgcttgtttcgcgatcgccattgtcgagctgattccgattttattcacatattttcgccagtctgtgtgagttggctgctttttgctatttcagctaaatggttttttatttctgccatgcagttgatctagtttcacttgaaacaaaaaaaaaatgaacaaaaaagaactcataaacaaggcaagaaccgaatacagtgaatgctgagagttgaatttcgcagtgcctttggcttgataacttgttacattggccaggtcgaaagaccaaaattccgcacacccgcaccgcacacagacacacgtccaactgaggcaataacggtgctctgcttttggccctcaatcgccagcctctcgccccctctcctcctctcacccatcctctcagctggccgccacctctctctctctctctcactctctctctctctcttcgaccgagaatcccgagcgattctcgtcgagcgccgctcgccggaccaacaattagtgcctgcacatatactcgtacaccggatgccatgccagataccagatgctatatggctatatggccacgtatctttctatctgtctacctttataccattctatctttctaccattatatctttctatcattcaaactatctacatttctatctttatatctttctatatttctatctttctatctatttatccttatatatatttatcgttctacctttctatctgtttatctttctaccattctagctttctaactatctatatttctaactttatatctttatatctttatatctttccatctttccatctttatatctatctatatatctagccaatggaatggtatatggtatatattagtacaaatttattattttgcctttggtttgctataaggagtattggcttttagataaaatgtttatatttccataatttccaaacaaacatgtgcaatacttcgctctactgccctaccaagcgatatcaacaaactctctggccaatttgtttatagatcaaataaataagccaaacacacaattcagattcgcttagggtagtcccccgacattggaaattaacaagaaaccaaatcataataaagtttatgtgagcgatgagcgataaaataaacatttgaatgatctgaaaccagatcattcacacgtcataaaaaaagaggtaaatattcaaaaaaaggaagatctaaaagttcaaatcagttgaaatgtacgtaactatgcaatttccttcgacaacaaatgattgactgttgaaagttataaaataaattgccataaatatcggggaaatgtccgaaccgacaattctaactgccgtggagtccattattttgacaggcaagtcgagatcctcgtgcattttggttctctactagagggaaagccatcgggcaaaaggcactttgattaatgtggtggacgtcagtgacgcgaattacttaaaaaacaattgaacaactagacgggtcaatacacagcgaacccggaaggccagacgaagtttggggcgcggaaggaagtgacagcgggggaggcggaaaaactgagctaacgactggaaactaggaaacgcgcatcggcaaagacagcaacaacaacgagaataataataataataataataacagcaacagcagcaacaaccacgacggctgtggggttcaatcacctttgggaattacgtaccggttattatggttattattattattatcctgcccgcagtttgccacaatcgtactttggcctacacacaaacacgagagtagcgaaatgaaatggatacttcgagttgataatcaaaaggatatgtgcatatattatatgaaactgaataatataatactacactttagttctgcatctatggttttcgaattctttcgttagatcccatttattttgctacatcctaagcagcctaaagtcaaggttatttttgaatttttgccctattttcttgcggtgtacctacgctctgactgatttagtgagtgagttggatttctatacgtttaatttatgtgcgtcatttgtttcctatttttaatgtctttcggccgcttgaagtactgtttttttttttgtatttttttttctttttaaggcgcacacacgtcgtataattgatatgcatactttctcacacacgctcgtgtgtgtacgattgtattgcctatttttatggtccacgagtcctattcagcgggcatgtgtgcgtggtacagtgaacactgaccaagcggaatttatggcacaaatatagaacaagaacattatgttaaataattgggcaaagtcgaaaaatgatcgaattaagatcaaaatataatgtatataatcattaaaaattttattctttatgcatgaaggagttagtgagcgttcactgtagcccacataagcacttcaacggactgacatacgcacacatgctcacacacacgcattcacctgctgcaggcgcgaacccagaaaagtatgcagcaaaaaggagagcatatgcaataaacactcaattccacacacacacacacacacacgcatttgaggcacacacttgcagcgagatattaaccgttacggattgacgttcgcctggcggatttttgaccttgacatgtcgcccgtggttgtaattgtagttgttttcggtggaccggagtggcgagcatgtcaaaaactggaggaaaatcggagaaaatcgaacggcgtgctgggtgcggggaggcgggtggaaaactgggtcgcagatagaggtggccattaattattcagtcacagcataattattcgaccgttctggtgtgcgtgttatttatagactagccaaaacgaacaaataaaaaaaaacaacgaaaaactgagatactacaataaaataatacacacataatgtatgcacaaaggcggaagcgagacagagcgacggcgagggagagcaaaagagagaggacgaaagagcgagagagcattgtaaacttattaataccagtaccacacatccgcaacaaaactccccgttattgcaaattaacccccctcctctcagcgaatgcataaaaaaatggatgctgtgaattatgtatgctccacacatacacacatacacacttattgcaactgcagtgttttcgcacggaaaaaaaatcagctggctgctgtaccgttacgcacacacatacacacacgtgccctttcggcaattatttgacttttcctgtacttgctttatatcatcatctgtatttacaacaacatccctttcacacatgcaagtgcaagcaggaggacaaccaccacacagagacacaaaaaaaaactaaaaggtgcaccgttaaaaaagtttaatgtcccttttttagtcctgcaggcaaatcaaggtaacttttcatgcttctcttcacttgatcctttttcacgcttttcgcttctccttctgaacttctacacttcacagaaaccgacaccgactgtatattttgctatgtatattatacacggacacacactcactggcaaaaaggacatgcgtttggcacagccttcgggcattttatgtttaatataaataagtagcggcagcacgttggagaatatatattacggttttctgctctgctcacgggaacactagttctagttgggatcagtgtgaccagaggcgcgctgcgtgtgcagcccaatcagaagtcctgggcaaacgttcaaagcgagcgcgggaaataggtccgcaagcattgcaagtattacctttggatttagcagaaatgcattaatattacatttagtattacattttatacaggaaatggcagctacatttgtgtgttcaaagttgcgtaaatatgaattccaattggaaagttgccgataggtacttatcgagtggaagcactatactatcgatatggaataactttatttattctaataaacatttaaggaacacctactatttcattctaagcccctttccagcctaattaaatttaaatgtatgttgaaatgatccaatttcaattctattttcctttctgcataatattaagccatctatcaacaatatttcatcattataaaagaagagattaaaactatccaagcaaaggattacaacacaatgcattttaaacgtacgaaacgaaagatgtatttattttcggtacgctaacgtagggccgaccaaacaattgagttgcgctaccgaattaaatattaattccggaactcgaatcacggatttcaatttcgggctgggtgcagactacgggccacatactttggatgtcggcggcgaaacgcagcgcggaaaaaaatgtgcttacatgataattttttgtttaaaaatagatttaacagtaggacagtgacggaagcgtccacggactcggatacccagatcccggtgtcggtgtcgattaagcgaacaaatctacaggtcgccgccacctcgcttttggagcatctgagcgaaccgctgggtgataagcagcgacgtgtcgatgaatcggtcgacgcagttgctcaggcacgtctcggtggcgtggtccagcttggtactcggcttgccgatgcacttctcccagcagatctcgttgaactcgtgtatctggcgacgatataatgtgcgagggcatatt

SEQ ID NO: 2108 - DNA, 1279 bp, DROSOPHILA
ctagaactagtgttcccgtgagcagagcagaaaaccgtaatatatattctccaacgtgctgccgctacttatttatattaaacataaaatgcccgaaggctgtgccaaacgcatgtcctttttgccaatggtgaatgcaatatagaatcaaatcaagtgaacgcgaagtaagcaaataaacgatctgagtttttttttgtgttggtgttgttgtgttgtgacgaggaaagtacgacatttcgatgatagtcgcattgcaatataaagtgcaacataaatgctatagaaccgaatgtgaatgtgaggagccattgagctgtgaaatgtgaaaatcgcaaagaaatcgagagaaaacgcacacgtcaatgtaaccacaaagctgccccaagaaaacgaaaagtaaaatatataaagaaattaaaaaataaactagcaaactgaaagcgcaaaattaaaaaaaaaacaacaaatctcgaactttgttcgaaagccaaagtatctaacaaaacaatatttgtacataaaacaccatcgaatagtatatatatatatatacatatatatcagatatatatacagatgtgctggcgaaactaaaaggaggagaactcaaggaaaagccaaagcgatttttccgcacatttccactcgaaagcgactccagtaaattctcaaaattgcgacccacgcttttcccagttcggcggcgttgaaccacaatcaaagctgctgcaccaccgccatttccgctgccatttccaccagcaccaccataaatagtagcagaaacaccgctcacagaatgccagtgaaaaagcaagaagctcatcgggctctcgagctgctcgaggactaccacgcgagactttcggagccgcaggatcgggcgctgcgtattgcaatcgaacgcgttatacgcatatttaaatctcgcttgtttcaagcgctgttagatatacaagaattctatgaattgacattattggatgactcgaagagcatacaacaaaagacagcggagaccttgcaaattgcaaccaaatgggaaaaggatggccaggcagtcaaaatagctgataatcagcgcatgcgcatcgaatcggacacggaaaatgccaaggagccaactgtcgagcagcagcaaaagcagcagcaagcgcagcagcgcagttcccgctccccgcagcagcagaatccgcagcagcagcagggatccaaatcgaggagcgggtcccagactccaaattcaacaccaacaccattaccaacttcgccataa

SEQ ID NO: 2109 - protein, 158 aa, DROSOPHILA
MPVKKQEAHRALELLEDYHARLSEPQDRALRIAIERVIRIFKSRLFQALLDIQEFYELTLLDDSKSIQQKTAETLQIATKWEKDGQAVKIADNQRMRIESDTENAKEPTVEQQQKQQQAQQRSSRSPQQQNPQQQQGSKSRSGSQTPNSTPTPLPTSP

SEQ ID NO: 2110 - DNA, 3290 bp, DROSOPHILA
gagctccgctggcgatgatcgcacccaggattcgactggcgcatccgcctcgctgagggcgttcatcttcttcacatagtcctctggtttttcgcagaagttagaacaccactgtctcaacagacggtccctttcggtctccaccttcggtttggccctagtcttctctaaggtctcatttctctccctttcgtgatggccacgtggcgaatagtcatcgctgacttggtttctggctgcagatccatagtatccgtgttgcgacccctttgcctgcctgtgggcatagtgtccgtgtcgtggctcgtgggcatatcgactgtcctgaatttgacggtgttcctgatcatgtctttgttcataccgcctacccgagctatagccgggataatggtggtagccttgactggagctgttggaagtgtacctctgcctttcggatggaggtcggtagttggacgaataagcaggatagcggtctgggtatttatagctttcatagaggaatgatgatccggatgccgggtactggtattggtaatgggactcctggccaccatacttctgtgcttgttcgttgtaagcatatccctcgtagccgtacgctggtggttgctggtacggatcatagctaggtactgagctggcataaggagccggtgtctccgggtagacgtaatccaaagacttcgagctctgagaatgggattcatttgaagaatagttgtgagagggaacacctactcccggtggagatagatcttcttctggcggaggtggcgggggcggaggagcaggctggactggaggcggtggcaaaggcggctggtacatggcgaaaagttttgggaaaatctttggcaaaatccacaattatacttttttccacccacaccttttaccgcgattcgaatgatctggcaactcgaccggtttgtttacattcgcacatccggcaaggccgtgccacatatgtttcgatagacaacgtaagaaaattatgttacttccgcggtatttttgctggaacctccaacgctgcacgatggcgttttacgctgtagccagtgggcggcggtctggagtctacggctcttgggcagagtgcgaggagcaggtcaagggtttcaagaacgccaaatacaagaagtttaagacacgccaggaagcggatcagttcgttaatggctgcaagtcgtatgctccgcaggatgtggccgtgccgctgggcaaggaaaaggcgtcactggccagttggaaaaacagtatcgaagtgaataagaaccccaagtacacagatgagtggcccgaagaggatcacgacctagccgaggatgatctggtaggcatgaatatacatacgtttgcaaagtcctgacctttcatcctttcagaatgctgccatgaacgaggttgagggagatccaaagccatctaacagtagcaatttagtatgagaccgtagtacatactgtagaaaaagttaaacatagcttctttcagccagacattctcaatcgcaagcggaagggcacaaccagcggcgataagcggaacaagatcccacgtcatgcctctcaggtctcagaagccacaggactcaagcaagtgggtgccttccagtttgaaatcgatgcagagggctatgtcattgtgtacacagatggctcctgcataggcaacggacgagccggagcctgtgccggctatggcgtttatttcggcaagaatcaccagctgtaagtggtaactgcagcacaataactttgcttttaacctatatgttctttgcagaaacgcagccaagcccgtggaaggacgcgttacaaataatgtaggtgaaatacaagcggccattcatgccattaaaacagctcttgacttgggaatacagaagctgtgcatcagcacagactctcagtttttgatcaactccataacgctgtgggttgcgggttggaaaaaaagggattggaagctaaagaacaatcagcctgttaaaaacgttgttgacttcaaggaactggataaactgcttcaggagaacaacatcaccgtgaaatgggtgcgtaactaaatttaaataaggtcctggaaaatacttgacttcagttaatatccccagaactatgtggaggcccacaagggcatagagggcaatgaaatggcagacaaattggcgcggcaaggatccgccttgtataagcagaaaaatggttgaaaagctattttaaatttaccgtatttttagtatgtaattgatatggcaacgctgaataaattttagttacgcgacagccctggtccaaatgtttttatttacaatttacttcagtcgcttttaatataagttagtttgcaaaaaatgcattccaagggaaataaccagtgcttactgttcaccttggttttgggcttactgggaggcgcgggacattgttatgtagtcgaaccacctatcgttcacgtggaaatggaaaaagccggcatgcacaggtttttatattggagagcggtttatggattacctgaattaaagtgataaatgtttatgcaggacccttaattaccgtctgcggttcgatatacccttggtgggcaaggactgcgagtatgcgctggtccaggatttgcccgcatccgtttacataagcacagacgaactggatgacctgcagcgtttgaagagggtgcgttatcttgggaattagttacaagggttactatataaaaaaatgttcgtctccagttaaatgccatctatcctaagttcgtcaacattgaagtagccacggaacgggcgcagcccttctccgttttactgcgcggtacaccaaagattacggaatcgctggctctgcccgtgcattttcgctaccatgcccccagtgataagcggtgtggtgatcttgaagtctgaattgctttcgtccactagactaatcaattaatcctcacagtttggcggcaacggtggccatacccctacccgagctctatctcaactgcccgatggctgatagtgcgctcatcgaaaacgagttggttgcccggcccgataagctgtactgcctgaatgcgccggaaagccgtttcgacgagaaccatatcaaggatggccaacccacgaccatggctaatctggagcgctgcaactggaggcgggtgcacgtggactgccagctaaagatgccgctgcgtgccgagattccggtaggccatgctagcgcctacggtccagttctgtgcggcaccatcctgctaggttggtctctggccctgtggaccat

SEQ ID NO: 2111 - DNA, 1071 bp, DROSOPHILA
atgttacttccgcggtatttttgctggaacctccaacgctgcacgatggcgttttacgctgtagccagtgggcggcggtctggagtctacggctcttgggcagagtgcgaggagcaggtcaagggtttcaagaacgccaaatacaagaagtttaagacacgccaggaagcggatcagttcgttaatggctgcaagtcgtatgctccgcaggatgtggccgtgccgctgggcaaggaaaaggcgtcactggccagttggaaaaacagtatcgaagtgaataagaaccccaagtacacagatgagtggcccgaagaggatcacgacctagccgaggatgatctgaatgctgccatgaacgaggttgagggagatccaaagccatctaacagtagcaatttaccagacattctcaatcgcaagcggaagggcacaaccagcggcgataagcggaacaagatcccacgtcatgcctctcaggtctcagaagccacaggactcaagcaagtgggtgccttccagtttgaaatcgatgcagagggctatgtcattgtgtacacagatggctcctgcataggcaacggacgagccggagcctgtgccggctatggcgtttatttcggcaagaatcaccagctaaacgcagccaagcccgtggaaggacgcgttacaaataatgtaggtgaaatacaagcggccattcatgccattaaaacagctcttgacttgggaatacagaagctgtgcatcagcacagactctcagtttttgatcaactccataacgctgtgggttgcgggttggaaaaaaagggattggaagctaaagaacaatcagcctgttaaaaacgttgttgacttcaaggaactggataaactgcttcaggagaacaacatcaccgtgaaatggaactatgtggaggcccacaagggcatagagggcaatgaaatggcagacaaattggcgcggcaaggatccgccttgtataagcagaaaaatggttgaaaagctattttaaatttaccgtatttttagtatgtaattgatatggcaacgctgaataaattttagtta

SEQ ID NO: 2112 - protein, 333 aa, DROSOPHILA
MLLPRYFCWNLQRCTMAFYAVASGRRSGVYGSWAECEEQVKGFKNAKYKKFKTRQEADQFVNGCKSYAPQDVAVPLGKEKASLASWKNSIEVNKNPKYTDEWPEEDHDLAEDDLNAAMNEVEGDPKPSNSSNLPDILNRKRKGTTSGDKRNKIPRHASQVSEATGLKQVGAFQFEIDAEGYVIVYTDGSCIGNGRAGACAGYGVYFGKNHQLNAAKPVEGRVTNNVGEIQAAIHAIKTALDLGIQKLCISTDSQFLINSITLWVAGWKKRDWKLKNNQPVKNVVDFKELDKLLQENNITVKWNYVEAHKGIEGNEMADKLARQGSALYKQKNG

SEQ ID NO: 2113 - DNA, 4223 bp, DROSOPHILA
gaaaaggtttctgtataagctcttctacacaaaaaaaacacattattttcattaattctatttttaacttcaagatcttaccgtacagtgaagccttatcgaggaatcctgtttcttttttaggtgaatccatgtctgccgcgtctggtctttttccaagggcgactggcaatcttaagagcccaattagggaactaataagaaaaataagtagtgtatgtatccgtatttcgaactgaagaaaagccggaggaatggaaactgagatgccggttttatttcggggcagcggtgccagagttttcgcgattgccgcgaaatagcggctgattttcgcatgtggtgacttaagcaactgctttcatgcctacatatgtatgtaggtccaatatgtgttcatatatccaccatcgtttggtcaatatcacttcagttcacaaaagccaccggcacacgaagtcggacttaaacgggttccgtcagctaaaagtaaaagttaattgcccgcgtgtgagtgcaattgtgcgataatgagcgtaactgcgctattgctcaaggctttgtttgtgctcgggctgaccgtactttcgggaccaggaagagtggctgcctacgatcccaatgatcctaagatagccgagtgctgcctgccaccggaggggatgttcgaggccttttatccccgtgaggtggagggaatccccaatagcgcatcgcgacccgcacacggacatggcagcttcttcaagcaccggaacccagcgctagtggacaccaagaacgcggcggcctatggctataggttcgacggcaagaggcgtttcaacttcgattagttccgcttttaaaatctgtattattcgcaaataaagcccctttttgaaaacgaaaatataacgatctattttctcaacggtaaatcgaactgcagtgagctggcaaccctgccaggcatgcagccctaatattccgtgtgattgacacttatgtctagagcacaagaagaagaaatcaacatttttttcttcgaaattcattcgtttaaaagcgtaaaaaaatgtgtttctgaatcaaattcaaatataattcacataattctgtaaataccgttataatacccaaatcaccaacacatgatgaacgggcgcagcatcggcatgctgaaaaagctcaggcacacctggcgcacgtaagaatctcgcggagtggtgaaaagtgggctgttgtggagccggcgaatctaataagtgccctatctccaaacacaatgcaggtttccacgccttatggccaccaaggtgaccagtctgggtggcgacgaggtgggcagtggcacaggaatcggacagatcaccggcggcgtgcgtacaagtgatgggccacagaaagtgaacacgccttccaaggagattgtcacccacctgccacctctcaccgagccactgcccaacctgccggaggccgtttacgcagctccactggcggaaagcgccattacgaaggtaacgacgctgccgaacggtctgcggattgcctcggaaccgcggtacggacagttctgcactgtgggcctggttatcgactccgggccgcgctacgaagtcgcttaccccagcggcgtgtcgcactttctcgaaaagctagcttttaatgtgagccaagttgcgcttatgtaatgtaggatctcggctaatccgtctactcattccaaagtccacagtcaactttcccaacaaggacgccatacttaaggagctggagaagaacggaggcatttgcgactgtcagagctcgcgggacacgctcatttatgccgccagcatcgacagccgggctattgattccgtgacgcgtctgctggcggacgtcactttgcggcccacacttagcgaccaggaggtgagtctggccaggcgggccgtcaactttgagctggagacactgggcatgcggcctgagcaggagccaatactgatggacatgatccacgcggcagcattcagggacaataccttgggcctgcccaagctatgtccccttgagaacctggaccacataaaccgcaatgtgctaatgaactaccttaagtaccatcactctcccaagcgcatggtcatcgctggtgtaggcgtaagtgtaaaaaatctcttttgtactcggatttcagttaaagaatatcttttcaggtggatcatgatgagctggttagccatgtgcaaagatactttgtggaggacaaagccatctgggaaacggaagccctggaggactcgggacctaagcaagtagatacgtctattgcacaatacactggcggattagtaaaggtgggtgcaataatactttgattaacttcttaataaacatgaactgcccataggaacaatgcgaaatcccaatctatgcggccgctgggctaccagagctggcccatgtaattctcggatttgaaggctgttcccaccaggacaaggacttcgttcccctgtgcgtcctgaatatcatgatgggcggtggtggatccttctccgcaggcggtcctggcaagggcatgtactcgcgcctgtataccaaggtgctaaaccgctaccactggatgtacagcgccacggcctacaatcatgcttacggcgattgtggtctcttctgtgttcacggtagcgcaccgccacagcacatgaacgacatggtcgaggtcctgacccgcgagatgatgggcatggccgcagagccaggccgtgaagagctaatgcgctcgaagatccagcttcagtccatgttactaatgaacctggagtcgagacccgttgtgttcgaggacgtgggccgccaagtgctggtgacggggcagcgaaaacgaccgcagcattttatcaaggaaattggtaaaagcatcttaattaatcaattaatgctatcatttaactcgttaattcatattacagaaagtgtaactgccgccgatatccaacgcgttgctcaacgtctcctgagctcgccgccttctgtggccgcccgcggcgacatccacaatcttcccgagatgagccacatcaccaacgcggtcagtggttcaggacgtaccgggctgggacgtaggctttccttgttcaaatagcgctgggtgtgagaccgcctccattggatatcatttcgctttgtttacaatattgtgcgaagggcaaccgtgttaagtttaaattggctaaaaaccaaaattcccaaaattcgactcggttattttatttgttgctttaatggtatttttaattaggcgacaattagagacaggcaaatttttgtcctctaacatcttacttagaaagtaagatgtcctgatagcaaaggggagaattgcatctactaaatgagcgattcattaagataacccattacatttttacaccgctcccacgattgtcttactcaatttgggcctcctatagctatagcatacgcaaagctgttcatcccagcgaagattttgaagacaccgaggaacatttctttaatcggcgcttgcacttcggagaagaggttgagccatcgctatcactgctgctgctgctgctactactgccacttctgttacttcttaagggcactagaaacgaaaaggatacctatagatacctattaatcacagcacaccgtatctattaacttacttgttggactcttgggagcagtgctttcgaagtcttcgtcttccggcaactcatcgctggaaatgttctcgtgcatgcgatattgcttaggaagatggctctcatcctgaagcggtgtcgcatatttgggccgcttgattttttcttcttgatgctggcgatcactgtcgttgtccaattcgttgcccgtttgtttctttatgctcttggcgatcacgcgcttttggtgatccagttggggaaacaggtcccttgaattctccagcgcctgcttagcggcgttcatctccgcctgctgaatggaggagccacttgaagtggccagccgctttgagcggaaataaacggccaccttgtatacccgcgtattagttggaccactggcctccaccaccttgtagtagggaatgtccggctcgccgccatccattgtgcgaagtgtgaggcagcactgctgcagcttcgacttgggatcgttccagtcctgattcatgataaacaactgaagtcgcgggaacaaacatacatggcaaaactgttcacaatacaggagac

SEQ ID NO: 2114 - DNA, 1909 bp, DROSOPHILA
agaagaagaaatcaacatttttttcttcgaaattcattcgtttaaaagcgtaaaaaaatgtgtttctgaatcaaattcaaatataattcacataattctgtaaataccgttataatacccaaatcaccaacacatgatgaacgggcgcagcatcggcatgctgaaaaagctcaggcacacctggcgcacgtttccacgccttatggccaccaaggtgaccagtctgggtggcgacgaggtgggcagtggcacaggaatcggacagatcaccggcggcgtgcgtacaagtgatgggccacagaaagtgaacacgccttccaaggagattgtcacccacctgccacctctcaccgagccactgcccaacctgccggaggccgtttacgcagctccactggcggaaagcgccattacgaaggtaacgacgctgccgaacggtctgcggattgcctcggaaccgcggtacggacagttctgcactgtgggcctggttatcgactccgggccgcgctacgaagtcgcttaccccagcggcgtgtcgcactttctcgaaaagctagcttttaattccacagtcaactttcccaacaaggacgccatacttaaggagctggagaagaacggaggcatttgcgactgtcagagctcgcgggacacgctcatttatgccgccagcatcgacagccgggctattgattccgtgacgcgtctgctggcggacgtcactttgcggcccacacttagcgaccaggaggtgagtctggccaggcgggccgtcaactttgagctggagacactgggcatgcggcctgagcaggagccaatactgatggacatgatccacgcggcagcattcagggacaataccttgggcctgcccaagctatgtccccttgagaacctggaccacataaaccgcaatgtgctaatgaactaccttaagtaccatcactctcccaagcgcatggtcatcgctggtgtaggcgtggatcatgatgagctggttagccatgtgcaaagatactttgtggaggacaaagccatctgggaaacggaagccctggaggactcgggacctaagcaagtagatacgtctattgcacaatacactggcggattagtaaaggaacaatgcgaaatcccaatctatgcggccgctgggctaccagagctggcccatgtaattctcggatttgaaggctgttcccaccaggacaaggacttcgttcccctgtgcgtcctgaatatcatgatgggcggtggtggatccttctccgcaggcggtcctggcaagggcatgtactcgcgcctgtataccaaggtgctaaaccgctaccactggatgtacagcgccacggcctacaatcatgcttacggcgattgtggtctcttctgtgttcacggtagcgcaccgccacagcacatgaacgacatggtcgaggtcctgacccgcgagatgatgggcatggccgcagagccaggccgtgaagagctaatgcgctcgaagatccagcttcagtccatgttactaatgaacctggagtcgagacccgttgtgttcgaggacgtgggccgccaagtgctggtgacggggcagcgaaaacgaccgcagcattttatcaaggaaattgaaagtgtaactgccgccgatatccaacgcgttgctcaacgtctcctgagctcgccgccttctgtggccgcccgcggcgacatccacaatcttcccgagatgagccacatcaccaacgcggtcagtggttcaggacgtaccgggctgggacgtaggctttccttgttcaaatagcgctgggtgtgagaccgcctccattggatatcatttcgctttgtttacaatattgtgcgaagggcaaccgtgttaagtttaaattggctaaaaaccaaaattccc

SEQ ID NO: 2115 - protein, 556 aa, DROSOPHILA
MMNGRSIGMLKKLRHTWRTFPRLMATKVTSLGGDEVGSGTGIGQITGGVRTSDGPQKVNTPSKEIVTHLPPLTEPLPNLPEAVYAAPLAESAITKVTTLPNGLRIASEPRYGQFCTVGLVIDSGPRYEVAYPSGVSHFLEKLAFNSTVNFPNKDAILKELEKNGGICDCQSSRDTLIYAASIDSRAIDSVTRLLADVTLRPTLSDQEVSLARRAVNFELETLGMRPEQEPILMDMIHAAAFRDNTLGLPKLCPLENLDHINRNVLMNYLKYHHSPKRMVIAGVGVDHDELVSHVQRYFVEDKAIWETEALEDSGPKQVDTSIAQYTGGLVKEQCEIPIYAAAGLPELAHVILGFEGCSHQDKDFVPLCVLNIMMGGGGSFSAGGPGKGMYSRLYTKVLNRYHWMYSATAYNHAYGDCGLFCVHGSAPPQHMNDMVEVLTREMMGMAAEPGREELMRSKIQLQSMLLMNLESRPVVFEDVGRQVLVTGQRKRPQHFIKEIESVTAADIQRVAQRLLSSPPSVAARGDIHNLPEMSHITNAVSGSGRTGLGRRLSLFK

SEQ ID NO: 2116 - DNA, 1943 bp, DROSOPHILA
atatatatatatatatatagagtattttctctgtactgaccggagagggggctaagaagaggaaggctgggcgggattgggatcatacccaaaactaacgctaacaagaaaacccgctctcttttccccgcgtgccatcgactgtcactaaccactaacaggatcgagtctgggacagggacccgagaacaacatctttgcacccgcctcatcgaatcccacgcttaacacctacacgtacaaccatcagcagggtggcggcgataacggtggtgatggcgctcatggccatggccacggaaatggtaacgccggaaatggaaacgatcgcgacaagggcggcaacgcgggggcggcaggcgcctcctcgacgggcgtaatagatccgcactacgtgttcggtgccaagcaccacatgcccgtcataccgaacatgcccatcttcccgtacaactcgcccacgtcggcgcctccgtttcagcagtttcctcaacccaatcatccaggcagcgtcctcaaccccggctaccccatgcacggcctgcagccggtgaacccgtacaatccgcccttcatctttggccagctgccattctatggcggtggcgggccgaccgggactggcggtccgcccggcggcgttggaggcggcggcaatggcggcgtcggcggcggcgtcggactgcccagttcgaccttgggcatcctcggcggcggcggcggcggcctggcgccgtacggcagcaactaccagggctatcagagccagcactccaacgcgaatatgtacaacaagccgccgccgcagtaccagaaccagaaccaacagaacccctacaaccggcgcacccaggcgcatccctcggcagccggcagtctgggcggactgggtatgcccgtcctaatcttggggctcgtcctggccctcctgccgcagacgtaataggctggggcggtagcagcagaatagcggtacaaggccacagaacaccaatcccgaagaccccctggaaattaacaacccatcccttatgttcgggataacctttggaatgagcccattttcactgaactgttcccactaaccactaaggatcactctttcaattaacccaactcttatcaattttctaagacatgtctggtgcattcattctgagattgaagaaaaatgctagttttatttaaatcattatcgatttaagaaatattaaagcagtaaacgaatacttttcaaactaaatgagcagtaaaaatgggatctcacatgaaggttatgccttacatattattttgttttccttattatccatttatctttttatttttatttttttactttttgttttggcttaggcttaagaataatgtaaaagcagtagcagcagcagtaagattggcatttaaaaattgtacgagattaaagttggtcgataatttacttgcataatttacttgcatatatatttttgacatatttggaacaattgtagttctgatttgctcttaagcgcacgctgcgtatacgtaacttcaaggactgtagcttactggatacttaattacttttttttggacaagtccttcggacataagtcgttttataaatgattttgtagatcaggaataagtggaaggaatatttgattgataagaaaatattgtaaatttttgctgggcatctattaaagcttcgcttgatgctaacttctcgtacaattcactacaattcaaaggttgtattttaattacactataagctgtaagcctttgccaccctcgttctacgtattttggcattttctcggctgcctttgctgtctggctcacactgcgaatacgtaatttcaatttaatattgtgtagaagagtgtgctcgtgtgtgtgtgaattttcggctatcagtcaaggggaactgccggcccctgggagccgctcttttt

SEQ ID NO: 2117 - DNA, 782 bp, DROSOPHILA
gatcgagtctgggacagggacccgagaacaacatctttgcacccgcctcatcgaatcccacgcttaacacctacacgtacaaccatcagcagggtggcggcgataacggtggtgatggcgctcatggccatggccacggaaatggtaacgccggaaatggaaacgatcgcgacaagggcggcaacgcgggggcggcaggcgcctcctcgacgggcgtaatagatccgcactacgtgttcggtgccaagcaccacatgcccgtcataccgaacatgcccatcttcccgtacaactcgcccacgtcggcgcctccgtttcagcagtttcctcaacccaatcatccaggcagcgtcctcaaccccggctaccccatgcacggcctgcagccggtgaacccgtacaatccgcccttcatctttggccagctgccattctatggcggtggcgggccgaccgggactggcggtccgcccggcggcgttggaggcggcggcaatggcggcgtcggcggcggcgtcggactgcccagttcgaccttgggcatcctcggcggcggcggcggcggcctggcgccgtacggcagcaactaccagggctatcagagccagcactccaacgcgaatatgtacaacaagccgccgccgcagtaccagaaccagaaccaacagaacccctacaaccggcgcacccaggcgcatccctcggcagccggcagtctgggcggactgggtatgcccgtcctaatcttggggctcgtcctggccctcctgccgcagacgtaa

SEQ ID NO: 2118 - protein, 175 aa, DROSOPHILA
MPVIPNMPIFPYNSPTSAPPFQQFPQPNHPGSVLNPGYPMHGLQPVNPYNPPFIFGQLPFYGGGGPTGTGGPPGGVGGGGNGGVGGGVGLPSSTLGILGGGGGGLAPYGSNYQGYQSQHSNANMYNKPPPQYQNQNQQNPYNRRTQAHPSAAGSLGGLGMPVLILGLVLALLPQT

SEQ ID NO: 2119 - DNA, 5720 bp, DROSOPHILA
gaggacgtgtagctgttgtggcgcacccgtttctcctccttgtgggcgcggaagttgccagacttttttgagttcctcgaatggggattgttgccgcctttgggcgcagctgcatctccgttggccgaggagttgctgctgtttggactgttggagcgactgttctcgttgctgggcggcgtgaacgagtgtcggcgcttgtagggcgtttttagcttctcctccttgaccaggcgctcgaactttacctcgttgacgccatccaggaactcaaatgccatctcccggccctcgccatctttggactccagattaccgtcggctgtctcctttttggccaaggaaccgcagctggcagcgctgctattcaaggaactggaggcctgcacgtgcaaacaagagaattaattgtgttcccgatcgtagcagccaaccttcacttacctcgtcactgtggccaaactccgcgcggacctcctgggcccagctctgcatggtgggcttcacatcgatcgaaatggaggatgctgaggaattcaggctgccggagcctttctgcggtgtgttctccacggacatgtgctgatcctcgcagagcatgttgtgcaattatctttcgtttgtttactgtgctgtgtatgatgcggtccgctgctccaggatgttgtcgcggcggtgttttgcgttttctgcgcaaaccttcgcgcgttttttgttgtagatgcgatgctcagtgtgcccagaagtggaggtggtaagaaggcggcaaaaaggtaccacaacacagaacaacctggtcactcacaactaatttcaaactatgctccaaatgtattacatttcatttcaattttgttaaaatttgatgtccaatacatatttaaacatacagaaaattaacagcgatttttaaattgtctgagggaggctcaaacaatatcgatgcatcggtacacatcgatagcaagacatcgagcaaccaaccattaccaacactgtctgcttaccgagtgatttagcattttttcggcacaaaagaaaactgaaaattaaaacggtgcaattgttggttagtacgcaaaagaacgatttgttttcatagcaaacgtaaagttttcgagcccaagttgaacatacgtcactttaaaatccgtagaacatatttttgactggaaacaacgcagctggaaaatgagtcttacgtccgccgcggggataatttccctactcgatgagccaatgccggatcttaaggtgttcgccctcaaaaagctggacaacatcgtggatgagttctggccggagatctcggagtccatcgagaagatcgagatgctgcacgaggatcgcagcttccccgaaaacaagctagctggcatggtggcctccaaggtgttctatcacctgggctccttcgaggacgctctgacgtacgccctgggcgctggtgatctgttcgacgtgaatgcccgcaatgagtacacggagaccatcattgccaagtgcatcgacttctacattgcccagcgggtggagttcatcgagaaccctaaggaggcgagtgtcgtggacgagcggctggagggcattgtgaacaggatgattcagcgctgtctggacgacaaccagttccgccaggctctgggcatcgctctggagacccgtcgcatggacaccttcaaggacgctatcatgaagtcggacgatgtgcgtggcatgctggcctacgcctacaacgtgaccatgtccctcatccagaaccgtggcttccgcaatgaggtgctgcgctgtctggtcagtctgtaccgtgatctgggtgtgccggactacgtgaatatgtgtcagtgcctcatcttcctggaggaccccttcgccgtagccgagatgctggacaacctcacacggtcctcggtggagacaaacaatctgatggcctatcagattgcctttgatttgtacgagtcggccacgcaagagtttctgggcaatgtgctgcagcacctcaaaaacaccgctcctatcccaaccgccctccccagcacatttaagccccagggtaccacctccgaggatggtgccaagtcggagggagacaagtccaagtctgacgaggatatcacagaggagacgccaggtaaacccggttttctaatccagtcccttaaaatacttataaatcgcattttattcacctagctgatgataaagtagagcgcacaatcgattcccttaacgaggttgaaaagttgcatcagaagaacattgaaaagctcatatcgatcctctccggcgaggtttccatcgacctacagctccaattcctcatccgcagcaaccacgccgatttgcaggtccttcgaggcacaaaggaagcggtccgcgtgtctatctgccacacagccactgttattgccaacgccttcatgcacagcggcaccacctccgaccaattcctgcgcgacaacctcgactggctggccagggccacgaattgggccaagctgacggcaaccgcttcgcttggagtaattcatcggggtcacgagaaggattccctggctctcatgcagagctatctgccaaaggaggccggtccaagttctggttactctgagggtggtgccctttatgctttgggcttgatccatgcgaatcacggagctaacattatagactacctgctgcaacagctgaaggatgcccaaaacgagaatgtgcgtcatggcggctgcctgggactaggtctcgctggcatgggcacccatcgccaggatctgtatgagcagctgaagtttaatttgtatcaggatgacgcggttaccggagaggcggcgggcattgccatgggtatggtcatgctgggctccaagaacgcccaggccatcgaggacatggtgtcgtatgcgcaggagacgcagcacgagaagatcctacgcggcctagccgtgggcatctccctcacaatgttctctcgtttggaggaggccgaccccctggtgaccagcctgtcttccgacaaggatcctgtgttgcgccgctcgggaatgtacaccatagctatggcctacaatggtactggtagcaacaaggccatccgcaagctgctacacgtggccgtctccgacgtaaatgatgatgtgcgacgtgctgctgtgacagccatcggcttcatcctgttccgctctccggagcagtgtccctctgtggtcagccttctggcagagtcctacaacccgcacgttcgttacggagccgcaatggctcttggtatcgcctgtgccggcacaggtttgcgtgaggccattgccctgctggagccaatggtgaagttcgatccggtcaactttgtgcgccagggagctttgatcgcctctgccatgatcctgattcagcacacggaccagagctgtcccaagtccaccttcttccgtcagctgtacgccgaggtcattagcaacaagcacgaagatgtgatggcgaagtacggtgccattttggctcagggtaagcaatataacacgatcccttttcgttatttatgcaattatattgaaaagctaattagtttgttaatttgcatctattaaacattggtttccgtagttttcccgccaagcttcgagataagattagtagatactcaaaattataaatattccatttttaactaagcgaacgactataggtatttttgtaggaattgatttataattagtaatcgtcctttccagatctttctaattaggcattgactatttccaggtattattgatgctggtggccgaaacgctactctgtccctgcagtcccgtacaggacacaccaacctgcaggcagtggtgggcatgctggctttcacccagtactggtactggttccccctggcccacaccctttcccttgccttcacacccacctgtgtgatcggcctgaactccgatctgaaaatgcccaagatggagtacaagtcggcggccaagccctcgttatacgcatatcccgccccactggaggagaagaagagcgaggagcgcgagaaggtggccaccgcagttctgtccattgccgcccgccagaagagacgcgagaatgccgacaaaaaagaggatgagaagatggatgtggacgaggacagcaaggagggtgctgctgtcaagaaggacgaagaagccaaggccgatgagaagatggtaacggatgagaaacccaagaagaaggatgagaaggaaaagaaaaaggaagaggataaggaaaaggaggcagctggcaccagcagcgaaaaggataaggataaggagaaggacaagaaggagaagaaggagccagagccgacctccgaaatcctgcagaatcccgcccgcgttcttcgccagcaactgaaggtccttagcgttattgatggccagtcgtatgagccgctgaaggatgtcactatcggtggaattattgtattccagcacactggcaaagcagaggaccaggagctcgttgagccagttgccgcatttggaccgatgaacgacgaggaaaaggagccggagcccccagagccctttgagtacatcgaggactaaatgggcatgctgtttgtcattatctaagtgaatcctgttcgattttcaaccttgcttacgtttcatgagaacaactaatcggcaagaacacgaaatgctaatccctaattataacacaataaatggtcatcatattagatgtaaataatgtctactttggtttatggtggtagtcgccaacctattttttatctccttagaactcgatcaagaagattgtttcgccacccgccgaaagatccgcctctcaaacataaataagtgatttcacaacgctcggcaattgcccacagtctctctgaatttgtagaagcgctctctaccatggccgttttttaaaggggattggtgcaccgtggcctcaaggtaaacttatgtttggattttaagatggttaattgcaatcgaatcgggttggtattcaattattataaatataagcatatgatcgtatatgcagttaaaaaatgatctttggaaatcatatgtttttaagctaaatgcccatgtgcgttgccaagggaacttgatatttgcaaacaattattcaacaagtaaatgatcaatatgtttataacttttatggctggttccaaccactttcgttgcaaagaagggacaaatacaaacactatataaatcactgttattatccgtggacaagcactgaaaagcaagtgcacttcaacggtgcgtcggcctagagataccgtgttgaaatcagtgcttcactatttgccctcctactgcttatgaagatgcagatcatagcgcaaattaacatattatttttaccttctgaagattacatatttcaaaagaatatgtcatctgtttttaagattatttagtaggtagaaaacaaatgccattaccatgtgacaaaaaatttgacggactcagaacacctctcttaactcttcttttaaagggtataaaatgcgactaggtggcaacgctgcgagcactctctcgcgctcgggtataaatgaagagctatttctttagcccagctcagtaggttttttttgttgttccgtgcgggtgctcatttcgcgtaatattagtgtaaattcccatagctcctagtgttgaccagattgtgaacgttgtgccagacgtctgttaattagcatatagcacaac

SEQ ID NO: 2120 - DNA, 3313 bp, DROSOPHILA
tgcttaccgagtgatttagcattttttcggcacaaaagaaaactgaaaattaaaacggtgcaattgttgaacatatttttgactggaaacaacgcagctggaaaatgagtcttacgtccgccgcggggataatttccctactcgatgagccaatgccggatcttaaggtgttcgccctcaaaaagctggacaacatcgtggatgagttctggccggagatctcggagtccatcgagaagatcgagatgctgcacgaggatcgcagcttccccgaaaacaagctagctggcatggtggcctccaaggtgttctatcacctgggctccttcgaggacgctctgacgtacgccctgggcgctggtgatctgttcgacgtgaatgcccgcaatgagtacacggagaccatcattgccaagtgcatcgacttctacattgcccagcgggtggagttcatcgagaaccctaaggaggcgagtgtcgtggacgagcggctggagggcattgtgaacaggatgattcagcgctgtctggacgacaaccagttccgccaggctctgggcatcgctctggagacccgtcgcatggacaccttcaaggacgctatcatgaagtcggacgatgtgcgtggcatgctggcctacgcctacaacgtgaccatgtccctcatccagaaccgtggcttccgcaatgaggtgctgcgctgtctggtcagtctgtaccgtgatctgggtgtgccggactacgtgaatatgtgtcagtgcctcatcttcctggaggaccccttcgccgtagccgagatgctggacaacctcacacggtcctcggtggagacaaacaatctgatggcctatcagattgcctttgatttgtacgagtcggccacgcaagagtttctgggcaatgtgctgcagcacctcaaaaacaccgctcctatcccaaccgccctccccagcacatttaagccccagggtaccacctccgaggatggtgccaagtcggagggagacaagtccaagtctgacgaggatatcacagaggagacgccagctgatgataaagtagagcgcacaatcgattcccttaacgaggttgaaaagttgcatcagaagaacattgaaaagctcatatcgatcctctccggcgaggtttccatcgacctacagctccaattcctcatccgcagcaaccacgccgatttgcaggtccttcgaggcacaaaggaagcggtccgcgtgtctatctgccacacagccactgttattgccaacgccttcatgcacagcggcaccacctccgaccaattcctgcgcgacaacctcgactggctggccagggccacgaattgggccaagctgacggcaaccgcttcgcttggagtaattcatcggggtcacgagaaggattccctggctctcatgcagagctatctgccaaaggaggccggtccaagttctggttactctgagggtggtgccctttatgctttgggcttgatccatgcgaatcacggagctaacattatagactacctgctgcaacagctgaaggatgcccaaaacgagaatgtgcgtcatggcggctgcctgggactaggtctcgctggcatgggcacccatcgccaggatctgtatgagcagctgaagtttaatttgtatcaggatgacgcggttaccggagaggcggcgggcattgccatgggtatggtcatgctgggctccaagaacgcccaggccatcgaggacatggtgtcgtatgcgcaggagacgcagcacgagaagatcctacgcggcctagccgtgggcatctccctcacaatgttctctcgtttggaggaggccgaccccctggtgaccagcctgtcttccgacaaggatcctgtgttgcgccgctcgggaatgtacaccatagctatggcctacaatggtactggtagcaacaaggccatccgcaagctgctacacgtggccgtctccgacgtaaatgatgatgtgcgacgtgctgctgtgacagccatcggcttcatcctgttccgctctccggagcagtgtccctctgtggtcagccttctggcagagtcctacaacccgcacgttcgttacggagccgcaatggctcttggtatcgcctgtgccggcacaggtttgcgtgaggccattgccctgctggagccaatggtgaagttcgatccggtcaactttgtgcgccagggagctttgatcgcctctgccatgatcctgattcagcacacggaccagagctgtcccaagtccaccttcttccgtcagctgtacgccgaggtcattagcaacaagcacgaagatgtgatggcgaagtacggtgccattttggctcagggtattattgatgctggtggccgaaacgctactctgtccctgcagtcccgtacaggacacaccaacctgcaggcagtggtgggcatgctggctttcacccagtactggtactggttccccctggcccacaccctttcccttgccttcacacccacctgtgtgatcggcctgaactccgatctgaaaatgcccaagatggagtacaagtcggcggccaagccctcgttatacgcatatcccgccccactggaggagaagaagagcgaggagcgcgagaaggtggccaccgcagttctgtccattgccgcccgccagaagagacgcgagaatgccgacaaaaaagaggatgagaagatggatgtggacgaggacagcaaggagggtgctgctgtcaagaaggacgaagaagccaaggccgatgagaagatggtaacggatgagaaacccaagaagaaggatgagaaggaaaagaaaaaggaagaggataaggaaaaggaggcagctggcaccagcagcgaaaaggataaggataaggagaaggacaagaaggagaagaaggagccagagccgacctccgaaatcctgcagaatcccgcccgcgttcttcgccagcaactgaaggtccttagcgttattgatggccagtcgtatgagccgctgaaggatgtcactatcggtggaattattgtattccagcacactggcaaagcagaggaccaggagctcgttgagccagttgccgcatttggaccgatgaacgacgaggaaaaggagccggagcccccagagccctttgagtacatcgaggactaaatgggcatgctgtttgtcattatctaagtgaatcctgttcgattttcaaccttgcttacgtttcatgagaacaactaatcggcaagaacacgaaatgctaatccctaattataacacaataaatggtcatcatattagatgtaaat

SEQ ID NO: 2121 - protein, 1020 aa, DROSOPHILA
MSLTSAAGIISLLDEPMPDLKVFALKKLDNIVDEFWPEISESIEKIEMLHEDRSFPENKLAGMVASKVFYHLGSFEDALTYALGAGDLFDVNARNEYTETIIAKCIDFYIAQRVEFIENPKEASVVDERLEGIVNRMIQRCLDDNQFRQALGIALETRRMDTFKDAIMKSDDVRGMLAYAYNVTMSLIQNRGFRNEVLRCLVSLYRDLGVPDYVNMCQCLIFLEDPFAVAEMLDNLTRSSVETNNLMAYQIAFDLYESATQEFLGNVLQHLKNTAPIPTALPSTFKPQGTTSEDGAKSEGDKSKSDEDITEETPADDKVERTIDSLNEVEKLHQKNIEKLISILSGEVSIDLQLQFLIRSNHADLQVLRGTKEAVRVSICHTATVIANAFMHSGTTSDQFLRDNLDWLARATNWAKLTATASLGVIHRGHEKDSLALMQSYLPKEAGPSSGYSEGGALYALGLIHANHGANIIDYLLQQLKDAQNENVRHGGCLGLGLAGMGTHRQDLYEQLKFNLYQDDAVTGEAAGIAMGMVMLGSKNAQAIEDMVSYAQETQHEKILRGLAVGISLTMFSRLEEADPLVTSLSSDKDPVLRRSGMYTIAMAYNGTGSNKAIRKLLHVAVSDVNDDVRRAAVTAIGFILFRSPEQCPSVVSLLAESYNPHVRYGAAMALGIACAGTGLREAIALLEPMVKFDPVNFVRQGALIASAMILIQHTDQSCPKSTFFRQLYAEVISNKHEDVMAKYGAILAQGIIDAGGRNATLSLQSRTGHTNLQAVVGMLAFTQYWYWFPLAHTLSLAFTPTCVIGLNSDLKMPKMEYKSAAKPSLYAYPAPLEEKKSEEREKVATAVLSIAARQKRRENADKKEDEKMDVDEDSKEGAAVKKDEEAKADEKMVTDEKPKKKDEKEKKKEEDKEKEAAGTSSEKDKDKEKDKKEKKEPEPTSEILQNPARVLRQQLKVLSVIDGQSYEPLKDVTIGGIIVFQHTGKAEDQELVEPVAAFGPMNDEEKEPEPPEPFEYIED

SEQ ID NO: 2122 - DNA, 22618 bp, DROSOPHILA
ccaaatatatgtaagttacaaccggcaaaacactcaaaatgtcaaacatttgtggaatcatagtgaatgcataccacaaaagctgaatatttatagctgtaactgcaataaaagtatttaacgttaaatctgctccctaagccatttggagatttgtgtgcactttgtttcaagcttgtgcggaattaaaggagaagtgacagcaaggttctatgatgacagttcttattggaagcaggcgacaacttgggcgtagtgctggtagcgtttgaactggttgagaattataaatacacctgtcaaacgaacctatattctttcaacatttatagcgtcagcatacgaaaacacaataaatagctctcagtaagttagttacaacttttctgcatgatgttttcagcatgaagacggcatatatagacaccatgcatcttttcattacacaactaaagaatcagcagagtcaaccgaagacccgctggtgtgagagttcgttcccctgtgcgtcctcagaccactgttcgtcctctgcgagttggaattcctgtcacggactccgctcgcagcttccagttcgagtctggagtccatcctcattcatgtggcgtctggcgcacagcttatactcctcctgactgctgctaccgctgccttattcacgttttgcagccggccaactgtccggtgggcggtgcgtggggaggcgatttcggctggtgcgagagcgcggatagaacaccacgccctcttcgtctactggctgtgctctagagcgggaacgagctactgacgctatcagctgagagcgccgccatttgccactacgtgagagctgcggaatgagcgtgtgtgcaagcaggatggcagctcatgcgcgacatcgcactcactcacactggcgcgcgcacatcacgcacgcaaacacacggcgaacggggcggtggagttttttggcttctggcgctgcgctcgcacagcgtccaaacattcccagtttttcagctgcgacggctggttgtcctcacgattttgagtagatcagctgcagaccaaagtcggtagtcgagtttcgaatttgagtcggtttttgtttttggaagcggtgcgcgtattcgatttttgttttgacttgagctcggctgtagtttcggtttgccagaactggatcgaaggagaatcgacacagaaacagggagttggcgaaacggatacaaaactgaagttggatcggtaatcgcctgcccggtcataaacaacaacacaagggagcacagccgcatacgcatacgcgcctctgtctctaatgccttatcagtaacaggcatcgtcgagtgtcgtaggaagagcccgacaaaggccgacctttaccactcaatttggatctgatgtgccattctcgcgctgtctcgtaaattaatgtcataaattaactttagatttcttacgctaaccggtggtcgtcagcggtccgaaaacgcctttgcgctcgagatacaggggcggtttctaatcaatacaaatatcctacctgccgccgagtcaagtgttttagtgagtgtgtgaccctatgttccttatattaccttggtgctaaggagaaagtttaaaaaaagcggcattcaaatcgtagtttgtgcaataagaaaaggcaagccaatggtgtcaatctctaagacaacgccgaagtgatgcatgtccgcaaagtaatagatcaagttgtgcgcacacttattaccggcgagcctagccgggcatctaatcgtggccagtgtcaagtgtccaatagcacatctagccggggtgtagaggattacccaagaccaacgtagcaccgcagcccttttaaggaggcataaggctcgcaagacacaacgcacagcctacacaacgacaaacataacacgaccgacggacatcatccttggaaatagacctcgtgtcattccaaaagacgcacatgggcgtctgcaccgaggagcgccctgtgatgcattgggtaagttctgccgccgtagcacataaaatccaaagttaccagcgataagactaaaaaataagtcatccaccagtccgtcccagctcacccaaactctgccctttgtgattaatattgatccgagcctgggttactcggagttatcaataccagactgaaagcttgcctatcaacagacagccccactcaatatcgataagaaagccgcttgggcatttcagattaaaaacagttcccagaagtgttcaatcagtggctagttcgctcgttgaaacattgctgtagaacgcggttacaaaatttcaatgtgattccctgccttaatttttattcatctaacttaggttagaatcatttaatgtttaagaaggcagatttttgatgatagtcgtactaatcaatatacaatcaaattgggcggcatagtcgtgcaaaaaaattaatagatatgtagaaatcaaaatacaggtaaaacaaatatgtacgtttttacgaaatttttgtatatatctgatattcgacgcgaacgtattcagttttagagaataatcaccgtgtgccaatatataccaatttgatatattttaatagtagtcaattgaccttcaaatactaatttttaacgcgaataaggcattttctaccacacagagatattcttgtaccatttttttgaaaagaacgaattgccttgatgagttacatgaacatcttttacctatttttgattttgtcatttttaattgctattcctattttgaaacataacgcattccttatactttatgcaaacaattttttgttactttacaactttggtgtttgaaatctgtgtgtttgttttaattcccatcttttgtatgttttccaaatgtcatcgattactgtaaatcgagatgtacgagtattcgaattctagtctatatataccacatctatatattgtacaagaattgtataagattgtattgtataagaataggaaaatcgtaaataaattggaagagtaaaatggtatgaaacattcgttgaaaagtatgtaacagacagatggaagggttaccgacccttataagggatatccttgattaaggtcaatagccgagttgatctggccatgtccgcctgtccgttcttttattcgtccaaccgtccgtccttttaaacgttttaggaattgtaaaagctgaaacctagtcttgaacattcatattgtactgccgttttaaagtatttccaagtccactaaaacaaactcccatatctcaaaattctttcttcctaaagtattcgaaaatgtgttgatgatgtgtttacctgataaattcggcacatcgatcaagttacgaaattgattaaattcggactattaaaaattttataaaagtaattttagagttttttttttcaaatttttatttttgtacatttctttttatatataaaagtcgagttccccaactatcagatacccgttactcagctagtgggaatgaaaacgcaacatttcatcattttgctggaatatcgttagatatcggtgaataaaatgaacaaaaatttaaatttaaaccgccaagaaatacgcttttgaaatatgttttgatatttttcatgttttataagtctttaaatttttaccgatttgccaaaaaactctttgacatgcacaaacagcccaaagcggccacgcccatcttgatgaaaatgttttggtatatttccgttttatgtatgtattgtaataccaagaaaatttttaacacaccctttctaacttatcattcgtcttaattttttttccaatttctttcgatatgcaaaaaaattgaaatttatttttcgcagtctgcctagctgagtaaccgatatccaatagcgagaaatagacaacgaattcaaatacatttttttgtagctgtcatttgcccgtaatcaaaatatcggaaacatcaataagtcctattgttaagtttgttacaaaactcaattttaattcaattcaattttttctacaaaaactcaattttaatgtgaataaatacaaggggaaatttgcttgatattgtgcgcttggcaaattaacacaataaaaatatttttagtgcactaagtatcatatacatacatatgtttgcgattcttatattctttaaaatagtagaaactttttcgatctttaatgtattttacaataatgttaggcattaacggtgcttattatattattatacgttattataacgtattattattattatacgtacacatccgatatactctgtttgatgactgtggatcgacaatgttaggaacttcaaattaggaacttacaaatgtatcatttgatatagctagaaaaacacagacatttttttgaagtaagtgctttctgtctacagagtggccaaataagcttaaaagttgtttgaatatttgtagtggtatattagttgtttagctcggtatctgtaatattgtactttttgccacttatctgcaatttggttcactatgcagagcaaccttcatcaggtgaataatatgttacaactcattgtctaaacgttttataatagattggcacagaaaacatacatctattgtatgttttggtttcgatggaaccgttttaaaataactaacaataaaaacagccataacgtgttcctaaaagcctcaattctttgttcagatcgtcaagttgtgcagggcacatagctttccggaaatgccattatttctgtccttttgacaattacttgcgattattacgaatactacgaataaaacatgaaacaagtgttagtcgtaaaaattactttcgttaccttacattttattactttcactattctcaactttgatataatccctattaaaacaatgtaaatacattaactaaaacagtgattaattatatttaaagtcaaactttaattgaatagatttgagatatgatcaaaacattttatgtaccccttcttgttgagtatgggacggcactatatatatatatatatatatatatattaattaaaatcagtagccaagcttatatcggtaggtatacctaccgatataaggttttctactgattttaatttccctaacaacatcagcttgcatgactcagctttaaacgaatagcaacaataataataataatagcctttaaaaaaataccctccaggatttacgagtcatcattgatatctaagtatatataagtacgccaaaaatagaacaagtgtgatcaaaagcaataagttgtacttttttattatttattttattttgttattttttatacccgttgatcgtagagtaaaagggcatactatattcgttgaaaattatgtaaaaggtgcaagtaagcgttttaaagtatatatattcttgatcaggatcaatagccgagtcgatctagccaagtccgtcagtgcgtatgaacgtcgagatctcaggaactataaaagctagaacgcccacacttttgaaccatttttagaaattttgagtaacgagcatctgatagtcggaaaacttaactatatcattctctcttttttttatttaataattttccttacggaattctttttttcaaagtcgaaaggaaatattctaaaattatttaaatatgttgatatttgtttgtggtctttcttttgccatccatattataaatcgttaaactctcatacaatacgttaatacactttaacgaaatcaaaaatgcataacatgtaaatattttaaattaccgcacaaaattgtattgcttaagatgcagaggtaaagacattagctaaaattttaatttttctctaacttcaagtaatttttaaattcatttaattatgttaatactagtgcactaagcgctttttactccactcacacaaccatattctctgacggatgcaattcaaacatttctctagagtctaaacttttgaaatgaacgaaaaacaaaaaaaagtaattgaataaaataaataataataataaataaataataaatattttcgtagacaggaatagtattcggaaatattttattacctattgttaatgaattattgtcttacagcctaagataagatctaagataacatatttatacctgttacttgttgagtataaaaaagaatttaacaggtagatgaaaacgttttcgaccccattaagtatatatatctgccgatatatacaagtcacatttaaaatttctatcatactctattgtttatcgttccaaaatgaaatatcggattttaatttaggccaggttaattttaagataatatatatcagcatttttcgaaattgttaggaatttatattataaacaaaagagtcgagattctggactattagatgcccagctagtgggattgcaagaaatttacattgttatttgacaattcgatagaattaaacaaaaaaatataaataaaaaataaaaacctttttcaaatgtgttggcgtggcggttttggacgatttttgggcgtaagaaagtttgtgaccaaaatgtttatatggtattccgataaaaattgctaataatagcacgaaaaaatatcaaatatcaattttttggctttaatttttcacaaatcgataataatttactagacttaaaaaaaggcacaacattctttttgagcggcttgggggcggtggagtgggcatgacaacgttctcaaacaagcttgtgcagcgtagtgacgcccacaagagtctgcgtgtctaatcaaaactaactagtttatggtgatcttgagatcttgatgactcacgggaggacatggtcagatcgactcatttcgtcctgatgaaatataaataagcttcatagggtcggaaaagctttcttctaactgttacatacttttcaacgaatctagcataccctttatgacaatataaatgtattctgtcagtttttggaagaccgagaagtacttggatgaacagcgaagcgcagatcgatacccgttactcagctagtgtgaatgcgaacgcgaaatgtcatcatttttctgggatatagatagatattggggaataaaattaaaaattgttcaaaagtgttgtcatgtcaatgtcatcatttttctagttagaatgggcgtggcaaaacaaacttgcgctgcgtctatgtctctagaatctgtatgctgaatctcgcttatacggacagatggctattgaccgtgatcaggaatatatatactttgtatggtctaaatctagtatacccctttaatgggtaataggtatcgggtacaacaatagagaatgatatagtagacttcccccgcttgaaggcgtgggcaaactcattttggtatacttgtagaaattagcaagataaacaataaaacgaagaaaactgaaaacattttgcaaaattgtgggcgttgcatttttgggtggtttgtgggttttagggttggagcggtaaaaagatttttggcaaatcgcaaaatatttacaagattaaaaaatatgaaaaacaagaaagaattctatagtcgaaactatcagacactcgttatctagctcgtccaagtgggaccaaggattttcaatttttcaggaatatcggtagattttgggcaaaaatgtattttaatgctctaaggtgtgggcggaatagatttggtcgctgtttaggtgacacagtgggcgtgtacgatataatccaataatatttctaaaaagtgttggagtgacagttttttggctgtttgtgggcgttcaagtggtgtttttatcaaatcgatatgaatttctcgaaaaataaaaatatgaaatatgatcaaaatatttctcaaaagtgcgggcgtggcagttttgagagtgtgcgtggaagcaattttaatctttcagcttttatagttcctgagatctcgacgtttttacggacggactgacggatatggctagatcgactcagttattaatcctgatcaagaatatatatactttatattgccggaaacgcttccttctgcctgatacatacttttcaacgaatctagtatggggtataattactaattcttatttaacaaattttaaacagaagcttagaacagtaaaaaaagggttgacaaacgtgaaaatttgagcacaaaccaaagccaatgctttgcggaaatggatatcatcttaatttttggtctaggttgactcattgttgttaaaatcacctggaaatgtttcctttcctcagttccaaacatccgactaaatttattatttttatatattaaacttaaattttctgtctgttgataaaaattatgccattcatgggattttcatcggaaatattaaattgatttggtcccggttatcgaactttaagacttttctaccaatcgtttgaaagattccttaacgcactttgtccgactttcgaatgttttctatgatgcaatgagttagcctaagcactcgagtgggtaagtcgaaaatttaacgtaaaatggagatccaaaataggcatgaaaactttgtacaaatatagcttaatgttccccctaaggtaaaacatgtttccaggccactaacataaaaattgcgcaaaaaatgtgtattgcaataagggaagatttcttttaccatgaaaacctgtcagccttttaacccaaaagagggtagttggggataagtgggcacacatttgcaatctattttcgactaattaatcaaaaataagtaaactggagcatcgacgattcgttctgacagcgcggcgcggagataagagtggagatagggcggaacatgtgcctcacggatactcttctgctaataaagtgcgacgccatgtctacactctgtgttcagtacatggcaaaggcacaacgtgtgcgattttgctgtattcttcaatgaataaagcttcgagatgagttgcgataggatgatgatgcgagatgaactggatggattcggtcgggaagtcaactaggctgacactgggtgtttcccatatgttggcgattcttaaatgtcgcgcagcgctttctgggaatgagaagaagtcttttcattttaattgaaaggaactttgcgtttctctttgtatttgccgtcgtctatattaaaattaaaatgcagcattaacaataacattccataattaatacccagtatatatgtaagtactgcctaaccaattctttggcctttgtattgcgccaagccatcagattattaattccagaaacgaaaatagattggtttccttttaatacgatcacacaaactatgcataacagcaaaatcgccaaatatagaaaactctcaagacacaactcaatctccttctcaatgtccttttaaaactaacgcattgtacttcggtacagaaaataaattgaatttaaactcttaaggtattttcgtccttttttaaaaaacgtcgcttttttaggtttttggcttatctgtctcgtttttaatggacagctttgcaaatctgtcaggaacgaaaccacaagctaaacccagaaaattgagattaggcattcagtgatgcccacgctgtgcaagttagtttcagaacactgccatcactctaatgatcacaccacccactcgaaaattctctcattctcaatctcattctcattttatttgccttgccaatttcaatcgatggcaactaaaaaatctctaaaaactgccaccccgcagtatgtttttttatttttttgtttgttctggaaattaccatcgaaacgccaaacgaattttcgtatatctcttcttccacacttccaatagctgagtaacgggtatctgatagtcgattaactctcctcgaagagctttctctcttgttttcactttctcaggctataccaagaaactttaaacgccattatctcgagattgagtttttttgaaaatgttttttaccatattttaagatacgaatacaaaatttgcttattgacagaacattgaaagaaatccataatttagccataatttttaccggatttttatatttttgaaaaatatagcagcagagcgcaagatttcttgggcccggcgcaagggagaaaagtccaacaccacctgtagcacatcaagggagcaatcaatgtggcagtgctgcaggtgcaaataacaatcacccattgttccgcgcgtgctcctcatcctcgtgtccagatatttgtgatcatagtacaaagccatttggcaacgcttacggcaccgagtcatttagaaggtaaggaagtcaattccgccctaataccaccactcaaggcatgtgcaatcctacagctacgaaacagccgatcgtgctacctttgaggactcagccgccaaattctccatcagccgcagtcgaacagactgcacggaggtcagcgacgagacgacgtcgggcatatcattcaagaccgaacccttcggaccgcccagcagtcccgagtccacaagcgatagcaaaataacgcgcaacctcgacgactgctccggctgcggacgtcagatacaggtgagtgtttgtaaaagacaatttctgaatttttatttaaatattaagggaaaaccattaattgaaaccccaaaggcccaaagagtatacaaaaagtttgaaggttttttattcaatcatgcgcataaaaaaagttctatcacttctatagctcaattataaattgatggaacctggcacttaactggtttgggtccttagatcgttctataacagttgtataagtcgtttcaggggattatctttaggaatcgtataaatatttaatatcgaaaaatattgcctgtcaagcccttttgcatggctttaaatttcgggcacattgcacgatcaaggacaacccgattattgatagcctcaaataacatttagcgaaaaatacgtttatgcatatatatatattatatttaaattatataaatatttatatatatataatatattaatatatatattatatttacattataaactctctatcctctattcctaggatcgcttctacctctccgctgtggaaaaacggtggcatgcaagttgcctacagtgctacgcctgtcggcagccgctggaacgggaatcctcatgctactcacgtgacggcaacatttattgcaaaaacgattattataggtaagtcaccaagcctttcggatccatagttaggccattcattgagagaaattattataccatacggagctgtggctgaacctcgcccacagagactttggggaagcaatccgaagtggggtactgaagtgggcctgatgaattagataacgccgagactgcatgccaagacattggccagaaaatgattgcaaaacacgcgagaagatttttaatgcacgcggctgccttaagatcccaaaccaacgtcattcttttgctccactgtgcgaaggctgagcgactgcaaatacgatcgcgaattcgcaagtgcaagcggaccgcaacgaagataccaacggtccaaccgtccggacgtccgcttatccgatggctgagtggccctgcgtgtgttctgctgtttgctctccactgcattcccaagaacgctcgctaacctgatcacgcctccaccccgctagactcggcatttccagacgcgaaaagctggaacgtggagctccgctggtactgccagtctgggtgggtttcacagaacgctttacattcgcccacgtcgcttctgtaggaaactgcagccatgcgatttcacgcgtcacagctgtcacgcgagctcctagaatgaacagtgcgaagattttaaaaatgggttacacttacccaaaaactaagcacccacatgaagcgaaccttcgctcgctggagtcttctattgtgtaattttggcttgccagtccggcagcgaacggtaaatcggcgggcagcaaggcggcaatgcggtggcaagggcaacacctgtagaagggatccaaatcattttcccattcatgagtgaacgcctgtgctcgaaaggcataaatcgtatgcaagtcacgctcgtcactcgtatttcctctcaaatgattcttgtgacatttattaccgctccatatttcaaaatacccgtcgtcatatcgggagtcgcagttgcagcccgctactgggattggctgcggggcccgctggatttgtggtctgtatccgcgtgttgcgagtgctacgactgctgggactgatccccagattccagcggcgcgaccgccgcgctccgctggcaaccgcacaagcggggtcgtatttggagggtattaggggcgccttgtcttgtcgtacacaattcatttcgccgtaatgtttcatttcgcttcattccggcggcttcggttgctgcggagcattatcaatcacatcgactcaccctgcccacattcccacattctccgttgatttatactgcagatgtcaaatatgacttcccccgctcgaattggggcagagctccactaggagctagtgcatattatgaactgaatcaaactgaatctagttgttatgaggggtcgcgggtaagccaaaccgtgaatggacgcgcatcgccgcatccaccgaaataaggccatgttttgtttattttaagttcacattatttttaaggacttcccctgcgaaatgcgttaagggagaaaatcgaggggggtgggcttgttcgaatagtaattaagtcactttgaaagccgtatatctattgcctggtaacggtaacgaatcgtatgaagtcaatatgcaaagaataactgtgtatacatcttttgacaaattgacttcccgcccctacgggtttttgtacttctgataattatttaaattttaaatgtttattagcttagatcttttggcttgcaaaacaattctatttttgtggaagccctaatatttcaccaagcgtctttactgaagctaccttttcccataaagatggtattaatcaatgataatattcaatacgtaaagagtaaaagaagtatttataagagtatttcacatttcacttgaattatttttcacatttagacggtttcatggaacagttttcgtgttaaaggttacccgctgataaaaggttcaaaatctataaatgaacgctttttcgtatttattttttaaattaaatttataggctaggcttaagctagttttatattttgttatgatgtttgtccaatatcattagatgggtccaaatatatgttcacatactatttatatggttggatgaatacaggcagtgattttattttttcttgggggttttgcacttgtcagttttaatgcgtaagagtttcaaatgtgaatttataattaaagtattatcgatgtcttgcatgttcctattacttaaaaagtcgtataagactttgccttcaacaatttagttgtccttttttaagtattttccgtgtaaacatagggaccactttcttttcttttatttgcattgggaaccaaattatagtgtgtcatccaagtatacagactgctgtttttggtggaccaaaatctctgtgcctggctttgttcttatgataagagttggagggcacgatttgccagagataaaactatagtcgattatcagatacccgttacccagatataggtagtgcgcggaaggtggaggcaagttagtagcaaagcggcagtacttacggatgcattagcacaacaaatcgggggttgcatttacctattatagtgaccacatagtgacgaacagcacccagagggtgtgcgaaggttaaaactataacaaaaaaaaaaaaacatgaaaaaattatggtcgtgatcgtccgacaataaggtttagtcaatatattggataaaacacattgaatgtactatatttggatagcattatatagtcaaacgagtcgataccagaaaacaggtaagtgcagcttataggcttaccctcccaaagcatatgatgctgaaatcacttttacttctggtgctgcccactgctggatgtgatcccatcagaaccctcccaagactggcattccactatcgttcagtgttcctgtttcgcttgccgattctccttcttcttgtgcacgccaccagaattaaggctgagaaataaaattctcgctgtcacctgcatcatccacatgtgcatctgttttcccatatatgtacacatatgtacatgtgtatgtatgtatgtatgcaccgaccggtaataaaaatctgggcagcaagtgcttatctctcgcgatgatgttgtgctgatggcacagcagatatcccggttaagccagcatcagattgcggctaggaggatttgaccagccataaagaatgtttggggcagagacagtgtcataagtttcattttgtatggtagcttttggtttttttttgtgctgcactgggaatatcttccagacaaagcttagccctggatggatgtcttggtagacatttcatcgtcttaatcaccgttgggcactcaagcaattaaacgggggttgcctacgttgaccagaatagtgagcagactagcttgaaaattttttgaataaagtgtttacagtttgaaaaagtcagcgaagcgcaaccgtttaattgtggtaaataaaagcagctgaccgagcatcgtatttatggcctctctgaaattctggcttatgcaataaaataatatttttaccttgtaaatagaaagggaggttaggacctaaagaattcattaaatacgtgaaaaacaacgtcagagctgaaaaatcttcgtgatgaaactaaaaatccacagaaagagagactgtagctttagccaacaccaatggcacaccagctgaacgattcaatttatgttgagtttttatgttctggtcaccgccttttagggtaccaaacggtaggccaagatctcagtaaaaatttaatttgattatgtggctgaaagcaacatgcacctacttcacacactctgatgcacagcaataaagctggagaagagccccgtatttatattttatgatctcaaaaacagtcccaatgggctaaaccgtccaactgggcgattcttattttcggcaaatgaacttcattatgaataatgcttggaagcaagtgtcgttaattgagatagttactatacctatgtacatatatatattcggactaaacattaaaaaaaaaaaaacataaattaaatggcgcaatgtgatatttcacatacatattgcatatgcatacgtgatgatcgtctaatttctcgactatcatcattgtttaagcatatcggtaggaattgaaaaccacatggaatatatacaatgggcgtggcaatgttttaaaatgtttgcatagtgaaggtgtcaaatttaacttcatcccttaattatgctttctagctcttgtactttccgagatcacaacggttaaaaacggacataaccacatcgacgagtaacggtataaataggtatggacataccagaatctttcgtatatcgtatgaaattagaatacaatgtccaactaataaagatgtagttacttaatagattgagacgaatactttttttatgtttattagcgagccgctggacactaaaccatctcactcgcatgactgagcaacgccttagctcggctttctactgctgccgagacaggcattctttaaattggcttgggaacaagagcaaacaagagctagggcgtcgcgttataattaaaatgtttaatgtctgtcttaagaaatgattttacgccgaatttgggctggctaactcattcaagatacttcattcccagatttgatctgtcagccacaaactaacaagaggttgctatgtaatctaatctttattagattaatttatagacataatattattgtgcatgaagtaggaaaacaaatttcccgaaaagacccgaaaaaggataatgtatatgcaaagtctattcaaccggtgaaaaggagaagtgtgtctatagattatattaaaagaaaacccgaacacttaaaatgagtataaagtgcatctattaggtgccttatgcggctgcgttcggtgatctttcttcttcaacgcaactggacctttttttcttgcactgtaatacactacattttttcttaaaactctttgatcggtgcagagctctcagtggtagtcaaaacaaacacaaacacgcaaatcctaaaatgcaaataattattgtatacgtttaggcagcatgtcgccgagaacctagaattatcaccgcgggacgtcatcatcagttgaagcagggggggaatagggcttaggctaggggctggacggcggcgaacgaaccgctctcacgatagccggacgtataggaatggaacgggaagccgccgctgtcggcgctggcgtggtgttgggaaatctgctgcagttgttcctggttaacttatacatgtgtaataggaagagcgagtcccagcgggtggctcttgaaacctcatcgtgcaaaccctcaacgcattacaaatgctctcacgttacaaacctggccgtcctgtcctgccttgcccgtgttcctatacaagcccggtgttatcgaagcgtccacccagtctacaagtcgctttgcacttcagcgtgcgcagcgttactcattcgccctccaaacagagttcgaccagccctctcccacgtctctgggattcatcgagaggccgcggagtggtggtgaagggttcgagtgcactgtcgcagcccttggccacgaaccactaaggcatccaagcgcttttaattatcttaatctaattttttattcattgtgactgttttgtcgttgtctggaagcagctgctggcctcatcacatttttccaactgatagtctggactactaacatcacatattcaaggcggcggaaagaatatgtgccgatatttgagccttataaaatatgttgcagtagtgtcaataatttgaaggaagagggtgcaagcggaagttagaaatgctttttaaatgtcgatagaaatgggtaagaaaattagtagcatcaacaacgataccaaaacattttttttaattgtggccgtgactgctttttgggtgttaaatggttttgcataggctgaaaatcgttcttacaaatcgatatggttagtgatccgcatgcgaagcaaggttcgaattctgtattaaatgttaaagatttgtccacagcgatcaaaacgccctttgatcgatgcttggctgttctcttgttttgcgggagaacaactacagaatctatattatattaattataataatataatttctaaaaagttttattcaaagaaatcttacagcagtcacgatccatattcatattcattcatatattactcctatatgatagctgagaaagttagtctattttctaattttgtgcagcgaataatagtctagtctagcggaggcgctaggtcggagctcctaggtgcttagactaaaggctgagagatacgcgacacacactggaagagggactttgagcggcagcgagaacgagagcgaccagaatgtgtatgagagtatcagatttcgagagctcgagaacaaaatcatatattaggcgttgtcactttgacatttcgcctgctcttttacatggcaataatcataattcatttttctcgccttctctgcctcgccctcggaagaagaggcgtgtcatggtggtgtatgtggcttgaaatgaacttaacttcgccgaaactgcggtctgggtcatttttatgagttggtagctacgaccgcgccgccgtcttctacatacatgtttaatattatttatgggtcttgcgcaccgcgcagcagcacaaggtacatacacattcgtacagacgtacatgcagattcttaagggcctttctggagacggagccgcactgactcgtgtagcgacaagatgtgcgacatggggatgtgacaaaaatctttctgtcacatcccaaataattttcaacaaaatgaaaacacaaatgcggaacggtaactggaacgagtcgagtacaagaatggggaagggatgaaaatgccaaagtctgaatatgataaattcggatggaattgatgttggctttgacttttccgttggctcgattcttctgtttatatctcgcaggagccaatgcagtgaaatgcgccaattattttgattaatgccaaagaaatcgcgtgtctcggtgatttgatgttggccctcacccaagccctgcacccgtgatccacaagagcgctcccagggattccattcaatctgctggctcatttctgacacgaacgcagcgactcctcagtgattacgagcggacgctggtaatctttgatctgtcatttgcgaaagtgaaaacagtagccgggaatgtatcgaatgcgtaccaagactacaccttcaacgtcgtcattatcatggcaacggttggaagggacgatcaaattgacgatgagtaggcgtttgtgggcagttgtttattgggcttgcttgtgttactggtgcggatgtgatcggtcggtggtcggtggcccaacggacagaggcatataatcactggtcctgtggctctgcccagatttcttcaatagcttcggtgccctactattacccgtgcactgagattaatcgtgcggtagcatattttttaaaatctaactcataagacaacccacattatcgcttacagtttttttggtactcgccgatgctcgcgctgcctggcctccatcagctccaacgagctggtcatgcgcgccagaaatcttgtttttcacgtcaactgcttctgctgcactgtctgccacacgccactgacaaagggagaccagtacggcatcatcgacgccctcatctactgcaggtatgtacgcgtcccagtcccaatctgacacgccgccactaacaaaagtcgcccgtaggacccactacagcatagccagggagggggataccgcctcatccagtatgagcgccacctacccgtacagcgcccagttcggctcaccccacaacgactcctcgagcccgcactcggaccctagtcggagcattgttcctacgggcatctttgtgcccgcgtcccacgtaatcaacggactgccgcagccagctcgtcaaaagggcaggccccgcaagcgcaagcccaaggacatcgaggcgttcaccgctaacataggtacgttgtaaatttccagctcattctcgatcaggttgccggccataaaagaggctacaggcggtcggagcctttatagctacagctcggcagatctggaaccgccacaaaatctggatactggcgccattagagctgcaaaagcatcaacttttatgtgtctgcctcataaaatgcggaaagtgctgtaaaataaaaaaaaaactacaaggctctctggattgattgcagatctcaacactgagtacgtggactttggccgaggctcgcacctaagctcctcgtcgcgcaccaaacgaatgcgaacctcgtttaagcatcaccagctgcgtaccatgaagtcctactttgccattaatcataaccctgatgcaaaggatctaaaacaattgtcacagaaaactggtttaccaaagagggtcctacaggtgagtaatcccacttcctagatcaagaaaccagttaatgacagtaccgcattggctattcactccctcggtgtaggtctggtttcaaaatgcaagggccaaatggcgccgcatgatgatgaagcaggatggcagcggcctgctggagaagggcgaaggcgctctggacctcgacagcatctccgtgcacagtcctacgtcgtttatattgggaggaccgaacagcacaccgccacttaacttggactaacggatgctcaggaaacgcgaaaacaaaatgatagtgacaaaggaaatgggcgcagcagtcacctccgacatcatacgttcttatgccagttgtctattcgcgtgcctcatacacagtcccggacccggtttgactactgaatccggatacttgtctagatcaagcacggctagctcttgaatgctatgggctgccttgtcggatgggaatcaatttggaaagcttgtcttgtgttcaaaatcgaaaaattgattcatccacacgttaaacgcccgggaaacgcctcggaaaatgctaagaaaatatgtatttttgtatttgcctattgaccgtttccagcactactcgcctcgtccttgccccacatgttgtttctatagttttaacgttcacttgtaaatatgtactgtaatcacatagtttatttcaaacgatccatattagcctgactcccctgttttttgtattcttttaaagcgcagaatatcaattcgaacattgaaattatgaatcaaaagaaggtggattcatgcaaagattaccaacttgtaacgttctttctaaagctgtcataataattaagaaaacacaacttcgctaaatttcaatttgtatagaaaatagttatgttactataccagtcaaaatttttaaacatcaaacttgcagaatttacgaattaaagtatgactaaaaacttttaaataccaaacagcgaaacgtgtgatattttaaatttgtttttttctttttcagtgacacgactaaaagatacccgttaaattgtaaaataatcttgccaatatatatgcggccaggtcatgcccttcctcatatgaattgcccgctggcaatgtttttaccaagctttcaccttccgattaggtttggtggtcatttaagtaaattccgatttaaactttgtttttaatacgggagcgtgtcacttcctttcggtatgaacataggtgaggaaaagtttgaggccaatcttacggcgcacaagcggcacacaaatgaaatgaaattctttagcttttatagtagacgaaaaacgatccttatcaagcataaatgcttatatctcctgtaacattatttttgaccagtctagtttacacgtatgttctacgaggaacggaccgattgttcctatgagagctataggttttaccatatgtatatgcatgcattacttcagctccatctctttttgattcataaacgtataatggtttgagagtaaacattttgtggcgtatatagttcaagtttacatatttagagtacggtgcccaagacgcgctttaaaaatattgaaaacgggttgttaatgaagtcccatatgtataattgtctaggtacatggatattgttaatatattattatttttatttaaagagctctcaacaatatgtatgaagaaatctgcgtatatcaacatataatgaaatgctgatgcattcgtattattatatgtaactaatatttattgcccaaatttaatagttagagacgaatttagtttagaacagactatacaataaagtccatatgtacatgtagtattacggtaaagtaatagcttcgctcaagcatacgaccaggttcgtaagctattaatacgaaactgtaattataatcaaatcagtaaacactggaagatttgtacttacaaatagttaactcataagtcttaccatagaagcttaaataaaacgtattcaagcaaaaaaataattgtttcaataaggggccaaaggcaaatgttacacaagaatggtcacgcgcactaaaagaaaagacgaacataactttgaaattcctttctagctgagagtaccaggtatcttttataattttgtataatttaataaattattgtttaagttcaaaagtctaaaagaaagaccggtatagttgatgagcgttaaagtgggcgtggcagcgctttgaaaccaccttaagcagagtctcatgtccaatcccattgaattagctctcatagttttcgatatcttgacattcattcatatgtacgttcggatagatggatggaaatggccagatcgactcggttattgatgctaatagcgaatatatatactttttagggtcggaaaagtttacttttccctataatatatattttttaggaaatcaatcactctacttggccagatcgacttggctattaatcctgatcaaaaatatatatttatatatttgattatatggtcggaaacgcttccgtctgcctgttgcatacttttcaacgacttcagaataatttagcaatgatttatactttcacctctctttttcctatcaacgtttggtatgcgatcctattagattttggattacctttcagttagttagcgattttaagttcttcgccttcacacgtccccctgtgcttcgtcactacgccgattgccgaccacagtgatttgctagggaaaagtatagcattaacttttttttaatttaaatgtgtgagttatttttatttgcagttgtataaaaatattttgcctattaatagaaatgatattccaagagttgtataagttaaatttctcaaaaataattataaaacatcaaattatgttatacaaaaattttgttggtttttaaaatacttaaataatgtaaaacgtgaataaatgtcttttttatatgtaatcaagtaattttaattttcaattacataatgtgcacagcaaa

SEQ ID NO: 2123 - DNA, 4101 bp, DROSOPHILA
ttcagctgcgacggctggttgtcctcacgattttgagtagatcagctgcagaccaaagtcggtagtcgagtttcgaatttgagtcggtttttgtttttggaagcggtgcgcgtattcgatttttgttttgacttgagctcggctgtagtttcggtttgccagaactggatcgaaggagaatcgacacagaaacagggagttggcgaaacggatacaaaactgaagttggatcggtaatcgcctgcccggtcataaacaacaacacaagggagcacagccgcatacgcatacgcgcctctgtctctaatgccttatcagtaacaggcatcgtcgagtgtcgtaggaagagcccgacaaaggccgacctttaccactcaatttggatctgatgtgccattctcgcgctgtctcgtaaattaatgtcataaattaactttagatttcttacgctaaccggtggtcgtcagcggtccgaaaacgcctttgcgctcgagatacaggggcggtttctaatcaatacaaatatcctacctgccgccgagtcaagtgttttagtgagtgtgtgaccctatgttccttatattaccttggtgctaaggagaaagtttaaaaaaagcggcattcaaatcgtagtttgtgcaataagaaaaggcaagccaatggtgtcaatctctaagacaacgccgaagtgatgcatgtccgcaaagtaatagatcaagttgtgcgcacacttattaccggcgagcctagccgggcatctaatcgtggccagtgtcaagtgtccaatagcacatctagccggggtgtagaggattacccaagaccaacgtagcaccgcagcccttttaaggaggcataaggctcgcaagacacaacgcacagcctacacaacgacaaacataacacgaccgacggacatcatccttggaaatagacctcgtgtcattccaaaagacgcacatgggcgtctgcaccgaggagcgccctgtgatgcattggcagcagagcgcaagatttcttgggcccggcgcaagggagaaaagtccaacaccacctgtagcacatcaagggagcaatcaatgtggcagtgctgcaggtgcaaataacaatcacccattgttccgcgcgtgctcctcatcctcgtgtccagatatttgtgatcatagtacaaagccatttggcaacgcttacggcaccgagtcatttagaagctacgaaacagccgatcgtgctacctttgaggactcagccgccaaattctccatcagccgcagtcgaacagactgcacggaggtcagcgacgagacgacgtcgggcatatcattcaagaccgaacccttcggaccgcccagcagtcccgagtccacaagcgatagcaaaataacgcgcaacctcgacgactgctccggctgcggacgtcagatacaggatcgcttctacctctccgctgtggaaaaacggtggcatgcaagttgcctacagtgctacgcctgtcggcagccgctggaacgggaatcctcatgctactcacgtgacggcaacatttattgcaaaaacgattattatagtttttttggtactcgccgatgctcgcgctgcctggcctccatcagctccaacgagctggtcatgcgcgccagaaatcttgtttttcacgtcaactgcttctgctgcactgtctgccacacgccactgacaaagggagaccagtacggcatcatcgacgccctcatctactgcaggacccactacagcatagccagggagggggataccgcctcatccagtatgagcgccacctacccgtacagcgcccagttcggctcaccccacaacgactcctcgagcccgcactcggaccctagtcggagcattgttcctacgggcatctttgtgcccgcgtcccacgtaatcaacggactgccgcagccagctcgtcaaaagggcaggccccgcaagcgcaagcccaaggacatcgaggcgttcaccgctaacatagatctcaacactgagtacgtggactttggccgaggctcgcacctaagctcctcgtcgcgcaccaaacgaatgcgaacctcgtttaagcatcaccagctgcgtaccatgaagtcctactttgccattaatcataaccctgatgcaaaggatctaaaacaattgtcacagaaaactggtttaccaaagagggtcctacaggtctggtttcaaaatgcaagggccaaatggcgccgcatgatgatgaagcaggatggcagcggcctgctggagaagggcgaaggcgctctggacctcgacagcatctccgtgcacagtcctacgtcgtttatattgggaggaccgaacagcacaccgccacttaacttggactaacggatgctcaggaaacgcgaaaacaaaatgatagtgacaaaggaaatgggcgcagcagtcacctccgacatcatacgttcttatgccagttgtctattcgcgtgcctcatacacagtcccggacccggtttgactactgaatccggatacttgtctagatcaagcacggctagctcttgaatgctatgggctgccttgtcggatgggaatcaatttggaaagcttgtcttgtgttcaaaatcgaaaaattgattcatccacacgttaaacgcccgggaaacgcctcggaaaatgctaagaaaatatgtatttttgtatttgcctattgaccgtttccagcactactcgcctcgtccttgccccacatgttgtttctatagttttaacgttcacttgtaaatatgtactgtaatcacatagtttatttcaaacgatccatattagcctgactcccctgttttttgtattcttttaaagcgcagaatatcaattcgaacattgaaattatgaatcaaaagaaggtggattcatgcaaagattaccaacttgtaacgttctttctaaagctgtcataataattaagaaaacacaacttcgctaaatttcaatttgtatagaaaatagttatgttactataccagtcaaaatttttaaacatcaaacttgcagaatttacgaattaaagtatgactaaaaacttttaaataccaaacagcgaaacgtgtgatattttaaatttgtttttttctttttcagtgacacgactaaaagatacccgttaaattgtaaaataatcttgccaatatatatgcggccaggtcatgcccttcctcatatgaattgcccgctggcaatgtttttaccaagctttcaccttccgattaggtttggtggtcatttaagtaaattccgatttaaactttgtttttaatacgggagcgtgtcacttcctttcggtatgaacataggtgaggaaaagtttgaggccaatcttacggcgcacaagcggcacacaaatgaaatgaaattctttagcttttatagtagacgaaaaacgatccttatcaagcataaatgcttatatctcctgtaacattatttttgaccagtctagtttacacgtatgttctacgaggaacggaccgattgttcctatgagagctataggttttaccatatgtatatgcatgcattacttcagctccatctctttttgattcataaacgtataatggtttgagagtaaacattttgtggcgtatatagttcaagtttacatatttagagtacggtgcccaagacgcgctttaaaaatattgaaaacgggttgttaatgaagtcccatatgtataattgtctaggtacatggatattgttaatatattattatttttatttaaagagctctcaacaatatgtatgaagaaatctgcgtatatcaacatataatgaaatgctgatgcattcgtattattatatgtaactaatatttattgcccaaatttaatagttagagacgaatttagtttagaacagactatacaataaagtccatatgtacatgtagtattacggtaaagtaatagcttcgctcaagcatacgaccaggttcgtaagctattaatacgaaactgtaattataatcaaatcagtaaacactggaagatttgtacttacaaatagttaactcataagtcttaccatagaagcttaaataaaacgtattcaagc

SEQ ID NO: 2124 - protein, 469 aa, DROSOPHILA
MGVCTEERPVMHWQQSARFLGPGAREKSPTPPVAHQGSNQCGSAAGANNNHPLFRACSSSSCPDICDHSTKPFGNAYGTESFRSYETADRATFEDSAAKFSISRSRTDCTEVSDETTSGISFKTEPFGPPSSPESTSDSKITRNLDDCSGCGRQIQDRFYLSAVEKRWHASCLQCYACRQPLERESSCYSRDGNIYCKNDYYSFFGTRRCSRCLASISSNELVMRARNLVFHVNCFCCTVCHTPLTKGDQYGIIDALIYCRTHYSIAREGDTASSSMSATYPYSAQFGSPHNDSSSPHSDPSRSIVPTGIFVPASHVINGLPQPARQKGRPRKRKPKDIEAFTANIDLNTEYVDFGRGSHLSSSSRTKRMRTSFKHHQLRTMKSYFAINHNPDAKDLKQLSQKTGLPKRVLQVWFQNARAKWRRMMMKQDGSGLLEKGEGALDLDSISVHSPTSFILGGPNSTPPLNLD

SEQ ID NO: 2125 - DNA, 4970 bp, DROSOPHILA
tgtgtgaattattttttacaatgtgatacgtgctcttcctgtggccaccatggaccaggcctccacgctcacttagcgttgaccagctcgacaatgttgctgctgatcgagaggcgatcgacgatatccagcaggatctccacatccttgatggtggcaaccgtctcgggggcacccaacagattcacatgcttgccatcgatgttcgcatagaagcatttgttcttgaagatgacggcccgatcgtagggcacgcggcacgtgttcttgtcaacgacaacgcgccggaagagcacgcacgacggctgatacttgtgacggtcctcctcgggtatgttgtacgccttgagatcgcccgtaaagatggtcattgtctggcggggcatcatcgacggcgagaccttgtacagcgtcaccttgctggtccatttgcccgatggcacctttatccgtgacgccacattggccagcttgaccagcgccagctccaggcaggtgcgctgctggcgcgccatcttcgacaacatatccttggccgtgctaaccacatgccacgtctcatagcaggtgatcttctttaccacacgaccatcctcctcgtgaaacgttgtggtctcgggcggaaaatatttgggactgttggcatcgtcgatgccaccgccggtgggcaatatttcgcgcagcgttgtcagctccttgtcgcgctgctgctcctgctggttctccttgctgcgacgctgcggaaccaggctcggcttcttgaacaccggctggacatcgttatcggccagcagattgctcagcctccggtccgcaatcagcgcattcaccgacgacgctgtcgtggacagcacattgcgccgattgttgttcaacttgttaaccgctaccgctgctggagcggacgtcatcgccgccgacgccgccaccgacgtcgttgtcgtcacctgcttggacttggcattggcattgacattggcattcttacgggtaacaatagataccggtatattatcgatatcaaaatcgagatctggatccggatcgtcctcttcggtgtcgacgtccgtgggacagagctccttgcccatgctcatcagcggtttcatcgactgcgtcttcttgcccatttccgcgttgagtatcctgggccggggcttcggcagttgactctggatatgcactggtcccattttggtattgacactactgttgctggccaagatcttgatgcgcttggctggattccccgccgtcgtattgttgtggttaacagcagcggacagggatttctgcgtgctgttaacagtgatggatttcttatcgccggcaaccgaattgccggttccgatattcttggtacggggcctgcccaaagcgacctttttgattgaattaccgccagctgcggaagcggccatagcagtgtgtgatctggaaatgagcacatcgtcctgattgataatgtcatcgatgtttacaatggtgaatgtgggcatatcctccgattcggaatcgtttttcccatcattgctagcgtcacccttgccgccgccaccaccaccgccagttgagcgcgttgcgggcgtggatctaatcgaattcgaattggagttcgacaatgagtttatcttgttactgctgccgcgtcgctgtggcagcatcctggctgacgcactgcccgcctggcccaccttcggtcgcgccgtgatcgctctctgcgcgctcatcttgctgttggcaccattcaccacaggcggtccgctgcgctgctgggagccgcccgaaatgattatgcgcttgcgtggcacaggactctcgctttcgctagtgtccattttgcgtttggccgcggcggacgcagtgcccttgcccgtgctcgatccgtctgtcatgctggcattgcttttggccatattcgtggccattgtgcgacgcatctgctgcaggctagtggacgccgtgcggccgctgctcgaatttatggatatcttggatgtggcgccgctgctggaagtcagattgccagcgctggtcgcgctggcattggcattgacatttttcgccttcggtggacgtccacgtccacgcttgacgggcggctgtttgcgtcgcagctcctgctcgtactcggcctcgcttatatcgtcgtcgtcgtcatcgtcggacttgtgcagttgcggattgaaggcggcgtccgccacttcgtcatcatcgtcctcttcgaattccagcatatcgctgatttcatctcgcggcaggcggaccaagcgtctgtcgttcgtgccgatggactggccaccgccatcggccagggcggccaagtactttggcgtcactatatcctcgctgacatactttggattcggtttgatcgatcggcgcgaacgactggccgcaatggtgggcggcggactcgtcgatacgcgcttgctggacaccaccttgaacatcttcggcgtctccgcttgaacggatcgccgtcgctgtggcttgtccagacccaacttgtgaggactaatggacaggggatgattgctgcctcccagcagcaaattgccgcgtcgtttggccagattgctggatggctgctccttgacggccgactccctgctgagcttggaacgcgccgatggcgacgatggtgatggcgataacgctgctggcttcacagcgtgcctggtgcgcggagtgggcttctcctggacgacggattgacgtcttgtggtgcgggtcccacgcagctcctgctgcacctcccgttggttatctctccctttcagtttgccggctggcgtgtctttacgcgaagacgactcgtcgtacagattcctcacgtagacgatgcaattacgtgtcttcttaacgctttcagctgcctctttttttccagcccgcatctttcatgggtagctggaatcgtgggcaagaggcggaatggattattagttacattgtgaccatataggatgagtacagtgggttgtggctagcgggatcgtgttattcacccatttgcaattagtagtatttttcaaatatcgcattgaaattggaaatccaagcaagcagctttattacagagtaacaacattgcacacgtatcgcgtagccagggcccactgtattccactgatatgtgtgtaatgtgcagctagctgctctggcaactctagcgcctattttcgtcactttttcgcgcgccagtcgttgcacacacatatgcacacgcaggcacacacatagagctacatgcacacaaacacacaaacacgtaggaatatggagcgatgagaatatcgtttgattgaaattcagcaacttaccttcgaaaatcgcttaacattttctcgggcgttaagcttgccttcaatttaatcgcacttttcgctggcactttcacaagcccgcgctctctcttttgcttattgttctctcgctgcaactctgctgctgctgctgctgcggatggtcactcttaattggcaactgttttttatattttcttcctttttgggctttgggcaagagattgcctattgctatttagaatgttttcaaaacgccagaatgcacaacacaataacaacaaccgaactgaacaactgagctgctgcacagaaagcagaacagcaaaagtggtggcaatagtggcggaacaagaaaaaaaattataaatgcgagcgaacgagaaagagagagaggagcagcgcaaccaggtggcaactcgctctggcgatgattttctacccaactgtaccacacacacacatgcacagcgaccctgtgtgtttttgcttttctcgagggcttttttcggcgttttgctggcgaaattccacgcgatcggcgacacaaatcgtttggctcgactgtaactgcaacagctgaatgtgcgcaccaatttgtatttgctttctgacacgattaacacgattatgattggcgcgctcgaaatggttcgctgtcgatggaaaaatggaactggaaagagaggggaggattgctgtaatacggtgttgtatagcgtccgtcggtcggtcggccagtgctgcagaatgtctgccagcccaactgccccatcggccacagacaccgattaacactgatttttctaattctcaactgtcctctttaaatggcatttattttatttaacatcaacaattgggctacatctacttgagggccgagggctgtgggcagcggtacttggccatttccacctccgcctcggcgtagctaaagcgattgaagctgtagtattcaggcaccttgtagccaccggtggcggaggcacctggtccaacgggtccgctgctgggcttcacgcaattgctggtcagtcccacaaccgatggcgaggatgcgccgcccgatggcgaggatccggctccagctggagatcctgaggcgctgggtctaccgccgccggaaacgggtccgcccttgatctggctgtagcagcggctgagggctgggcgcagggcacgtgagggcgagaacatgttggacttaatggctggctagcttgcagcgtttaattcgcaaaaataattcacgtaatcacgtatcaacaaagtggacgtgttgggtaacgcggaaagtgcgcttattggcgaggaatatggcaaggcaacgtacgagcgcgaagctgccacctggccgcaaaaatatgcataaaataaaagtggtcatattttaaattggtttaaatgtttaaattattatttacacagttaaagatgctggcagtgctggtatagttatatattatataatttaagcctgacgttagggctagaatagataaattgatttttaaacagtgccatcctttgactaagctagttttagtatttaactaagagctatataaacaactattttctcgtcttaaacttgggctgcgccttgccgtagtgctgatcgatgtgtgaaacgggcgcgcgcctcttgtcgttgcgctc

SEQ ID NO: 2126 - DNA, 3489 bp, DROSOPHILA
cgacagcgaaccatttcgagcgcgccaatcataatcgtgttaatcgtgtcagaaagcaaatacaaattggtgcgcacattcagctgttgcagttacagtcgagccaaacgatttgtgtcgccgatcgcgtggaatttcgccagcaaaacgccgaaaaaagccctcgagaaaagcaaaaacacacagggtcgctgtgcatgtgtgtgtgtggtacagttgggtagaaaatcatcgccagagcgagttgccacctggttgcgctgctcctctctctctttctcgttcgctcgcatttataattttttttcttgttccgccactattgccaccacttttgctgttctgctttctgtgcagcagctcagttgttcagttcggttgttgttattgtgttgtgcattctggcgttttgaaaacattctaaatagcaataggcaatctcttgcccaaagcccaaaaaggaagaaaatataaaaaacagttgccaattaagagtgaccatccgcagcagcagcagcagcagagttgcagcgagagaacaataagcaaaagagagagcgcgggcttgtgaaagtgccagcgaaaagtgcgattaaattgaaggcaagcttaacgcccgagaaaatgttaagcgattttcgaagctacccatgaaagatgcgggctggaaaaaaagaggcagctgaaagcgttaagaagacacgtaattgcatcgtctacgtgaggaatctgtacgacgagtcgtcttcgcgtaaagacacgccagccggcaaactgaaagggagagataaccaacgggaggtgcagcaggagctgcgtgggacccgcaccacaagacgtcaatccgtcgtccaggagaagcccactccgcgcaccaggcacgctgtgaagccagcagcgttatcgccatcaccatcgtcgccatcggcgcgttccaagctcagcagggagtcggccgtcaaggagcagccatccagcaatctggccaaacgacgcggcaatttgctgctgggaggcagcaatcatcccctgtccattagtcctcacaagttgggtctggacaagccacagcgacggcgatccgttcaagcggagacgccgaagatgttcaaggtggtgtccagcaagcgcgtatcgacgagtccgccgcccaccattgcggccagtcgttcgcgccgatcgatcaaaccgaatccaaagtatgtcagcgaggatatagtgacgccaaagtacttggccgccctggccgatggcggtggccagtccatcggcacgaacgacagacgcttggtccgcctgccgcgagatgaaatcagcgatatgctggaattcgaagaggacgatgatgacgaagtggcggacgccgccttcaatccgcaactgcacaagtccgacgatgacgacgacgacgatataagcgaggccgagtacgagcaggagctgcgacgcaaacagccgcccgtcaagcgtggacgtggacgtccaccgaaggcgaaaaatgtcaatgccaatgccagcgcgaccagcgctggcaatctgacttccagcagcggcgccacatccaagatatccataaattcgagcagcggccgcacggcgtccactagcctgcagcagatgcgtcgcacaatggccacgaatatggccaaaagcaatgccagcatgacagacggatcgagcacgggcaagggcactgcgtccgccgcggccaaacgcaaaatggacactagcgaaagcgagagtcctgtgccacgcaagcgcataatcatttcgggcggctcccagcagcgcagcggaccgcctgtggtgaatggtgccaacagcaagatgagcgcgcagagagcgatcacggcgcgaccgaaggtgggccaggcgggcagtgcgtcagccaggatgctgccacagcgacgcggcagcagtaacaagataaactcattgtcgaactccaattcgaattcgattagatccacgcccgcaacgcgctcaactggcggtggtggtggcggcggcaagggtgacgctagcaatgatgggaaaaacgattccgaatcggaggatatgcccacattcaccattgtaaacatcgatgacattatcaatcaggacgatgtgctcatttccagatcacacactgctatggccgcttccgcagctggcggtaattcaatcaaaaaggtcgctttgggcaggccccgtaccaagaatatcggaaccggcaattcggttgccggcgataagaaatccatcactgttaacagcacgcagaaatccctgtccgctgctgttaaccacaacaatacgacggcggggaatccagccaagcgcatcaagatcttggccagcaacagtagtgtcaataccaaaatgggaccagtgcatatccagagtcaactgccgaagccccggcccaggatactcaacgcggaaatgggcaagaagacgcagtcgatgaaaccgctgatgagcatgggcaaggagctctgtcccacggacgtcgacaccgaagaggacgatccggatccagatctcgattttgatatcgataatataccggtatctattgttacccgtaagaatgccaatgtcaatgccaatgccaagtccaagcaggtgacgacaacgacgtcggtggcggcgtcggcggcgatgacgtccgctccagcagcggtagcggttaacaagttgaacaacaatcggcgcaatgtgctgtccacgacagcgtcgtcggtgaatgcgctgattgcggaccggaggctgagcaatctgctggccgataacgatgtccagccggtgttcaagaagccgagcctggttccgcagcgtcgcagcaaggagaaccagcaggagcagcagcgcgacaaggagctgacaacgctgcgcgaaatattgcccaccggcggtggcatcgacgatgccaacagtcccaaatattttccgcccgagaccacaacgtttcacgaggaggatggtcgtgtggtaaagaagatcacctgctatgagacgtggcatgtggttagcacggccaaggatatgttgtcgaagatggcgcgccagcagcgcacctgcctggagctggcgctggtcaagctggccaatgtggcgtcacggataaaggtgccatcgggcaaatggaccagcaaggtgacgctgtacaaggtctcgccgtcgatgatgccccgccagacaatgaccatctttacgggcgatctcaaggcgtacaacatacccgaggaggaccgtcacaagtatcagccgtcgtgcgtgctcttccggcgcgttgtcgttgacaagaacacgtgccgcgtgccctacgatcgggccgtcatcttcaagaacaaatgcttctatgcgaacatcgatggcaagcatgtgaatctgttgggtgcccccgagacggttgccaccatcaaggatgtggagatcctgctggatatcgtcgatcgcctctcgatcagcagcaacattgtcgagctggtcaacgctaagtga

SEQ ID NO: 2127 - protein, 943 aa, DROSOPHILA
MRAGKKEAAESVKKTRNCIVYVRNLYDESSSRKDTPAGKLKGRDNQREVQQELRGTRTTRRQSVVQEKPTPRTRHAVKPAALSPSPSSPSARSKLSRESAVKEQPSSNLAKRRGNLLLGGSNHPLSISPHKLGLDKPQRRRSVQAETPKMFKVVSSKRVSTSPPPTIAASRSRRSIKPNPKYVSEDIVTPKYLAALADGGGQSIGTNDRRLVRLPRDEISDMLEFEEDDDDEVADAAFNPQLHKSDDDDDDDISEAEYEQELRRKQPPVKRGRGRPPKAKNVNANASATSAGNLTSSSGATSKISINSSSGRTASTSLQQMRRTMATNMAKSNASMTDGSSTGKGTASAAAKRKMDTSESESPVPRKRIIISGGSQQRSGPPVVNGANSKMSAQRAITARPKVGQAGSASARMLPQRRGSSNKINSLSNSNSNSIRSTPATRSTGGGGGGGKGDASNDGKNDSESEDMPTFTIVNIDDIINQDDVLISRSHTAMAASAAGGNSIKKVALGRPRTKNIGTGNSVAGDKKSITVNSTQKSLSAAVNHNNTTAGNPAKRIKILASNSSVNTKMGPVHIQSQLPKPRPRILNAEMGKKTQSMKPLMSMGKELCPTDVDTEEDDPDPDLDFDIDNIPVSIVTRKNANVNANAKSKQVTTTTSVAASAAMTSAPAAVAVNKLNNNRRNVLSTTASSVNALIADRRLSNLLADNDVQPVFKKPSLVPQRRSKENQQEQQRDKELTTLREILPTGGGIDDANSPKYFPPETTTFHEEDGRVVKKITCYETWHVVSTAKDMLSKMARQQRTCLELALVKLANVASRIKVPSGKWTSKVTLYKVSPSMMPRQTMTIFTGDLKAYNIPEEDRHKYQPSCVLFRRVVVDKNTCRVPYDRAVIFKNKCFYANIDGKHVNLLGAPETVATIKDVEILLDIVDRLSISSNIVELVNAK

SEQ ID NO: 2128 - DNA, 2590 bp, DROSOPHILA
gctcgactgtaactgcaacagctgaatgtgcgcaccaatttgtatttgctttctgacacgattaacacgattatgattggcgcgctcgaaatggttcgctgtcgatggaaaaatggaactggaaagagaggggaggattgctgtaatacggtgttgtatagcgtccgtcggtcggtcggccagtgctgcagaatgtctgccagcccaactgccccatcggccacagacaccgattaacactgatttttctaattctcaactgtcctctttaaatggcatttattttatttaacatcaacaattgggctacatctacttgagggccgagggctgtgggcagcggtacttggccatttccacctccgcctcggcgtagctaaagcgattgaagctgtagtattcaggcaccttgtagccaccggtggcggaggcacctggtccaacgggtccgctgctgggcttcacgcaattgctggtcagtcccacaaccgatggcgaggatgcgccgcccgatggcgaggatccggctccagctggagatcctgaggcgctgggtctaccgccgccggaaacgggtccgcccttgatctggctgtagcagcggctgagggctgggcgcagggcacgtgagggcgagaacatgttggacttaatggctggctagcttgcagcgtttaattcgcaaaaataattcacgtaatcacgtatcaacaaagtggacgtgttgggtaacgcggaaagtgcgcttattggcgaggaatatggcaaggcaacgtacgagcgcgaagctgccacctggccgcaaaaatatgcataaaataaaagtggtcatattttaaattggtttaaatgtttaaattattatttacacagttaaagatgctggcagtgctggtatagttatatattatataatttaagcctgacgttagggctagaatagataaattgatttttaaacagtgccatcctttgactaagctagttttagtatttaactaagagctatataaacaactattttctcgtcttaaacttgggctgcgccttgccgtagtgctgatcgatgtgtgaaacgggcgcgcgcctcttgtcgttgcgctccttttgcgattttgttcggcatttgacgctggcggcgcccgtttgatttttgcccaactgatggaacttcttgcgctcctcgcgaatattcttcagccgctggcgttcgtccttcagctccttgtagtttttggaggccttcttcagcggcttggcgcccagcttgatcagctgaaacatttccattttgctcttgtttttgatcacacgctggtttttgatcgcaaaattgagcacctcgtggcgcgccttcttgatatcgaattcgggattcagttccatgccgccctccttggttttgtgcgatttttggacgccgtcgtcctgcttttttgttccacttttcgattggaagtgcgattcgtggaagacgtgtgcctgaaattcggtgttctcctgcttcttttgcagcgccaacgctgcacgcgtgggcaccggcttaaaatcggcgctgacgttcattatgctttcagttttctgtgtttatttgcagcaataatagtgaaatcaaaatattgaatgcacatgtacagtgccaaaatgtactaattcccacgtaacgcctcggtccatctggcagcgccgtttttcatgaatgttgcttgtaaggtggcgctttttaatgtccttattacgtcacaaaatctttttatttcaaaatatgtttcagaaaaactgctcagcttgcagtctattgctatttattaagtatacaatttctttacattaatttgtaaaatttcgtacttattaaaagcataataagatcttattgaatggtcaactattataatatttaaaataaattttttgtatattaaaagacattgattttactcattttgcttttgctttccgagtccgaatcctccgaccaaaaatcatctggcaaacaaatcgctttccagcccattgcgtccgcatcgtcagagatggaattctgctcatccagctggttgaagggactggcattcaaaggacccgaccaactcgcgacgcgactaactggcggtggaataaggcaatcggaattctccttccgatacgttcgagccttcagtttgtttactgcgttgggcaattgcggtacaggcacctcctcctcgtcgtcgtcgggcgatgaagtggaattgggcacatttacgatgtagctaatgggatccaggcggatccctatggttttctgggaggatcggctgtgtggtcgcgtcagatgtggattgccctctcgacgtcgccgtgcgtttctattttccgtcttgagcctcccgtttgccgacctgccgccattgatgacgctcctcgtggatatattcaccgggggcgactttcgcctggcggccagcttcttcggatgcggaatcctgtagcgaccattcgcgtagtcattgcgcggactgacgaaaattccagccaaatatttaagcattttccaagaaagtttactaagaatttaaaataattgcaagcgacgcataagctccga

SEQ ID NO: 2129 - DNA, 590 bp, DROSOPHILA
taaacacagaaaactgaaagcataatgaacgtcagcgccgattttaagccggtgcccacgcgtgcagcgttggcgctgcaaaagaagcaggagaacaccgaatttcaggcacacgtcttccacgaatcgcacttccaatcgaaaagtggaacaaaaaagcaggacgacggcgtccaaaaatcgcacaaaaccaaggagggcggcatggaactgaatcccgaattcgatatcaagaaggcgcgccacgaggtgctcaattttgcgatcaaaaaccagcgtgtgatcaaaaacaagagcaaaatggaaatgtttcagctgatcaagctgggcgccaagccgctgaagaaggcctccaaaaactacaaggagctgaaggacgaacgccagcggctgaagaatattcgcgaggagcgcaagaagttccatcagttgggcaaaaatcaaacgggcgccgccagcgtcaaatgccgaacaaaatcgcaaaaggagcgcaacgacaagaggcgcgcgcccgtttcacacatcgatcagcactacggcaaggcgcagcccaagtttaagacgagaaaatagttgtttatatagctctt

SEQ ID NO: 2130 - protein, 182 aa, DROSOPHILA
MNVSADFKPVPTRAALALQKKQENTEFQAHVFHESHFQSKSGTKKQDDGVQKSHKTKEGGMELNPEFDIKKARHEVLNFAIKNQRVIKNKSKMEMFQLIKLGAKPLKKASKNYKELKDERQRLKNIREERKKFHQLGKNQTGAASVKCRTKSQKERNDKRRAPVSHIDQHYGKAQPKFKTRK

SEQ ID NO: 2131 - DNA, 2762 bp, DROSOPHILA
atgctaacaagttaattgaaattcctgcagcgtttcacgtgcgattgtttgctctcacaggacacaacaaaaaaatgaaaactcgtctcggaggaaagcgtttctttctttttgcagctggcttgactggctcctatctggactccttccttttcccttggctgagcaaacacttagccggtgtgaaaaaatgtagacaagtgtaaatttatattcccttctgagggaaaggggcctttggccacttagagctactcgccggaaaatgtgcgagtacggtgtataactttgacgtgagccataaaggaatttaaatatttctccagcagaaaagctatttgcattgtttattcagagtgacttcaagcagacaaggtatctgctgttcagtttttcaggcgtgctgaaagtcgtagaaactaccaagtttattgcacatgagcgctcaacttttgcgaaggaagacacataaggtccttggcaatctgaagtccaaatgtagcatctatagtacctcagctgcaactattcgcctccattttcagttttactggcctgcgatttgcatatttcacataatgtgtatataaataaaccgtatggtcgctaaaaaccacaccgcatcaaaatggcccccgggaattgcgtcaaaatgagaatgtgttgccgcattttcgtacaactccatcgagattggcttatctgcacactgaaccaaaatataagcaacaaagtatgtttatttagtgcggttctgcttttgccacagccataaaacaactgcatgttataaataattcaagcgtgaaatgcggtatataaaaagataaagctctcatgattctactgtctgtacatttttacttttcggtggtcgaagttttttgaatatatgaggtttggctttctggatcatagttttaggaaacaatttttagtttttaaaatgtaacatataacatatataaacattataaaagtaactaatgactaaaaaattttctctttacgacccgacgcgcctcttcaaattgttattcctttcgattagccggtggatctcgtttttttctaaaatatgaaagacggtggtgttaccgtaacgctgtacgaaagcaatttccagtttttcgggggtcaagctatctctgcccaaggtcatgcccatgaccttgatggctacatccttggcctcctcgaccgaaggacttacgtagcccttgctaaatagttccttctgaagcatttccatggctgcccctgacttgcggccaatgcaggtggccttccagccactgtagtttccactgggatcggactgatacaactgaaacccgaagcggcaatcccagcccatgtaaagaaacgataccccgaagggtcgtttgccaccatattgcgtatacgcctgtttgatatcgcaaaggttcgtgaccaactgctcgcaaggaatcatctcaccgaagttgaactgatattgttgggcgatcattcgcagttggttaaccagcacgttaccatccgccgtgttgcccgtggcgcaacaggcaatgttctcgttcaaccacgagattcttggcacaggaatactggtgtccatgagcttgtcaacgcttcgttcagtggccaacaggactccgttcttagccaggagtcccacgcatgtgcccgactgcgaagcggcctccatcgcatactccacctgatagaggcggccctccggtgaaaagatcgtggtgcgggaatcgaagaaacgggccatcgtttggtaaaataaaaaaatatatagcagattacttggaatatggattgatagctataaaaaatatgtagggcatcaaacgagaagttcccacatactagattagcagaaattctagatcttaactgttataatactttaattgcatttaaacataatattcactttatatattattgtttaattctcctattttttccagcccaaaagtggatgcatttctgtaaagtaaaacgtacagagagatgcaaaaaattcaaaattttcaactacttttccattcccttgaagcaccatttattctcattttccgcagcgaaaagtgtatgtggctttggggattattgcacaaagcgcataaacttattaaatatgcaaaatgcctcgtatttttcctgtggtaaatggaaaggcttggctgtcagtcgcaaatttaaggcacagctctgcgttatgataaatgatttgccagcggggagttgtcgaacgggccaggaggcataaattatgaacggggccaaaggtcaaaggtaaaccaatgcctctgcgccgcagacgctactccattaatgtcgaactttagcccacggagagctctgtcacttttccaattgactgcagtcggcaaactatcttaattagtttcgcgcgctgcccaacaagttgattcatctatctggattgtcctaactgaaatagtgaagagagaagccgaaaaggatgtcgtgccagtgcagtataaaatcgatgatccatataacgatcccgattggtgattaggtaatagtaatgtgtctgtctggacgctccgcacccaaaaggctggaatgatgccacaccctggaaaacggggagaagtgggtcttaagtggagtgcgccaagtcgattggaaagcaattcgcttgcccttgccatgcataaaatatgaggcaaccggggccataactcaatttgctgctacatgcatcccctttccatctcccgagtcctggcagcatc

SEQ ID NO: 2132 - DNA, 762 bp, DROSOPHILA
atggcccgtttcttcgattcccgcaccacgatcttttcaccggagggccgcctctatcaggtggagtatgcgatggaggccgcttcgcagtcgggcacatgcgtgggactcctggctaagaacggagtcctgttggccactgaacgaagcgttgacaagctcatggacaccagtattcctgtgccaagaatctcgtggttgaacgagaacattgcctgttgcgccacgggcaacacggcggatggtaacgtgctggttaaccaactgcgaatgatcgcccaacaatatcagttcaacttcggtgagatgattccttgcgagcagttggtcacgaacctttgcgatatcaaacaggcgtatacgcaatatggtggcaaacgacccttcggggtatcgtttctttacatgggctgggattgccgcttcgggtttcagttgtatcagtccgatcccagtggaaactacagtggctggaaggccacctgcattggccgcaagtcaggggcagccatggaaatgcttcagaaggaactatttagcaagggctacgtaagtccttcggtcgaggaggccaaggatgtagccatcaaggtcatgggcatgaccttgggcagagatagcttgacccccgaaaaactggaaattgctttcgtacagcgttacggtaacaccaccgtctttcatattttagaaaaaaacgagatccaccggctaatcgaaaggaataacaatttgaagaggcgcgtcgggtcgtaaagagaa

SEQ ID NO: 2133 - protein, 251 aa, DROSOPHILA
MARFFDSRTTIFSPEGRLYQVEYAMEAASQSGTCVGLLAKNGVLLATERSVDKLMDTSIPVPRISWLNENIACCATGNTADGNVLVNQLRMIAQQYQFNFGEMIPCEQLVTNLCDIKQAYTQYGGKRPFGVSFLYMGWDCRFGFQLYQSDPSGNYSGWKATCIGRKSGAAMEMLQKELFSKGYVSPSVEEAKDVAIKVMGMTLGRDSLTPEKLEIAFVQRYGNTTVFHILEKNEIHRLIERNNNLKRRVGS

SEQ ID NO: 2134 - DNA, 3717 bp, DROSOPHILA
ataaagtgcgcccacagtttattgttcttcccaatgaccttgttgcgcatctcctcctggctgtgccgctccatctgctcttgttcgagcttcgcgttcatgatgccgcgcaccgccgacttggtctcgccctctccgagctccatgctcaggtcctcggaggcggaggcttccagctcgtccttcagctccgccagcatcttaccctcctcgccggcaaaaattgatcgggccaagagcttgtggttccggattaagtggcgcgtcaagttggaggatgtgtgtttggaggacaatgtcttctcgcagtgtttgcactgaactatgtactcggtcagtcggtggaagtgcgctagagccttgaagtttttcccaaccatagctgcttccgcaaatccgggagttgcagtttcgcctgctcctggccaatttggtggcaattgtcgcgtttatttatcaaattgcttttattttcggtgcaaaatgagggtgtgaccgtgtgcgcgaagccacaagctaacattttaccgagctgttacgaacgcaagctggccacaccttattcaacgggtaatatatttcgacagcagtagtggtattctcaaatgttaagtttataattaaataagtgctcctgttgtattccaaaatacatgtcctgatatatatcttaattgtaaagcaatataattagatattagtaaatacaatctaccactatggctcataaaaataattggtttcacattgcttcatacatttttaactaaatttcactgattccaggtgctaaaaattaatatttgaattaatgtaacagcaccgagtgtactgtagagcgcgcgctaacagcgcagagttgcccaaccgcggcaactgtcaaaaagataaccctacttttttgacacgaggtgctgtgcgtgtcttttcctttctttctcgctttttactcgaacatgggtaagtcgactctcgcaaattgcgtcgaaatatcaagaaaatgggctcaatacggcctgcaaacaccatgaaagtgcgcacaaagtacgtttacaacagcatcgagaaaaaagcaacggggaatgtgtgaatttaaataaatatccgtgaatttaacttggtgcggctctttttagtgcgcccccaaacgtgcccatgttcttggttttttttcgacttttccgtgcgccttgtactaacatggacctatttctcaatcaccaggtattagccgcgatagtgcacacaaacgccgggccaccggaggcaagcgcaagtcgctccgcaagaagcgcaagttcgagttgggacgccccgccgccaacaccaaggtaaggataatctccggataatcgcaatggcgtgtattcgaatgccagggtccagtttctcatactcccattaagttttattggtcggtgccgaaatgtgtgcttgaaaaccaagcacattttcattgtttttatcttaccatcgtgacttggatagtatacacatggtttttatgtcgtacgattgcgattgttttcaatgatcgttataccatgttttattttaagagattgtttacatgcctatctaagtttaagttggaattcaccgacaaatctgtgaaaagtatgagataattggtcctaatatacaaatgcaatgttaaatgatgttaacgcgtgtcaactgcaattgtgctctcgagtactcttcttgatgattgaaaagctttatgttcggactactgataaatatatcgttccctccataaggtctcccgtctgtatgcccggactaactcttgaactcattttttcagcttggctccggccgcgtgcacaaggtgcgcacccgtggtggaaacaccaagctccgtgctctgcgcctggaaaccggaaacttcgcctgggcctccgagggagtggcgcgcaagacccgtatcgccgatgttgtgtacaacgcctccaacaacgagctggtgcgaaccaagaccttggtgaagaacagcatcgtggtcatcgatgccacgcccttccgccagtggtacgaggctcactacgtgctgcccctgggacgcaagcgtaaccccaagcacgcccagaaagaggacgagaacgacgtgctgaccaagaagcgcagcgaaaaggttatgaagaagtacctggagcgccagaagtacggcaaggtcgagcaggccctcgaggatcagttcacctccggccgcatcttgggtgtgtattctttctaattcatgattaatgatttttgttatagtgatgtaaaaaccctagcgatccagctactttattgtgttgatcttgttttaagagagacgcaagcctgttgggtgtgattctgcttgtcatagttactctgatcagaccactaaacttatacttttccatttactggaagccccgctctaattccctgttatttttcctttcagcttgcatttcttcccgccccggacagtgcggtcgctccgacggctacattttggaaggcaaggagttggaattctaccttaagaagatcaagtctaagaaataaaggcactagataagcttgcaagacatgatttgcaaacaaaaacggaataaaacaacttgttttttataggaagtgcatttttctgattttgttctttaattttcctgctgacaaagaaatgcagcccaaatagtggacgcttttgttacccaaataaagtccagataaaagataagaatgttcgtggatagtggagggcaaaggactctcccttaaatgtctattgaattttcgtttcataagtatgatacagtaatacgtaatcattaataatagtttaaatatcattcatattggctataattacataacgcagacaggatgtcgaatcccataaagtacaacaaattcatgttaatttaaaactgccaatgacaatcttagaacaaactaaaaactgctttcaattttcttcttatactgctgtcagctaaagttcctagtgttcgaatagcatggtcatcacggccattaacgcaatgccaaataccagtgctagcagctgcttaatggactccttgcgctcctcctccttcaagagatcaggtaatactgtgaccagagcaatgtgcagaaagccgccggcggtgaacggcataatccacgaagtacgtgcctctgtaaatgtaaagataagtttgcttgtttgtcacacggagagcccatttaagcttacccatggccgacgttacgccggagcctccgatggccaccagagcaccgagcaggccagctcccgccgtgagtagttgcgcacgcgcggcgtcccagcgactgaatccggatcgaagcaggattgcgaaatcccccacctcgtgcggaatttcatgaactgtatgtagggaaataagtgaggaactatcctatgtttcaatagtatctataagtacttacgcaatatggcaaaagtggctagaatgccgtgtctgaaggacaccaaaaaggatccagccacggctagaccgtgtgtgaaattgtcaattgagttggccaagaggttcagataaccagccaccttcttcggctgttccttcctttcctttgacttctgttcctgctcgcgtaggaaacagactttacctacatcttcgatgtcgcaggcgccgccacaactctcagaggtttcgccctctggtagttggccgccatgtcgacgcaacaggcagttggcta

SEQ ID NO: 2135 - DNA, 833 bp, DROSOPHILA
atgggctcaatacggcctgcaaacaccatgaaagtgcgcacaaaccgcgatagtgcacacaaacgccgggccaccggaggcaagcgcaagtcgctccgcaagaagcgcaagttcgagttgggacgccccgccgccaacaccaagcttggctccggccgcgtgcacaaggtgcgcacccgtggtggaaacaccaagctccgtgctctgcgcctggaaaccggaaacttcgcctgggcctccgagggagtggcgcgcaagacccgtatcgccgatgttgtgtacaacgcctccaacaacgagctggtgcgaaccaagaccttggtgaagaacagcatcgtggtcatcgatgccacgcccttccgccagtggtacgaggctcactacgtgctgcccctgggacgcaagcgtaaccccaagcacgcccagaaagaggacgagaacgacgtgctgaccaagaagcgcagcgaaaaggttatgaagaagtacctggagcgccagaagtacggcaaggtcgagcaggccctcgaggatcagttcacctccggccgcatcttggcttgcatttcttcccgccccggacagtgcggtcgctccgacggctacattttggaaggcaaggagttggaattctaccttaagaagatcaagtctaagaaataaaggcactagataagcttgcaagacatgatttgcaaacaaaaacggaataaaacaacttgttttttataggaagtgcatttttctgattttgttctttaattttcctgctgacaaagaaatgcagcccaaatagtggacgcttttgttacccaaataaagtccagataaaagat

SEQ ID NO: 2136 - protein, 219 aa, DROSOPHILA
MGSIRPANTMKVRTNRDSAHKRRATGGKRKSLRKKRKFELGRPAANTKLGSGRVHKVRTRGGNTKLRALRLETGNFAWASEGVARKTRIADVVYNASNNELVRTKTLVKNSIVVIDATPFRQWYEAHYVLPLGRKRNPKHAQKEDENDVLTKKRSEKVMKKYLERQKYGKVEQALEDQFTSGRILACISSRPGQCGRSDGYILEGKELEFYLKKIKSKK

SEQ ID NO: 2137 - DNA, 2927 bp, DROSOPHILA
tcgaaaaaaataaacgtctgaaggttgggccactaactattcacatgtggcatccatttgtcaggtgcttataaggcggcatataatgccaaacgatcgcagcgtgacagccaccattaattgagacttgctgttgataaggcggcggctctcttaaaaacctcgctagatttaagagatcgccagctgaagcccagcctcccaacggccgctctttttgggataatccagtttaaacgcatcgcacagtgggatttgcaatccggcttaagtgggttgacaccaatgttaaaaaaaaaaaaaccaaacaatttcaaattgattcaaacgaaactggaattgagtcaattgttttgctaaatttataaaccaatgccaataatcgcagaccaattgactaatcttatctgttcggttccattttaaatcatacgattgattgtctgaatatatggcttaatttgtatacgatagttaatacattttacatattatatttagattactatatagattggagtgacacagatctatggatcatcgatctgttcaattgtctgattttcatttccaagcgttggaaatatacatcctagtacagattttatcttattggtagtattacatatattggtagctttacatataattacacagtcgatcgatatatatatataacgatataacaataaagccatctatcaatccaagtgtttggcttttacggttataaaggcaaatgcactttgcggataagaaagcacgcgatcatgctgatctggactactgggcaacccactgggcaccgccattagtcccactgttgcatcagctccgccgattcgatcggagtgcaaaatgtagatcccgaagagagcggagcgttcgccgcgtccgaagagagcggaagcagagcgggcagcgccgttggcgcaagaactggcgttgtcggcggtatatataaaagctaatggcagcggcgacttcccattcaaaatcgcacacctcaacgcgccgcgtgtcgcacttggtccccccggaatccaaaaaaaaaaaaaataaccaccccaaatattaacccaaccccacgttagaatcgcagtcaaaacccacaaaccgatccgaaagcgcggtgtagaaaaatcccaaaatccaatatttaaaatatacaaacggaaagttaagtaacccccattaaatttttttgctgtgcgaagcgagacaaagaagagtgccaaaaagaatacagagcatctaaaaaggattatcaattcaaagaggagccacagaaaccaatgcaaagatgtgccacaattcagggatcgtggagaaaaacaacgagcagcagatcgagcgctacatggcctgtgggatgccatcgaaggcggtgaagagtgtcaagtacacgctgaagaagcgcgagaagaaggagcagcagcggagagatctggaaaaggatctgcacagggaacagcagttccttgaggaactcgagctaagcagtagcgccagcgactcctcctcctcctcctcgtcctcctcggtcaccggcagcgatagcgaggatagcggcgttaccgaaaccgttttgaaatcgtcgccgtcggcggatatgacaaccagtccaaaggtcatctcaccggcccccacacccagaagcgacctcttacgattctgcccgcgatttcgcaagctgcagcaggagcagcagcagcagatgctcaaggagatggagttgcaggaggaggagcccttggccaccagcacgcccgccgccgccctgaaggctcaacagcagcgcaagctgagctccatggagccgtcaatggacgacgccctggccatcggcacccagatgactaggcaggtgtccgagcgaatcacctgcctggtggccaagctgcaggccagtcgcctgtacacgtaagtctcccaccattattccccgctaaaacacatcatccatcatctttcaactggactcctaagttgtctcatttcaataattacctgctacaaatttaggagatagagttccgttgaaactttctaatatattcgcatactgccacttaagtcactttaaaatatttaacatttggatagtgccgcttaaaataaaatatctgctagtttttctacaattcaggtttttgactcttagtgcagtttctattattccattagttctgttaacaactctgttgcgaatccaattaacttattggtagttttactccgttgacggcgaatattttgtatttgtatgatcacaaagtgcaaatacttctaaaaatagccaatgaagttaatatttacgggagaatattgagttacccgaagtaaaattgatctgtatgtatcataaagattattttgtagcgatcattggtcggcatatagcacgccccctgttactaaatatgtaccaataaattcatcagctgacgaaggaaggaaatcctaaatgctagcgccactatcagctcttatcagttcattgtcacggctgcggatcatgctgatcacgcccctatattgatatttataaatgcaaatataagcgtagaatttttccaccgtctgctgttgtctggggcgtacaaccgttatgcaaacagcagacacaagaaacgtctgtcgttggtctattaacacactaaagtggcttcttaacataagcattaaagactattagactaagtttaacaatatatgtatgtatgtatttaactaaaatgtcacagctactaaacactaaactgatttgcagcactctcaaactttctgaacagctttggccagaaagcgaaatacaacgaagaccattaaacagattgttagcaccccattgataatgcctggcagcagacgccaaactcgtgacctgcacgatatcgatcgccacagtggaaccccaagaaatg

SEQ ID NO: 2138 - DNA, 927 bp, DROSOPHILA
cacacctcaacgcgccgcgtgtcgcacttggtccccccggaatccaaaaaaaaaaaaaataaccaccccaaatattaacccaaccccacgttagaatcgcagtcaaaacccacaaaccgatccgaaagcgcggtgtagaaaaatcccaaaatccaatatttaaaatatacaaacggaaagttaagtaacccccattaaatttttttgctgtgcgaagcgagacaaagaagagtgccaaaaagaatacagagcatctaaaaaggattatcaattcaaagaggagccacagaaaccaatgcaaagatgtgccacaattcagggatcgtggagaaaaacaacgagcagcagatcgagcgctacatggcctgtgggatgccatcgaaggcggtgaagagtgtcaagtacacgctgaagaagcgcgagaagaaggagcagcagcggagagatctggaaaaggatctgcacagggaacagcagttccttgaggaactcgagctaagcagtagcgccagcgactcctcctcctcctcctcgtcctcctcggtcaccggcagcgatagcgaggatagcggcgttaccgaaaccgttttgaaatcgtcgccgtcggcggatatgacaaccagtccaaaggtcatctcaccggcccccacacccagaagcgacctcttacgattctgcccgcgatttcgcaagctgcagcaggagcagcagcagcagatgctcaaggagatggagttgcaggaggaggagcccttggccaccagcacgcccgccgccgccctgaaggctcaacagcagcgcaagctgagctccatggagccgtcaatggacgacgccctggccatcggcacccagatgactaggcaggtgtccgagcgaatcacctgcctggtggccaagctgcaggccagtcgcctgtacacgtaa

SEQ ID NO: 2139 - protein, 207 aa, DROSOPHILA
MCHNSGIVEKNNEQQIERYMACGMPSKAVKSVKYTLKKREKKEQQRRDLEKDLHREQQFLEELELSSSASDSSSSSSSSSVTGSDSEDSGVTETVLKSSPSADMTTSPKVISPAPTPRSDLLRFCPRFRKLQQEQQQQMLKEMELQEEEPLATSTPAAALKAQQQRKLSSMEPSMDDALAIGTQMTRQVSERITCLVAKLQASRLYT

SEQ ID NO: 2140 - DNA, 3297 bp, DROSOPHILA
ccaagtccgaaatggaacgcacgagccgagcacgtttgggtttccagacacgttggccagcttctcataggaaattcgttttgggcgccccggcaaattggaaactctaagcacctttcaggctggctgtgctataaagtaattagacggccaacgaatttgaccaagacataggccaagataagtattcgtagcataggtctaaagcacttctgattgattgcccttacaacaataggaagcggataaggataaggaatcggtttgcagatatgaccaggcgtgcaaaagagttcgcggaattgctaatcggcagacggtttgttttgcttgaaatttactaccaattatggtagccaacttacttaagccttagttaaatatataatgcctaatattggttatactctacagataattcaataaaaagctatgaaatcataaactcactgtcgcatgcatcgaagctccactgtacattgcacttacacatttcgcttgcagcttgtttactcgcctgcgaactcagtcgctcgcttgttattgtcattccagcgaaaagtgcatggcaacccacgctggcttgggggcggggcacacacacgatgaagtgggggggttactgggaagcactttgttttcgtgcgttgcacatatgtacatatgtatgtatgtacgtacatatgtaattatatacgttagccgacttgttttgatcgaattcgccgtaccgccgcctgcctttgtctggctttatggactccacaggagcgcagcccaaaatggggggcttggagtcgaacaccctcccggtggagaatccgtccctggagcaaccgagttcgttgtccagtcgggcgaatttgagtctggttttccgcacgcgttttgtttactgtccggtgacttgttgctgttctctgtgcccgccttcgtctcgtttatcagcgattgcgaatactcgcacggactgctcaacactttagtcaatatttagccgcttcccggagaggttcatagatcgcagacgcactacatagtatcagcatggttatcaacttcgccgccggtccagccaagttgcccgaagaggtcggtgaaatgggtggcaccactccacacacgtgacgtgtaatagtaaccttgattacatggttatctctatctgcatatataggtactgaaagaggtgcaggaaaatcttgtcaactgcaatggcagcggcatctcggtcatggagatgtcccatcgctccagcaactatgccaagatccatgatgcgaccatcagcgatcttcgcgaactcctcaatgtgcccagtaactacaagattctgctgatgcagggcggtggcaccggacagttcgctgcagtggctctgaacttgattggcaagactggcactgctgattatgtaatcaccggctcctggtcggccaaggcggccaaggaggcggctcagtacggcactgtgaacgcggtgctgcccaagttggcaaagtatacaactgttccacgacaggagacctggaagctggacccaaatgcctcatatgtctactactgcgacaatgagaccgtagagggcgtggagttcgactttgtgcccgaggttccagccggtgtgccactggtggccgatatgtcctccaattttctgtcgcgtcccttcgatgtctccaagtttggcgttatctatgcgggagcccagaagaatatcggaccagcgggcaccacggtgatcattgtcagggacgatttgataggcaagcacttgaagattacgccctccatcctcaactttgagcagatggacaagaacaactccctgttaaatactccgccgacctttgggtgagcccagaatgatacatggctggtgaattctttgttaaactttccccttgcagcatctatgtgatgggcctggttttcaagtggatcaagcggaacggaggagtcgctggtatggccaagctggcggcagccaagtccaagttgatttacgacacgatcaaccagtcgaatggtttctactactgcccagtggatgtcaatgtgcgttcgcgcatgaatgtgcccttccgtattggcagtgccagtggagatgatgccctggagaaggagttcctgagcaaagccgaggccgagggcatgattcagttgaagggtcatcggtcggtgggcggcattcgagcctccctctacaatgctgtaacgctggcggagacccaacagttggccaatctgatgctggccttttacaagaacaataaaaattgaacaggttcatctgtaatttgttggtttttgatcgtttacaaaaggccgcgttggcggaagatctcgtccagcttgagctccaggttggcgttggttcctcgcagattgtccaccacctttttggcccaaacgaagtactgatcacgacgctcctggaatgaaaatatgtgatccataaggttccgtttttcaaaccaagatgggcccaaatacctgtgtccaccctgtcggtgtgttgacttgcagatcccttaggttatccaatttgtcagccagctttatgagctttgctctgcagctgcttttggctgcattttctatttgcaggcgttttctctcctgtttctccagggacttgtcgtccgtcacctccctcactagtccacaaacatccggtccaaagagtttctcaacatcctcgaaagatgcgtccgtatcctccacgacatcgtgcagaagtgcagccattaggactccctcatctgtgatgcaggcctccacggagagaatagtgctcacattgatcacatggttcacatagggggtttcctgaggatccttgaaatgtaaaaaagatagtattcatgttttaaatatatcatttgttgcgttttaataagcttaccttgcgacgttgctgccggtgcttaaaagctgcatattggaggcactccatgaatttggcagatggatatgtggccattgttgtaagaaataattaaatgaacgggcctttagttcaaatttaaagtctaaaccttattttttgcatttatttacatttttaacataacagctgacttaacagaccggcaagaatctataacagagcaattgttggtgctttacagcgcggatggttaggccctggaaaacctatcgataaataaaaagcgcggcattcatttaaattcaaaaacctttatttaaacagttcaccaaacttagtccttcttctcgttctggttctcgcacttgttgcactcctgctccttggccttgcgcgctgctttg

SEQ ID NO: 2141 - DNA, 1156 bp, DROSOPHILA
cttcccggagaggttcatagatcgcagacgcactacatagtatcagcatggttatcaacttcgccgccggtccagccaagttgcccgaagaggtactgaaagaggtgcaggaaaatcttgtcaactgcaatggcagcggcatctcggtcatggagatgtcccatcgctccagcaactatgccaagatccatgatgcgaccatcagcgatcttcgcgaactcctcaatgtgcccagtaactacaagattctgctgatgcagggcggtggcaccggacagttcgctgcagtggctctgaacttgattggcaagactggcactgctgattatgtaatcaccggctcctggtcggccaaggcggccaaggaggcggctcagtacggcactgtgaacgcggtgctgcccaagttggcaaagtatacaactgttccacgacaggagacctggaagctggacccaaatgcctcatatgtctactactgcgacaatgagaccgtagagggcgtggagttcgactttgtgcccgaggttccagccggtgtgccactggtggccgatatgtcctccaattttctgtcgcgtcccttcgatgtctccaagtttggcgttatctatgcgggagcccagaagaatatcggaccagcgggcaccacggtgatcattgtcagggacgatttgataggcaagcacttgaagattacgccctccatcctcaactttgagcagatggacaagaacaactccctgttaaatactccgccgacctttggcatctatgtgatgggcctggttttcaagtggatcaagcggaacggaggagtcgctggtatggccaagctggcggcagccaagtccaagttgatttacgacacgatcaaccagtcgaatggtttctactactgcccagtggatgtcaatgtgcgttcgcgcatgaatgtgcccttccgtattggcagtgccagtggagatgatgccctggagaaggagttcctgagcaaagccgaggccgagggcatgattcagttgaagggtcatcggtcggtgggcggcattcgagcctccctctacaatgctgtaacgctggcggagacccaacagttggccaatctgatgctggccttttacaagaacaataaaaattgaacaggttcatctgt

SEQ ID NO: 2142 - protein, 364 aa, DROSOPHILA
MVINFAAGPAKLPEEVLKEVQENLVNCNGSGISVMEMSHRSSNYAKIHDATISDLRELLNVPSNYKILLMQGGGTGQFAAVALNLIGKTGTADYVITGSWSAKAAKEAAQYGTVNAVLPKLAKYTTVPRQETWKLDPNASYVYYCDNETVEGVEFDFVPEVPAGVPLVADMSSNFLSRPFDVSKFGVIYAGAQKNIGPAGTTVIIVRDDLIGKHLKITPSILNFEQMDKNNSLLNTPPTFGIYVMGLVFKWIKRNGGVAGMAKLAAAKSKLIYDTINQSNGFYYCPVDVNVRSRMNVPFRIGSASGDDALEKEFLSKAEAEGMIQLKGHRSVGGIRASLYNAVTLAETQQLANLMLAFYKNNKN

SEQ ID NO: 2143 - DNA, 15572 bp, DROSOPHILA
gccgtaaactatggcgatgccccactgtgcccgcacacaaattccgccacctcgctccgaaatcgtgtgtatttggttaataataatctagttgggcatcgattgttcggccaaaatgaagccactatccgtggcggagtgttaattaatttgcacttaagcgcagctgctggaagcacttgatagaagtgggcatgccggttctcttgggaagttggcttactatagtttagcgttaaggcgttaacttgtggcctttaaagttcttagagaagactttctgcagctgctcaggctgttcattgcggcatctagcataaaatttagagtttgaaagtaagtttctatgaaaaaaaaatacacgtatatataagtataacaagaaaaggaccaaatcaaagtttatataccattgctgtacttatatatttgaatattaaatatacacaaataaatatataccgaataagaacactttatgattaaaagcaacaattattgattaatctacttctacctaaactggtgttgaaactggtataatgaaaaacaactaaggtacatttacttccatttaattttctattggcagctatataataaacagttccgatccaacgtgaaccgacctatcaccatttttgataaagttttacgcagaaacgtaaaaatatctaaaagcatgctattttgtatttgtatttttgtattttgtagagaaaagttgtagatctatatttaattttgcacacatgagcattttaatcagttttgtatacattatttcgaactcttcaccaacagaataaaatgaaattaaaatggtccgatgtcgggggccaaacaaaataaaggcgtattgagttgtgccatgtttcaggtggaaaaaccagctgcaatataattgcttttgaataatgcgaatttcggggggaagtttcttttaccagcacaatataaacaaaactgctcaactatttctcgatatttacattttcagggtccatcagcaacatagatgacgcggagtatcactgcaataagacgcaggtgcgcaaggtcatctcgggggtggtgggtgccgcctcctcggtcacatccatacaagttgccaatttattgcggttattccgaattccccaggtgagtttccattgtgtgatcactaactgttcgactcagtgcgtgcgaagtccaaaggtcatggcataaaagggcagtcctttttgtttttagttcagattttgctttatgctcgcaactacatgtatatgtgctagtttggccaacaaaagtttctcctatttcgtaattaaaatttccaggagccacatggtaactgttgcaatggcttgcaggtctttcggttggctttgccgattcctaagtgtctgcacgtgccactaaattagtcgagtcccgcaggccaactagaggaacatagtgctgcagttgccaagaagtgtacagtagggactctcagcaatcataacaattaatgtaattattttactatatgttcaatttatctttaatatacaattccaaaatgatgattcttagctgctaaagaactgacttacatattaatttcctaccaaaaccaataacaaactggacagatcgcttcagttgagtacttcgactatcagatacccgtcacttgcattaccgcttaaaaagcttgtatctagcattgctcgtatttcaactgcaaacgacattgcagttttttgggtgttcctcatgtagtgactagagcgtgaaaaacgccacaaactaatatccatttctgattcaggaaggaatataacattttccgagtgccggcatgaatcacgtgcaggaagttgaaggagattgagtgcccggttcggctgctccagctacgtgagctggagccaaaagtcaacaacgcgacaataactaagtagccaactgccagatcccttctcgatatatatatatagtatgtactcactactacttggatgccattaaacgcacacgaagtgccagtcgaaggagcagcagccgttccatgcaggcccagctatcgtcccgaaaggacctcataaatcagcaataaacatttgattgcatttggtttgcacgcgtggattctgcgctggcttcgcataaacagcactttcgagcaaattttgtgtgttctgcaattcaaatttctggtcgatagcgacttagtgagtttcgtttaggcttagcggaaattggctgcaatgcaaaatgttcgcaaggacacaattcaaatgacaatgcagttaaaaattccgtaaatgcaatattttatggcttatcgtatttggataacaatgttttaaatgcttgaacaaagcattgctgtcttttttgtttaaagtaaaatttttgccgtcagaagtttgtgcattgaattaaatggttattcaaacattacattttatttatcttgaaaaaagtacaaaaatatgtattaaactcgtagtattatatataaattaaatatattttattattttttgtttttatggactgagtaatagcacttgaattttccaactagtttttcacaatttttcgtactttaataaaagtaaatatttgcatctctagtgtcaattatcaaaagtcaacaaagccaaagctacacaataattttgctataactcgacgctttaaacgctcatgaaaatcaaaagtaattctgattaaataaaagtgagaatgccataaaccataggtaaattagactcagaaataaggtctggtatgagttgcaatgcctgtcttgccatgagcatttgacaagtaatcaagcacttacgcagaagctgttgactaatggtaatgacacttaattagaagccaagtagttcattaaacacttgcagttgacttgccacgccatcgacgatttgccccaggatgcacctacttcctgccccaagtgtttgtgggcggatccttctctaaccaaacggtttatgtgtgcgtgaaattggtttcccggcttgggccaggtcaccacagttggccttttgctgcagttgccacagctttgggtttcgcaaggtaatgccagctgatgttttcttcgacagcagcattgtttgtggtttttggaaaacagcttaagcgagaaaatatgagcgaaaaactgggaaggagcttacgaaaggttctgcagaagcgatagcccagaacgagtgcgaaaaaatatgaaaattaaatggcgaccttaaagtgaaaggggttcttacataaaatattgtagcacacttgccactttgtgccacccaagcaatagcgtttccaactaaaatgttatcccatcatattgtaacccgcctcaccacattttttccatccaggtgtcgtacttctccaccagccccgagctgagcaacaaacagcgattcgagtacttctcccgcactattccctcggatcactaccaggtgaaggccatggtggagatagtgaagcggatgggatggagctacgtgtcgattatctacgaggagagcaattacggaatcaaggtgagtgtttatgtatggaactttgattaaaatggaagaaaggagtgcatctatggctgagaaatggagttaaagaatgagaagctctatgttttaaaagagcttgttaaaattcaaatttaatgtatgttgcttcattttactttggatacttcttggataaaatctattttggataaccattaaacattgaaaagtcaataataagtaagttcaataagtttcagccacttaaatttcctctttttcaaaggactacataaatttcacctaatagggcaaatcatttaactagtaatccttaaacggtggaactttaaaataatgccaagtgccgtttaaaagcgttagcagcactccattatcatatgtttatatccttagccgcttgcagtgtaaacgatatacattttaagtgaacgccttgtatcctatccaacttgtacctgtgtaaacattttacccatcccaccacatgcgtttttattgctcacccacactgcacttgttttcaggctttcgaggaactggaggagctcctcgcacgccataacatttgtattgccatcaaggagaagctggtgaaggattcgggagtggccgaggacatcgcctacgacaatatagtgcagaagctgctgacgaagccgcgggctcgaggtatgtaactggagagtgggaagttgggattgcagagagggatcggaggcgatgtggcggaggaaaagtgcatttccaaccggaacagcgactgcagtctgccagtcaaaatgcaatttaaaatgaaaatgtcaaagcgaaggcgcagtgcaaatgcgaaaggaaagcccttcgcaacgcccgcacaatgaatgcgatccggagtcgagaactatgctaggatttttggctgggcgacggaaattgcgtaaattaaatgaaaatatttaaaaactccctcgccagcgcgccgttgtgccatctgtgccagcgggaaattaaaaagttcacgacaaaacaaacggaaaaagttatttgcaaataaattgagagatagtcgcccagaagtgggcaaactgatacgtccaatactgtagttgtgcaaaaaagtgtgtatttgttatggccaaaaatgaaggtcctgtctattgtccgtggacaaaaagccaggagtacttggcgtccctgaggtctgatgaatgacaccacctattcgacatggcaagcaattaaaaattccagtcagggttggccaagttcaaatttatcggaacgatttttcatcctaaatgaaaacgatttttccacatggcattgccccaatctgcgccaatcatgcgattcagcagcgagataaacaaaaaataaatgtcaatcaatttgacttttcacattttgtgttcccctgtcgaatatcagctgccattcgcagacgccgaaaagaaatataaattaaaaataattaccgcccacagctttgcgcatatcattagtcagtgcctcgaaagggtgaagaatatcagggtcgtgcccgccaataaaaagcacacgggtcgaccaataacaattgacttttgtctggcaaacaatttttgatttacataaatgcgccatcaggagtcgtaaagcagtcggtcgcccaagaaaagggttcctccgccaccattatttattgtgatttgtgatttgacgccgcttacagggcgctagccgcctcgcaacgattaatcaatttgacaaagtattttccctggcatcagttgtttaattttgcatatcgagggttctttcactgctcctggtcctggtcgtggttctggtgggggctccagttgggtccctgaaaaatgatgcccttccggatccgtaactgcggctggtaactgccgccaggggtgaactttacgcttgttcggatccccacacatgtcactccggagctaaatggaatgtgggcggggggccgacatgtttttcctttttatcgccaatgtggcaagctgatgcgatttcagccaggacatgaccggcccccacccgctttagatcactttctggcccggctttaaagtttccccctaatctgcataaatatcctgccgagtgggctcttaaattaaattttatatccctgctaagaataaccgtggttctcgactggtataaacaggctactgtgtacgagaaagccgctcaagtgcatgtctaaggcaaagtgaaaatccaaggaaaatatccttaacttcacaaaagtatcgacaagttttcccgttgtcgccgccgcttcctttgaataagattccctcctcttacttcgagtggcggagcggcagtggcaaatcgataccgggacatgttgaaggggcaaaaaattatggctaagacaaaggacctcttgggcggaccgttaagaagtgacaactgcagctcacgtatcccatacaagtttgtccagagcgaaacaataagggctgaaagcgttggaaaatttggtaagcacctaaccaaaggatagttttagaagctcctgatttccatccgtagaacacaagcgacttaggtgtcggctttaccaattggccattgggaacgttgtttgcttggagtttctaatgatatcttcacactttttgtggactttctgttcgcttcttgggaccaattaaaatattgttttccttgcaaattgaagaacaataccttggcagaaaatctaaatatagtaaagatacgtcgccaaatggcgaacatctgaaaaagtggttgcattacatcaatatatacccttcgtcatgtgtaccccttgtaccccccatacccttgttttatagacttgttttacgcctaacggctatagtaatccaacttaatttatatagcatttgcgtaattaatattcaaagcgaaataatgggctgtcatttaatactataaaaacactttaatccgccctcggaaaggagaacacaagagcagttggcagctgcagattgttttcttttgcgcacaaaagccgctcattcactattgattgcaattaaaattaaattctttcttcctcctttcgcatccttttaatacgccgctgcccaggggccattatcttcggttcggatcaagaggtgcgccaagtgatgcgggcggtgcgccgggcgaatgcaactggttccttctcctggatcggatccgatggctggagtgcccggaatttggtgtccgacgactacgagccggaggtaggtgaactattccgtcagaccggatgacgggccagttaccgtcagccggaaattatgagcctaaatgggcggaacaactcggtttgattaatgactcggatttcggtcacatactcacgcacgcacatacgagggcccaaccccattacatgataaccaaaaaattataaatgatggcggccgaaagaacactttcacacgccctttcccatgatgaattatggttcaatttggattaatcgtgcctttgtctgtgcgtggctaattaatttgtctaagcccttcaagcccagaaatggtcctcctctctgatcaagctcattaagtatacgccgcgtgtgtcttggtgtcatcaacaggtggaaggcacgctgtctgtgcagccgcaggcgaatccggtgcgcgggttcgaggagtacttcctcagtctgacggtggagaacaatcaacgcaatccctggtttgtgggtaagtgaattaccgattaaaattaagctggtgttcattaatgctctgatataagtagtcctttattagtatcccctttcgctaaatggttatcttgatttcagaattctgggaggatcactttcagtgccgatatcccggcagtacgagcactccgtacaataactacaccaaacagtgcaccacaaaggagcgactttcacgccagaacactgacttcgaggaccagttgcagtttgtcagcgatgcggtgatggcatttgcatacgccctaaggtacgattaagcttattttggaagcaacccactatcattttaaacgtattaagaaaataatagttcttttgatcaacccttttagtttttatcaacctatggagtagcaataaataaaatgtaatgtgatttcctctccttagggatatgcaccgcgacctgtgcggcggaggtccttcgctctgcgaggccatgaagccaacgaagggtgcagacttgctgaaatatttgcgaaaagtggagtttgagggtgagtgagtaatagaagccgtgtatccacttttgccggataaaagcaagttaaattaacggagtaactattcccgggaattttcaaaacaggatgtccgactgactcagatccctttgctctcgcttagttccttcagtcggcaagtgatgcgcacatagcttaagtggaaatttcctgccaacccgtccttgcagttgggccaaaagccccgcacacacacttacacacacaatggcatatctcagcctgcgagagtcctacaaggcgcattggccatgctttcgagtggaaaattgacttgcttgtcatcgtcattgaactcgattgaaattcaataaattacacagacagacggacgggaaggagccaaaggccctgactgactagcgcagattgtcaattttctgatagggcgagcgggcaagcggcaaagtcggcgaagtcgtctctggcaggcgtgaaaccataaacccatttaactcctattcgatcaatccctccgcaggcctcagcggcgacgagttccgcttcgacgggaacggcgacggtcccgcccggtacaacatcatccacttcaagcagtcccaggcgggacagtaccactgggtcaaggtgggcgagtacaccgagggcgagctgcggcttaatatgacgggtaagataaagcccccagtaggaaatacttaaaagtataataccaggaacccttcaacattaagtttacctgactgaattcgtgcatccttagtctcctgtaacctaatgtattcgtgctcactgctcctcatcaatactaattttgatctcattatcccgctaacccagaggtgaagtttaagcggctgagtcccaagccgccggagtctgtctgcagcctgccatgtcttgtgggtcaggccaagaagtacgtggaaggcgagagctgctgttggcactgcttcaattgcacaacctatcaagtaagtgaagcccatctgaggccagtaatttatttgttggcccttcgaatagattgaaatgtagcgccaagtgaattattccggaactaacgcgttgacgggagatgggaaaaatggggcaaaaacaattaagccatcaggcctgaaaggggctgcaagtgaatggcaaacatgccgcctttgtgctcgccccatccatttatcaagtgttcctttgtgcggtgcgtccattgcagatccgccacccggatgacgagacccattgcaagctgtgcaagctgggcactcttcccgacgcccacaagcagtactgccgccccatcccggagatatatttgcgtccggagtccgcttgggccatcggtgctatggcgttcagtgcgaccgggatcttagtaacgctcttcgtaatgggcgtatttgtcaggtgagcagcgcatacaccgtgataaaaacgggtataggaaattacttttaataatatttaatagttattaatggcttttataaaaccatttgaaacaattcagtcttaagatcgaacatttaacaatgaaatttgctttctaaatccaaaaacccatcaggatgttatattccttttctattaagaccatttttaataatacatagtccaatattatcataaaaccttgttaatgtatatattttctcaacttcaaataatttagacaatatataatactttaacaataattaaataatttgaagataaggtaacgggtatattatagtcaatgcattcgttcttgtgtttataagtatagttattgttatactagtgacaagctaaaggatctagatcaagctgatctgagtgccaaatatttcatgagggcctgttttctagctatgtttttctctgactgtatttattggcacacaattgtccgcttgcatggatatggaaagcaattaaaaagtttcaccctttccgggcaaacttcgccacaaagttaaccggcagacacataaaaatgatgcattaattggcgcaagaaaacgtcgtcgcaagtttgaaactgaagtaacgcctttccctccttcaccttccacccaacaggcacaacgacacgcccatagtgcgtgcctctggtcgggagctgagctacatcctgctggcggggattttcatgtgctacggtgtcacctttgccctggtcctgaagccgaccaacatagtgtgtgccattcagcggtgagtgtgcaaattgccgagatgatgcgtgtgaattttcctccgaaactccctcttttccgcttttccgcttccacacaggtttggtgtcggcttctgcttcacggtcgtttatgcagcactgttgaccaaaacgaatcgcattgcacggatcttcaaagcgggcaaacaatccgccaagaggccctccttcattagtcccaagtcccagctggtaatctgtgcgtgcctggttagtgtgcaggtgagtgtgtggagtggtctggtggcgctcctggcggtgaccgacggggcggatgtggaatcgagatgccctgcgatgactccgtgtcattctttccattcactccattcgcagatactcatcaacggcgtttggatggtaattgcgccatcacatgccatgcaccattatcccacacgcgaggataatctgctcgtctgcgactcgtacatcgacgcctcctacatgattgcgttctcctacccaatcttcctgattgttatttgcacggtctacgcggtgctcacgcgaaagattccggaggctttcaacgaatcgaagcatattggtgagtaattgagctttttatttccagaagagctataattcggcgtaattggcattgtattggaagggtctgtacaaaaagccatgcatgggtttgcattgtctataacctggttcattatagcagcaatgctattaactggtttatttagtgcataaaatagcacaacatgtatgaatgaactccttataatttagttatgtgttttgtatttgggtaatttggttatttcgaaacaatacacgcatgaaatatttataagtctatattttatgcattgcaacctcagagttctagtgcagaaatgttttataattatgaagccataatgcccataattggccactttgattgattacttaaccctattgttacaggattcaccatgtacacgacttgtgtgatttggctggcttttgtaccgctctacttcggaaccgccaaccacgttccgctgcgcatcaccagcatgtcggtgaccatcagcttatccgccagcgtgaccatcgcctgtctcttttcgcccaaggtgagtgagtccggatagctgggagtgggttgggcttcggcttggggggattcatatccacacgggtcctctgtaaattgattggtaattgcgttatgcattaattattgcgcatttatctggcgaccgttgaatgatttttggtgccacagtatgcagaagccatcggcgattttattccatttcattccgtttattcaggacgcgtggacgagtgtttcattaaaatgcaataagacggaagatgaggacaggcggaagccaagggtttggcaattcaacaaccggctgcatcgattgcgatgtgttgcttccaaccatattgtttttaatgcctacccttcctcttggtccatattccttggtccttgcccatttcatgatgtttccccgagatgaagcttaaatgtcaacaagccatgttctcccacggagctgaactggtcatgatctcctcccaaaggcgcgcgtcctttatgttggcatactcggtccccatgccaacatattttttaatacgccctgctattagctattaagatgcaagtaaactgccagacaagccaaatatagccagccagttgagttcatggactagatgatgcagcatggcaaagaagctgtttaccccgatattaaacgtcaaggaggaagcttacatttaagcactgatatcttcattacacggaaacacgacctttgacagcaatgtgcaatgtgaaacgcaggaaaggaattttataagaaaatgtcgaatagcttgtttgattattttttttgtataagtattccaagcatgaaagttagatcagaaaatccaagttatattggcaaataatgaaagtctcttaattgtatggctattaaaggggaaacacttttctagttagtttccaaaggcttccatataacacttaaagatgccagaaaggaccttcgccagtgtctatgccattgaagagcaaggaggtagaaatagtaaatcagccagaaacttgattagcaacggagcggagctcccacaaccgcacacgtcatagttcttggtcccggagcggagcaagctacagtttatggtctgtctgcatattccgggtgcaaagtagaacaaaacccggggaggcgaagggccgtaaacactcagcaaaaggctattattaaatgtcggagtggagcatacttcttggcccagtggctgctaaccgggccaactgtacgctatcagatgtcacctaatgcacggttggtttgcgacgaggaaggaacactgtactgcgcacacggcaaatacagtgtgcacaagcacacgaaccgcaccgtacaccttgagccataaaaatgcaatttacaactggttgtgtctggcaaaaggaaaacaataaaaggctgccatgaatgcggcatgccacacaacaactggggatcaccggaccaagaggcaacaaactaaggccctggcgcaaaggtgccggcagccacgcctccttccgcaggacaaaggctggcaaccgaggtggcaagccattccgacttccgactgccacgcgccctttctgctgtccgtccggctctgccgcagtttgttttcgaacttgccgcgtttgtttgcggtgaaaacaataacaaggggcgtccaaatggcagccaaacaatgtcaaagcaaagcggaaatgacccaccgtgcaggctacgtaacagtacgcagcgtatcgcaagttgaaacctggagcactgctcgcaatttgcgctaaattttcactaagcgttttatagatggtgccattctagtaaggagtatgtgtgctctgaaccaggaactcgctcacgtggccaaaaacaaattcgatttggctttaaatatatattagaaagtcaagacacctcaagaaattggtgggaaagtgttttcatgtattgaatagtaatcttattagcggtattttttacacctcactagtagagtgaaagggtagactagtttcgttgaaaagtatgtaacaggtaaaaacaagcatttaaagtataaagattattgattggaatcaatagcagatacgatctgaccatgtccgtccattcgtattaacgtcgaaactaataagttgagataaagcatactgattccagagacgtagacgcagcacaagtttccgtattcaatatccgttccggcagatctttctatagtcggggaactcgactatagcgttccctaaattatatttaaattaatcaaacaaaaatgaacgaatgcgtgaacgtgttatgatttaatccgtctattacattgttcattgttatattattcttaaagtgtaagtatggtaatatggggctcaggcgtgcacttctgctccctgtaagtggcccaagtcgttggcctttgctttgaccacattactgctggccgtagaagcaggaaatggctaatgacacttgaatttggattaggaatgggacttggtggtgggcgtggcaggtcacgcactgacttctaatcaaagccgtaagataagccatcttggggaacaacgaaattggatatcgcctccaaatagctattacacacaatgggtcgttcgattaatgcctcgaacgggaaattaacctaattggaaagacgcactgcttttctgactcgaccctacgcttgtgtccttgcagctgtacataatactcatacgccccgagcgcaacgtgcgccagagtatgatgccgcctcgctacggcaacatgcaccgcaccgctggcacaggaccctcgtccatgatggccgccgccgtggtgaccgccgccacctgtgcccaggaggagaagatccagaagcatatcactcccacaaacacaggtcagtaattaagggatatcggttaacgagtcccgggtcagtaagcgtagcgctcaaaatacacacacttcgtgtcgggcaaatgtattattgacatatgtaatttgctgttgaatagtgcaattaagaggtataacagttgcttgcctcgttaatcattatcgatcaattaatcaaattattgaaagtgagtcgattttatctcctgacaatgtattaatcgtattttgcaatgaatttatatcaattaaattatattactttattaacccattgcaccagctgtacctatctctcgtattcatttttaatttttgtggaaatgcttcaattaattgagaaaagtttatcataaattgggtaatatagcaagtcttaaaataactcaagctgtaaaagctgaacagttttatcaaagtaatagttaggctgacaatcaaaaggtatatccttcttaatttaattgattttaaaatgactaggataaagaataaaactgaattttttccattcactacccataacttgcagaaaactcgctaaagacgaagaaattgtgcgaaatggccactcagacaatttccagtataatcacgtcgctggacatcaatgcgtacaatcaaataccatatgccgatcaatatgtgccaaacaatgccacaacggccacgaccacgcccacagataagggcagtggcaacggcaacagcaacagcaatagcaatacgaatggtagtagcaatagcaacagcaacagcaatggcgatggcgatgtggcaacagagcaagtcgtggccaacaataataaaatcaatcagcgacaacatggccagccggccgtggcatttgccatcacatcgactaacaatcacataagcggcccagcagcaaccataacaacaacagcggcaactggcgaaacaacaactgaggcgctggtggctacaataacaactccattggcaacggtggatggcagcgaaaccatgtccgtggctcccaacaatgggcatggaaacaacgggagccaacgtccgccggtcctgcaaacaaacttatagctaaacgcgcaacaattgcagcaacagctgctgaaggagcagcagcgacaacaagccgagctgcaaacgcaacatccgcagcagcaacatggaacacaaagctcttccagcgacaccgccagcacgggcagcggcagtgcggcgaagaagcgggccgcaattcccgtttagctgcccccggagattcgagattctcgcaaccatacgtaagtagaggaaagtgtctgttgacccaagcgattcccggcatcagtctagggatgcggaaaagcagacaagaggagggcaggaggtcgtgctaggacgggactaaattgggagcagctgggccacagaaatatcttcagatcttagaaggcgaaataattcatttaccacttttgttcgcttattaatttgagtgaattctggttataccttacccccatagacacaaattatcttaacgttcttttatataagtttatcgatagctgtacaacaatgtatctcaataatgaagatattcctgtggcacttaaggctttcttcagattttaacatgcacgcaagagtcataagtaagtaagagtcggctgatcaaaaaccttcgcaactcttcccaaaaacaaatgtgtttctccattt

SEQ ID NO: 2144 - DNA, 2456 bp, DROSOPHILA
ggtccatcagcaacatagatgacgcggagtatcactgcaataagacgcaggtgcgcaaggtcatctcgggggtggtgggtgccgcctcctcggtcacatccatacaagttgccaatttattgcggttattccgaattccccaggtgtcgtacttctccaccagccccgagctgagcaacaaacagcgattcgagtacttctcccgcactattccctcggatcactaccaggtgaaggccatggtggagatagtgaagcggatgggatggagctacgtgtcgattatctacgaggagagcaattacggaatcaaggctttcgaggaactggaggagctcctcgcacgccataacatttgtattgccatcaaggagaagctggtgaaggattcgggagtggccgaggacatcgcctacgacaatatagtgcagaagctgctgacgaagccgcgggctcgaggggccattatcttcggttcggatcaagaggtgcgccaagtgatgcgggcggtgcgccgggcgaatgcaactggttccttctcctggatcggatccgatggctggagtgcccggaatttggtgtccgacgactacgagccggaggtggaaggcacgctgtctgtgcagccgcaggcgaatccggtgcgcgggttcgaggagtacttcctcagtctgacggtggagaacaatcaacgcaatccctggtttgtggaattctgggaggatcactttcagtgccgatatcccggcagtacgagcactccgtacaataactacaccaaacagtgcaccacaaaggagcgactttcacgccagaacactgacttcgaggaccagttgcagtttgtcagcgatgcggtgatggcatttgcatacgccctaagggatatgcaccgcgacctgtgcggcggaggtccttcgctctgcgaggccatgaagccaacgaagggtgcagacttgctgaaatatttgcgaaaagtggagtttgagggcctcagcggcgacgagttccgcttcgacgggaacggcgacggtcccgcccggtacaacatcatccacttcaagcagtcccaggcgggacagtaccactgggtcaaggtgggcgagtacaccgagggcgagctgcggcttaatatgacggaggtgaagtttaagcggctgagtcccaagccgccggagtctgtctgcagcctgccatgtcttgtgggtcaggccaagaagtacgtggaaggcgagagctgctgttggcactgcttcaattgcacaacctatcaaatccgccacccggatgacgagacccattgcaagctgtgcaagctgggcactcttcccgacgcccacaagcagtactgccgccccatcccggagatatatttgcgtccggagtccgcttgggccatcggtgctatggcgttcagtgcgaccgggatcttagtaacgctcttcgtaatgggcgtatttgtcaggcacaacgacacgcccatagtgcgtgcctctggtcgggagctgagctacatcctgctggcggggattttcatgtgctacggtgtcacctttgccctggtcctgaagccgaccaacatagtgtgtgccattcagcggtttggtgtcggcttctgcttcacggtcgtttatgcagcactgttgaccaaaacgaatcgcattgcacggatcttcaaagcgggcaaacaatccgccaagaggccctccttcattagtcccaagtcccagctggtaatctgtgcgtgcctggttagtgtgcagatactcatcaacggcgtttggatggtaattgcgccatcacatgccatgcaccattatcccacacgcgaggataatctgctcgtctgcgactcgtacatcgacgcctcctacatgattgcgttctcctacccaatcttcctgattgttatttgcacggtctacgcggtgctcacgcgaaagattccggaggctttcaacgaatcgaagcatattggattcaccatgtacacgacttgtgtgatttggctggcttttgtaccgctctacttcggaaccgccaaccacgttccgctgcgcatcaccagcatgtcggtgaccatcagcttatccgccagcgtgaccatcgcctgtctcttttcgcccaagctgtacataatactcatacgccccgagcgcaacgtgcgccagagtatgatgccgcctcgctacggcaacatgcaccgcaccgctggcacaggaccctcgtccatgatggccgccgccgtggtgaccgccgccacctgtgcccaggaggagaagatccagaagcatatcactcccacaaacacagacgaagaaattgtgcgaaatggccactcagacaatttccagtataatcacgtcgctggacatcaatgcgtacaatcaaataccatatgccgatcaatatgtgccaaacaatgccacaacggccacgaccacgcccacagataa

SEQ ID NO: 2145 - protein, 738 aa, DROSOPHILA
MVEIVKRMGWSYVSIIYEESNYGIKAFEELEELLARHNICIAIKEKLVKDSGVAEDIAYDNIVQKLLTKPRARGAIIFGSDQEVRQVMRAVRRANATGSFSWIGSDGWSARNLVSDDYEPEVEGTLSVQPQANPVRGFEEYFLSLTVENNQRNPWFVEFWEDHFQCRYPGSTSTPYNNYTKQCTTKERLSRQNTDFEDQLQFVSDAVMAFAYALRDMHRDLCGGGPSLCEAMKPTKGADLLKYLRKVEFEGLSGDEFRFDGNGDGPARYNIIHFKQSQAGQYHWVKVGEYTEGELRLNMTEVKFKRLSPKPPESVCSLPCLVGQAKKYVEGESCCWHCFNCTTYQIRHPDDETHCKLCKLGTLPDAHKQYCRPIPEIYLRPESAWAIGAMAFSATGILVTLFVMGVFVRHNDTPIVRASGRELSYILLAGIFMCYGVTFALVLKPTNIVCAIQRFGVGFCFTVVYAALLTKTNRIARIFKAGKQSAKRPSFISPKSQLVICACLVSVQILINGVWMVIAPSHAMHHYPTREDNLLVCDSYIDASYMIAFSYPIFLIVICTVYAVLTRKIPEAFNESKHIGFTMYTTCVIWLAFVPLYFGTANHVPLRITSMSVTISLSASVTIACLFSPKLYIILIRPERNVRQSMMPPRYGNMHRTAGTGPSSMMAAAVVTAATCAQEEKIQKHITPTNTDEEIVRNGHSDNFQYNHVAGHQCVQSNTICRSICAKQCHNGHDHAHR

SEQ ID NO: 2146 - DNA, 3898 bp, DROSOPHILA
gagaagatgacaatgcagcgattagagcaatgcagaacttgaactctacgacggcggcagctggaaaaatgtttgccccgatccccgggacaccgactcagtcactcagtccgtcccaatgcgcggcatttccgttcggaaaaaaaagaggatgctgtcgagaaggaaggccctcgatcgattcgatgctgatgcattctgcaggggtggggggaacgtagtgatcatgtttgtagcatctaaataaagtacctgtaatggttttcattaagtaatgcgtcgtctttggcttcttggtttatgaacacggcaaatatttaatgtgagataaaaaatgttcaatattcagatcattgacctaaacaacagaagaacttaaggatgtcaacaatatataaacttcacaaatactgctttctttgacgttgtaatataaataaaacgtttttatattaaattaaaaatcttccttaaattcatcttccatcttaacatagttcgctgctgttaacatcgattaggctgctattcgcagagattatgttttccctttacaacactgtatttaaatttaaattatgaaatatcaggcaatactaaacagtatgctaaatataaatataaaacgagatcacagatatcttcataggggaacactttaaattcaaaaaaatacgggtcgttttagaataaacgcaccttatttgaaattggatctttcttactaacgatcagttagtggtggaacgccttgcgcttaacagcacgctgttattgaaaccccacttattggactttatttacaaattgaaatgtgataaataaatataccaaaaacgataatgatttatgtttttaggtataatttaacatcgaggtcgaatagaaatcatcgatgaccaaaatggcctaggaaatatcgatatatcgccgtaaccatgatgactcctgcagccctgtttccgtcccttctcttcttcgtttccggtgagtgcgtgtgctccgcgttttttcgctgaatttgccactatatcgtatttaatactgtatttgcaggcagacgatttaaacggcgaatccaccatggtgaaaggagtacgtacgcacaagggcagtgaggattttccaatccgtggcttcgagccatgtgaatttgcgaatttccagatgccggttagctgccacgatatcacaactaatccacccatatttgcagactctgtacacttaccccgagaacttccgggcctacaaggcgctcatcgcagcccagtactccggagcccaggtgaaagtggccgacaacttcaagttcggcgagaccaacaagtcggctgagttcctcaagaagttccccggtggcaaggtgagtccgctttttttgtgggtgtggctagtgccaggtcatcaacacgatatgtgcccgtaggtgcccgcctttgagaccgccgaaggacagtacttgagcgagtccaatgccatcgcctacctgctggccaacgagcagctgcgcggcggaaagtgccccttcgtgcaggcccaggtccagcagtggatctccttcgccgacaacgagattgtgcctgcctcctgtgcctgggtcttccccctgctgggcattctgccgcagcagaagaacagcactgccaagcaagaggccgaggctgtgctgcagcagctcaaccagaagctgcaggacgccaccttcctggccggcgagaggatcacattggccgacattgtggtcttcagcagtctgctccacctgtacgagtacgtcctggagcccagtgtgcgcagtgccttcggcaacgtgaaccgctggttcgtcaccatcctcaaccagaagcaggtccaggccgtcgtcaaggactacaagctgtgcgagaaggccctggtcttcgaccccaagaagtacgccgagttccaggccaagaccggagccgccaagccccagcagcaggctcagcagcagaagcaggagaagaagcccaaggaaaagaaggaggcgcccaagaaggctgccgagcccgccgaggagttggacgccgccgatgaggccctggccgccgagcccaagtccaaggaccccttcgatgcgctgcccaagggcaccttcaacttcgatgacttcaagcgcgtgtactccaacgaggacgaggccaagtccattccctacttcttcgataagttcgatgccgagaactactcgatctggtttggcgagtacaaatacaacgaggagctgtccaaggtgttcatgtcgtgcaatctcatcaccggcatgttccagcgtctggacaagatgcgcaaggcggccttcgcctccgtttgcctgttcggcgaggacggcaacagcaccatctccggtatctgggtgtggcgcggacaggatctggccttcacgctctcccccgactggcagatcgactacgaggtctacgactggaagaagctcgacgccaagagcgaggagaccaagaagctggtcacccagtacttctcctggtccggcaccgacaaggacggtcgcaagttcaaccagggcaagatcttcaagtaatcatctctgcctagcccagctccgctcaaagcagcagccgccctcatttagaccaacaacaacaacagcagcagtaacaataaagtttgagatttaaaatgcaggaagagcacaatgcccatttcttaagttccaactgataagtacactaaagatatccaatatctgtcgtgctgcctcccacgtttggcggaatcgtgtgtctcgcctcctgcattttgtactggagaatttgtttgtaaccgcctaagcataacacagcatgatattgtcaacggaacagccgcctgcagtcagaaaatatttataaaaaataaaaggttttctattaataacagcacggttttctctcacacgtgtgtgtatgtgtgtgtgtggtttatttggttgttggtaaaggttaggtctggcatttattagtaattagaattaagcatatcgatttgaatttatgtttgggcaattttattggctccttttaacttaatccatcaatatcatcaattattgcttacaattacaagggttcaaacagcttcggccactactattggttttaaaagcaaactggagctcagcgagaggaaatgctagaacgtttgtgtatcgatgcaccgccgcaatctacttcttgatgacaattggtccgacgttgtctccagtctgcttgttgtgctcgccatgactgccatcgcagtagggccactgcgaatagaggattcaattgaaaattttgttcacaatatttcagaggttagaatgcactcacgttcttggtcttccagcagcgacagaaggccgccttctccgcaatatcctccacgtcgatcatgtccaccaccttgggctcgttcttgcggatgtggttgttgcagcgtccgctgtttttggccgcgcagctggcccgtgccgccggacagtaggccaggtaggcggtgtagccgagtccggccaccaccacggtgggtgggatcagggccaaccaatccttgactgcaaacgaaaccaggttaatacggaatgcagtgcattttaagctttataactagatattttggtcgatcagccgtaaccggcacaaggtcgttccctacacacatattgggttataaacgcaccaagatatgcgcatatatgtttataggtatacccatgttggtatgcctgtattatgcgtctatctagttgcctatctgcgagacaaacttgctccaattataaatttcttggcgagctcagcagttgttgcataatcgctgcaacttttttgcctggaagtgcacacactgcacttccaattcccgttagcagctccgcaatatcacgccacatttg

SEQ ID NO: 2147 - DNA, 1711 bp, DROSOPHILA
ctccgcgttttttcgctgaatttgccactatatcgtatttaatactgtatttgcaggcagacgatttaaacggcgaatccaccatggtgaaaggactgtacacttaccccgagaacttccgggcctacaaggcgctcatcgcagcccagtactccggagcccaggtgaaagtggccgacaacttcaagttcggcgagaccaacaagtcggctgagttcctcaagaagttccccggtggcaaggtgcccgcctttgagaccgccgaaggacagtacttgagcgagtccaatgccatcgcctacctgctggccaacgagcagctgcgcggcggaaagtgccccttcgtgcaggcccaggtccagcagtggatctccttcgccgacaacgagattgtgcctgcctcctgtgcctgggtcttccccctgctgggcattctgccgcagcagaagaacagcactgccaagcaagaggccgaggctgtgctgcagcagctcaaccagaagctgcaggacgccaccttcctggccggcgagaggatcacattggccgacattgtggtcttcagcagtctgctccacctgtacgagtacgtcctggagcccagtgtgcgcagtgccttcggcaacgtgaaccgctggttcgtcaccatcctcaaccagaagcaggtccaggccgtcgtcaaggactacaagctgtgcgagaaggccctggtcttcgaccccaagaagtacgccgagttccaggccaagaccggagccgccaagccccagcagcaggctcagcagcagaagcaggagaagaagcccaaggaaaagaaggaggcgcccaagaaggctgccgagcccgccgaggagttggacgccgccgatgaggccctggccgccgagcccaagtccaaggaccccttcgatgcgctgcccaagggcaccttcaacttcgatgacttcaagcgcgtgtactccaacgaggacgaggccaagtccattccctacttcttcgataagttcgatgccgagaactactcgatctggtttggcgagtacaaatacaacgaggagctgtccaaggtgttcatgtcgtgcaatctcatcaccggcatgttccagcgtctggacaagatgcgcaaggcggccttcgcctccgtttgcctgttcggcgaggacggcaacagcaccatctccggtatctgggtgtggcgcggacaggatctggccttcacgctctcccccgactggcagatcgactacgaggtctacgactggaagaagctcgacgccaagagcgaggagaccaagaagctggtcacccagtacttctcctggtccggcaccgacaaggacggtcgcaagttcaaccagggcaagatcttcaagtaatcatctctgcctagcccagctccgctcaaagcagcagccgccctcatttagaccaacaacaacaacagcagcagtaacaataaagtttgagatttaaaatgcaggaagagcacaatgcccatttcttaagttccaactgataagtacactaaagatatccaatatctgtcgtgctgcctcccacgtttggcggaatcgtgtgtctcgcctcctgcattttgtactggagaatttgtttgtaaccgcctaagcataacacagcatgatattgtcaacggaacagccgcctgcagtcagaaaatatttataaaaaataaaaggttttctattaataa

SEQ ID NO: 2148 - protein, 430 aa, DROSOPHILA
MVKGLYTYPENFRAYKALIAAQYSGAQVKVADNFKFGETNKSAEFLKKFPGGKVPAFETAEGQYLSESNAIAYLLANEQLRGGKCPFVQAQVQQWISFADNEIVPASCAWVFPLLGILPQQKNSTAKQEAEAVLQQLNQKLQDATFLAGERITLADIVVFSSLLHLYEYVLEPSVRSAFGNVNRWFVTILNQKQVQAVVKDYKLCEKALVFDPKKYAEFQAKTGAAKPQQQAQQQKQEKKPKEKKEAPKKAAEPAEELDAADEALAAEPKSKDPFDALPKGTFNFDDFKRVYSNEDEAKSIPYFFDKFDAENYSIWFGEYKYNEELSKVFMSCNLITGMFQRLDKMRKAAFASVCLFGEDGNSTISGIWVWRGQDLAFTLSPDWQIDYEVYDWKKLDAKSEETKKLVTQYFSWSGTDKDGRKFNQGKIFK

SEQ ID NO: 2149 - DNA, 2447 bp, DROSOPHILA
tatgtgtgtaatgtgcagctagctgctctggcaactctagcgcctattttcgtcactttttcgcgcgccagtcgttgcacacacatatgcacacgcaggcacacacatagagctacatgcacacaaacacacaaacacgtaggaatatggagcgatgagaatatcgtttgattgaaattcagcaacttaccttcgaaaatcgcttaacattttctcgggcgttaagcttgccttcaatttaatcgcacttttcgctggcactttcacaagcccgcgctctctcttttgcttattgttctctcgctgcaactctgctgctgctgctgctgcggatggtcactcttaattggcaactgttttttatattttcttcctttttgggctttgggcaagagattgcctattgctatttagaatgttttcaaaacgccagaatgcacaacacaataacaacaaccgaactgaacaactgagctgctgcacagaaagcagaacagcaaaagtggtggcaatagtggcggaacaagaaaaaaaattataaatgcgagcgaacgagaaagagagagaggagcagcgcaaccaggtggcaactcgctctggcgatgattttctacccaactgtaccacacacacacatgcacagcgaccctgtgtgtttttgcttttctcgagggcttttttcggcgttttgctggcgaaattccacgcgatcggcgacacaaatcgtttggctcgactgtaactgcaacagctgaatgtgcgcaccaatttgtatttgctttctgacacgattaacacgattatgattggcgcgctcgaaatggttcgctgtcgatggaaaaatggaactggaaagagaggggaggattgctgtaatacggtgttgtatagcgtccgtcggtcggtcggccagtgctgcagaatgtctgccagcccaactgccccatcggccacagacaccgattaacactgatttttctaattctcaactgtcctctttaaatggcatttattttatttaacatcaacaattgggctacatctacttgagggccgagggctgtgggcagcggtacttggccatttccacctccgcctcggcgtagctaaagcgattgaagctgtagtattcaggcaccttgtagccaccggtggcggaggcacctggtccaacgggtccgctgctgggcttcacgcaattgctggtcagtcccacaaccgatggcgaggatgcgccgcccgatggcgaggatccggctccagctggagatcctgaggcgctgggtctaccgccgccggaaacgggtccgcccttgatctggctgtagcagcggctgagggctgggcgcagggcacgtgagggcgagaacatgttggacttaatggctggctagcttgcagcgtttaattcgcaaaaataattcacgtaatcacgtatcaacaaagtggacgtgttgggtaacgcggaaagtgcgcttattggcgaggaatatggcaaggcaacgtacgagcgcgaagctgccacctggccgcaaaaatatgcataaaataaaagtggtcatattttaaattggtttaaatgtttaaattattatttacacagttaaagatgctggcagtgctggtatagttatatattatataatttaagcctgacgttagggctagaatagataaattgatttttaaacagtgccatcctttgactaagctagttttagtatttaactaagagctatataaacaactattttctcgtcttaaacttgggctgcgccttgccgtagtgctgatcgatgtgtgaaacgggcgcgcgcctcttgtcgttgcgctccttttgcgattttgttcggcatttgacgctggcggcgcccgtttgatttttgcccaactgatggaacttcttgcgctcctcgcgaatattcttcagccgctggcgttcgtccttcagctccttgtagtttttggaggccttcttcagcggcttggcgcccagcttgatcagctgaaacatttccattttgctcttgtttttgatcacacgctggtttttgatcgcaaaattgagcacctcgtggcgcgccttcttgatatcgaattcgggattcagttccatgccgccctccttggttttgtgcgatttttggacgccgtcgtcctgcttttttgttccacttttcgattggaagtgcgattcgtggaagacgtgtgcctgaaattcggtgttctcctgcttcttttgcagcgccaacgctgcacgcgtgggcaccggcttaaaatcggcgctgacgttcattatgctttcagttttctgtgtttatttgcagcaataatagtgaaatcaaaatattgaatgcacatgtacagtgccaaaatgtactaattcccacgtaacgcctcggtccatctggcagcgccgtttttcatgaatgttgcttgtaaggtgg

SEQ ID NO: 2150 - DNA, 447 bp, DROSOPHILA
actttgttgatacgtgattacgtgaattatttttgcgaattaaacgctgcaagctagccagccattaagtccaacatgttctcgccctcacgtgccctgcgcccagccctcagccgctgctacagccagatcaagggcggacccgtttccggcggcggtagacccagcgcctcaggatctccagctggagccggatcctcgccatcgggcggcgcatcctcgccatcggttgtgggactgaccagcaattgcgtgaagcccagcagcggacccgttggaccaggtgcctccgccaccggtggctacaaggtgcctgaatactacagcttcaatcgctttagctacgccgaggcggaggtggaaatggccaagtaccgctgcccacagccctcggccctcaagtagatgtagcccaattgttgatgttaaataaaataaatgccattt

SEQ ID NO: 2151 - protein, 109 aa, DROSOPHILA
MFSPSRALRPALSRCYSQIKGGPVSGGGRPSASGSPAGAGSSPSGGASSPSVVGLTSNCVKPSSGPVGPGASATGGYKVPEYYSFNRFSYAEAEVEMAKYRCPQPSALK

SEQ ID NO: 2152 - DNA, 8193 bp, DROSOPHILA
taatatctttcttgatatatatattgtaccactatatatattttctctgcgtgcagcttttgtttggagccaggaggagcatcgcaacatgggcgcctggacgtttgtgcggccacgttttgaaaatttaattggccaacaggtaaaaagtcggcctgccaccggcggcctcagaaaaagctctagacacttttcactaccaaccgattttccccgctttccacagctccactactgcggtcgctgcgaggcacccacccccgccaccggaatcggaaaagtgcataaacgggaagtcgatgagattgttgctgccccattcgaactttagggcgaacccgcctcctcagccggtgcatatatcacaaagtactttagctcaattaaactgccaaaaatgtttgtgtaaaagcagaaaacaagacttttgaaacggttgatcgtgggaataccctcaaatttcatcacttacaaaatgtttggatgagtttttagtggatttaaaatatctctttttatttattttgttattactcggtgtacgaagtgaaagaaatatttttaaatttacgagcactgataacagtcaagatttaagtattgcatgcaaacattttcaacaaagttctttacaaacgcccttaaagtaccataaaaaagaaactaaaacgaaccgaagtgggaaaatgcttcccgctccgcacaaaatttatcgtacggaaaagccgtccgaagaggggaaactttaagcgaaaagtttttaattgtttgtttctgggaccaacctggtccggcaattgtgaacgaaaattgtagcaagtgattccactcgcagaccaataaaaatcataatgccccgaaaatgtaacctaccgtaaatatttattatatgtttatgaaacattttacagactttcattttgaattgtttaagcagcgcagtgacctaacttatagaagaagtacagaaagtattcgtgggtcaggtcaggcggtttactagatagctggattagctggattagttaaggcctacgagaatatacatacatggagatagacagtgaggcgaggcgaagaatggagtgcttcggtggtgaattgtgaggagtactacatataaggcgttaccaaggaccagcggatcggtgagagaaggttgtcggaagagaatcaactaactgcaaaaggtatcaaagtggccaaagtctcatcatcacgcttaaactctagacggcaggactcatatgacctgtctgccgtagacttgctcaagaatggtataaaagtcggtggacgtcttatatgtaaagtgcagaagtcacatccagaagaccatggccacgcacaccatcaccaccacaaaggcggcctcccggcaatttgcattgtcccacccgcactccagatcgaatttgagggcctatcgagggatagcgattagcgattagcgacatatgccttggcaatattccatcggatacccacctccatcagctgttgccctcctttgttctcacagcgcgtctccctcaggtcatcgtcgtgttcgtcgcagttgtgacgtccgtacacttggcaaggtgagttcatgaaggtgcggaagacggtatcggtccaggtttgggaggagcagatgtactggcgcctcttgcgctgccaaaactccacccacctatacaaacaaattataatttgcaattcaatatcgtacaataagaaaaccaggcgttaccctaggtcgcaatcgcagttgagatcggtgtgagacatcttcaagtccgtgaggaacacactattcggcagatagggaacagctccagtgtttggattgggaatcttcttcaggttcctgttgtggtagcgaatgtccagcgaaatgttccgaactcggcccatgtacttaaaaaagttcggaggcaaggcttgcagcgaggtattgaataattgcatgtagaggtatggagaacgcatgccctggatcaaattaaatatataatttttagcttatatagacatcgagttggaagaattactcactcttagaatgcgttcattcaggttggtgaactggggaccactgaaggtgatgttggtcagcttggagggcagatggccctccatttcgcgctgcaagtcggtgggattgcccagctgaagggtctgcatctcctgggtgggtccagatcccttcttaacaatgcgagtgaagggctgtggggcctcgatccacaactggcggatattgtaatggtggcgcaacagatgtggaatattaaagtgctccaggtgggaataggcagtgagcttaagcgatcgcaagtgaggcaacgagtccaaacagccatactcgaagtagtgcagccggaaattcgatatatccagcatctcaagatcctcgttcacgccatcaaaactgttgttgttcagcgaggttatgggattgccagaaagcatcagacgtctgttgtaaattgcaaatactgattagatagaccatttaccaagttggattaacgcacctcaagtggggcagagcttgggtcatcagtggcacattggtcaagtcgttgttggagagatcaagcatgcgcagattactcatattgtgggctagttcctgcggaatcgagggcagctcattgtaacccaggcggaactcccgcagatacttcagtcgaatctcgggcaccgtgctcagagaaatgttctccaggcccagtttgatcagcgagttctccaagcccataaacgacttatccatcaccttcagatcccgattgtgggagaggtccagaacggccagttttggcatggtggcgaacactgcatcatcaattcgcagcagatagttgtatgagatgtccaggtagcgcagggactatagtcacaattaagattgtgtcttataattttaaacggttttaccaattcacttactctaaacttgttggacaaatccatgctgtgaatggtagagataaagttgttggacaggtgcagttcacaaagcgtcagcgcagccaaactggacagcgatgaggaggggatcttcaacatcatgttgtgcgacacatccaatctttaagagtcacgaatacattatgtccatacattgactatatagttatttactcacttttccatgcctccgttgtagaagagattgtcgggcaggcccctcaggtgattatgcgagaagtcaacgatgcgcaggccttggacaggtttgaatatatcctggggaatgtcactgaggtaattgtggccaaagaagaccagctggagctgtttggtgttcttgaaggcatcaaagtccagttcgtggatccagttgtagctgaggtccagccattgcaagtggggcatgttgccgaagacatcacgagtcgtgttctaaagggtcaaagggtataaaaggctggtaacaaagtcatacaatttgttttaccatcagcgaattgtagcccagatgtaggtgtgtcagcgaaatttcagcaggccggaagtatccaggatggataatagatatattgttgtgggaaagatccaatatcttaatattcgagtggtacatgccacctgtatagtgaagctattaacaaactggagatttgctagtaaagaagaccctaccatgttcatttcgtccactccacgaggaattgtacatcaactgcctgatttgattgtggctcacgttcacattaagattcgaaagggtacccacttggtcgaagtagtcaaagttgaagttgggtagctgattgaaggccatgtccaggatctccagtttcggtaggttctggaaggactcgtcggccaggttgtttatcttgttgcccctcaagcttagatactccagctcatccaggttcataaaggctcttcgctcgatcttgtcaatcttattgtcatccagatgcagtttcctcaaggcttccagatcgaagaaggtatgctgggatatggaggtcaggtggttgaagcgaagcgagatctcctccagctttgagtgaatgtcgccctggaaggtgccctttaaaacctgctcgatcctgttgtcatgaagctctaggagccgcaagttcttcaggaaatggaaactggtgtcgctcatgctgctgatgtgattgttgctaaagtccagctcttggagggaggtcagatgccttaggggttcagctggcagggcactgccagaatagccgtgcgacatcttcagagagatgagcgagtgaccaatctaaaaaatagatttttttattaagtgagcccaattatattaagaaaatcctgaataacctcatggaaggcatcgttctctatgcttgatattccgttctcgctaaagtccagccttttcagacccctaacgtgcttgaaggcgtgcgattgaatcccggagagactggccctggtgatctgcagatcctccagctccacgccgaagtccttgaagtcctcgggtcccacggaggaggatcccaggcgcgagatcgacagtgatctcatgttccgcattctggtcatactttttgtaaataaatacaagagtggttctggggtgaagggtgtgtggggagcaggatgtttctcggtgcactgggttcacttacttgcgcagggtctgcagattggtggggtcgttgcggtctccactcaggtccaatttcaggagggtgtagtgcaccgcattgaaggtctccgtgggcttctggatcttgatcttattgtcccgcatgctgatgaccctattattaagaaataaatgtatagaattataatttaccattataaaattcaataatagctatgcaaatcaagctttttctcagtgccgcgtatttttgcaagattgcctgattgcgcggcttttccctcttcctcgaattcttttaaatagggtcacccacttgtcgcacacacgaacttaggaacttgagaagccttagaggctgccggcaatccgattagttccccccaatatgcacatgtgcaaatggaatgggggcagaacgtgagtgaatcggagtgcaggtgctcgactcacctcaagacatcgaaattgttgaagagcttatgatgcagcttggtgagattgttgccagacaaatccaggatctggaggctgttcaccaggctgtcaaaggccacaggcgaaatgttggtcaggccgcagtagcgcatgtagatctccctgattcgagcgggcttaaatgcatcttcctgaaagcgaaccgtaagttccaaatatgttatttataaatcaaatttctgggagggattttcgtccagttaagtttcacaagggttagttaacctaccctcagagtgtgaatgggattgccatcgaagaaggtgcggttgacggtatcgaagtacttgaatgaattgggaggcaggacctcgatgtgattgtactccaggtgtagattgtccagattcagcttggtgctggccttgatctcgtaggtttcgttgccactgagcgaccagatcacattgtgggagatatctagggtgcgaaggctctttagcggacccagggcgtcgtacggaatctccgagaggatattgtccgtgagcaacagacgggtcagcctcggcattccatcgacgaacacattcggatcgatctcgaacaggttgttcccactcaggtcgagggtctcaagaatgaggagcccggagaagctgtgcgacatcagctgcgatatgcagttctcgcgcaggatcagcgtctgcagcgagtcctccaggccgcggaacgagtcgtgctgaatgtgcgttatgtggttgtagcccaggtccagatgacgcagcttctgcaggtgcctcagggacttggacgggatctccaccaggtcgttctgcggcagaatcagctcccacagcgatcgctccaggccggtgaaggcatcatctgggatctcggtgagatggttcccagagatctttaggcggtacatgcccgtggactgcaggaagtagggctcaatctcccgcagacctgtgttctccatgtgcagcatgaaaacctaaaccagaatacattccagttatcggagttaataaattaatgtggtggtggttatgggtaattaaatgggtatgaccagaactaaaagtgttgatttatggagatagctaatcttacgactcacctttgactggttcaccatgcgcggcagtgccggaaacggaacattcttgcagtgcactatccccagatccgtggaggacttggagcaggtgcacatcacgttgtaggtgcagggcgggtaatgcgtctcctccatctcgcgatcgaacatggaggcgcgagccagcgacatccagatcatgatcatgagcgttatagtcaggaaggcatagccgaacttaaagaaaaattcgaggccctagggatagaatggataatgtactgggtactgggatgactaattataggaagactagcacttagtcacaagagaaagttttccaaccagctttatagtatccatagatatctatagaacgatataggtttatcatcttaaaatagtatccattaaataatatcctttaattgaattctagcccgcattgcaaaggatcagttttttctcagctaaatagattatgaaaacgtcagcaggacgtttaactttttacttttaatatggcttctcaagcctgttagcagtttcactacgacttcgcaaaaggattagctgttgtgtctggaaaagtttccgaggataagttcaggggtgactagaccaaaggggtgtcttcatttcacaggatttgaatccgtccatggttttttttaagtcgcaagacttaggcacttcaagggctactcgcatagattatcaaatgtcctcttttgtagttcaatagcaatttagatttagtttagcaggatatcaggccattttgttggccaatacacaccattttgctgtaaattaaattagacactcgcgacacttggcgatttaaacaaacttaattaagatttcacgggcactgttcactcttcactctttagtcaactgtccaaaaaatttgatttgatttccagctcccagtggctatattccctggccaggacactcgcgtggaaatccttgcttgaaattccgttcgcttttcaggggaaaaacagggctggaaaaaacacgaccgaaccgctgcgcgttccacgcacgtctgacaaactgcaaatcaatcagcgacgggccaagtactctagttggccaactggcgcatccggctaattggattgtaacatatcgggaatgctcgatggcgccgtcaccattgggcacacactcttttcgcctcatttgcagcattacttcactggaggaatggccaaatgctggtcatgctgacctttgtatagaatatggccggcaaaaacactgtgataaaagtgcgagcagggcggaagcggatttcggccaggttttcaagattcccaatgcagctgcaatagcctctgggtcggcttaaaacttgtacgagttcgtttaacatgatttcggtgtgcactgctgacttttttggaggtttgcgaaaacgcgtcgaagagcgtgttcaacaagctcaaacaattaaaattccgaacaaaaaggttcgatagaaaaaaagtttgaaaagttataaccaaaaggcatttaatttaataatacaacaagcagtgtttgaaaaaattcaacattttaaatgtgtctcaaaacattatgcagctaagggacattcttgctagatatccattaaataaattattacaatgtgaaaaaggccattttaaaccattcttagccatgcttaaatttaaagaatgtacaattttgtattactaagcaagccttacttaagtgagcgaatcttgtgatatatccaggaatgatatgtgcgctccttgaccatctccttgtctgcgaagtcaaatatattaccatagctatagaaaataaacaagtcaaaaagcaaacttaccatcacactggaaacactgagccaagttcggcggacaaatgttttccgaattgaaatagaaggtggtctttagttcgcggaacttgttgtgcgaacgcatggtaatgtgccgggagtagggatccttgccatccaagtgatccctcacatagtgggcagacaggcgaatgtccataacatcacttagctgatcat

SEQ ID NO: 2153 - DNA, 4514 bp, DROSOPHILA
aacgcgcagcggttcggtcgtgttttttccagccctgtttttcccctgaaaagcgaacggaatttcaagcaaggatttccacgcgagtgtcctggccagggaatatagccactgggagctggaaatcaaatcaaattttttggacagttgactaaagagtgaagagtgaacagtgcccgtgaaatcttaattaagtttgtttaaatcgccaagtgtcgcgagtgtctaatttaatttacagcaaaatgggcctcgaatttttctttaagttcggctatgccttcctgactataacgctcatgatcatgatctggatgtcgctggctcgcgcctccatgttcgatcgcgagatggaggagacgcattacccgccctgcacctacaacgtgatgtgcacctgctccaagtcctccacggatctggggatagtgcactgcaagaatgttccgtttccggcactgccgcgcatggtgaaccagtcaaaggttttcatgctgcacatggagaacacaggtctgcgggagattgagccctacttcctgcagtccacgggcatgtaccgcctaaagatctctgggaaccatctcaccgagatcccagatgatgccttcaccggcctggagcgatcgctgtgggagctgattctgccgcagaacgacctggtggagatcccgtccaagtccctgaggcacctgcagaagctgcgtcatctggacctgggctacaaccacataacgcacattcagcacgactcgttccgcggcctggaggactcgctgcagacgctgatcctgcgcgagaactgcatatcgcagctgatgtcgcacagcttctccgggctcctcattcttgagaccctcgacctgagtgggaacaacctgttcgagatcgatccgaatgtgttcgtcgatggaatgccgaggctgacccgtctgttgctcacggacaatatcctctcggagattccgtacgacgccctgggtccgctaaagagccttcgcaccctagatatctcccacaatgtgatctggtcgctcagtggcaacgaaacctacgagatcaaggccagcaccaagctgaatctggacaatctacacctggagtacaatcacatcgaggtcctgcctcccaattcattcaagtacttcgataccgtcaaccgcaccttcttcgatggcaatcccattcacactctgagggaagatgcatttaagcccgctcgaatcagggagatctacatgcgctactgcggcctgaccaacatttcgcctgtggcctttgacagcctggtgaacagcctccagatcctggatttgtctggcaacaatctcaccaagctgcatcataagctcttcaacaatttcgatgtcttgagggtcatcagcatgcgggacaataagatcaagatccagaagcccacggagaccttcaatgcggtgcactacaccctcctgaaattggacctgagtggagaccgcaacgaccccaccaatctgcagaccctgcgcaatatgaccagaatgcggaacatgagatcactgtcgatctcgcgcctgggatcctcctccgtgggacccgaggacttcaaggacttcggcgtggagctggaggatctgcagatcaccagggccagtctctccgggattcaatcgcacgccttcaagcacgttaggggtctgaaaaggctggactttagcgagaacggaatatcaagcatagagaacgatgccttccatgagattggtcactcgctcatctctctgaagatgtcgcacggctattctggcagtgccctgccagctgaacccctaaggcatctgacctccctccaagagctggactttagcaacaatcacatcagcagcatgagcgacaccagtttccatttcctgaagaacttgcggctcctagagcttcatgacaacaggatcgagcaggttttaaagggcaccttccagggcgacattcactcaaagctggaggagatctcgcttcgcttcaaccacctgacctccatatcccagcataccttcttcgatctggaagccttgaggaaactgcatctggatgacaataagattgacaagatcgagcgaagagcctttatgaacctggatgagctggagtatctaagcttgaggggcaacaagataaacaacctggccgacgagtccttccagaacctaccgaaactggagatcctggacatggccttcaatcagctacccaacttcaactttgactacttcgaccaagtgggtaccctttcgaatcttaatgtgaacgtgagccacaatcaaatcaggcagttgatgtacaattcctcgtggagtggacgaaatgaacatggtggcatgtaccactcgaatattaagatattggatctttcccacaacaatatatctattatccatcctggatacttccggcctgctgaaatttcgctgacacacctacatctgggctacaattcgctgatgaacacgactcgtgatgtcttcggcaacatgccccacttgcaatggctggacctcagctacaactggatccacgaactggactttgatgccttcaagaacaccaaacagctccagctggtcttctttggccacaattacctcagtgacattccccaggatatattcaaacctgtccaaggcctgcgcatcgttgacttctcgcataatcacctgaggggcctgcccgacaatctcttctacaacggaggcatggaaaaattggatgtgtcgcacaacatgatgttgaagatcccctcctcatcgctgtccagtttggctgcgctgacgctttgtgaactgcacctgtccaacaactttatctctaccattcacagcatggatttgtccaacaagtttagatccctgcgctacctggacatctcatacaactatctgctgcgaattgatgatgcagtgttcgccaccatgccaaaactggccgttctggacctctcccacaatcgggatctgaaggtgatggataagtcgtttatgggcttggagaactcgctgatcaaactgggcctggagaacatttctctgagcacggtgcccgagattcgactgaagtatctgcgggagttccgcctgggttacaatgagctgccctcgattccgcaggaactagcccacaatatgagtaatctgcgcatgcttgatctctccaacaacgacttgaccaatgtgccactgatgacccaagctctgccccacttgagacgtctgatgctttctggcaatcccataacctcgctgaacaacaacagttttgatggcgtgaacgaggatcttgagatgctggatatatcgaatttccggctgcactacttcgagtatggctgtttggactcgttgcctcacttgcgatcgcttaagctcactgcctattcccacctggagcactttaatattccacatctgttgcgccaccattacaatatccgccagttgtggatcgaggccccacagcccttcactcgcattgttaagaagggatctggacccacccaggagatgcagacccttcagctgggcaatcccaccgacttgcagcgcgaaatggagggccatctgccctccaagctgaccaacatcaccttcagtggtccccagttcaccaacctgaatgaacgcattctaagaggcatgcgttctccatacctctacatgcaattattcaatacctcgctgcaagccttgcctccgaacttttttaagtacatgggccgagttcggaacatttcgctggacattcgctaccacaacaggaacctgaagaagattcccaatccaaacactggagctgttccctatctgccgaatagtgtgttcctcacggacttgaagatgtctcacaccgatctcaactgcgattgcgacctagggtgggtggagttttggcagcgcaagaggcgccagtacatctgctcctcccaaacctggaccgataccgtcttccgcaccttcatgaactcaccttgccaagtgtacggacgtcacaactgcgacgaacacgacgatgacctgagggagacgcgctgtgagaacaaaggagggcaacagctgatggaggccctcaaattcgatctggagtgcgggtgggacaatgcaaattgccgggaggccgcctttgtggtggtgatggtgtgcgtggccatggtcttctggatgtgacttctgcactttacatataagacgtccaccgacttttataccattcttgagcaagtctacggcagacaggtcatatgagtcctgccgtctagagtttaagcgtgatgatgagactttggccactttgataccttttgcagttagttgattctcttccgacaaccttctctcaccgatccgctggtccttggtaacgccttatatgtagtactcctcacaattcaccaccgaagcactccattcttcgcctcgcctcactgtctatctccatgtatgtatattctcgtaggccttaactaatccagctaatccagctatcta

SEQ ID NO: 2154 - protein, 1315 aa, DROSOPHILA
MGLEFFFKFGYAFLTITLMIMIWMSLARASMFDREMEETHYPPCTYNVMCTCSKSSTDLGIVHCKNVPFPALPRMVNQSKVFMLHMENTGLREIEPYFLQSTGMYRLKISGNHLTEIPDDAFTGLERSLWELILPQNDLVEIPSKSLRHLQKLRHLDLGYNHITHIQHDSFRGLEDSLQTLILRENCISQLMSHSFSGLLILETLDLSGNNLFEIDPNVFVDGMPRLTRLLLTDNILSEIPYDALGPLKSLRTLDISHNVIWSLSGNETYEIKASTKLNLDNLHLEYNHIEVLPPNSFKYFDTVNRTFFDGNPIHTLREDAFKPARIREIYMRYCGLTNISPVAFDSLVNSLQILDLSGNNLTKLHHKLFNNFDVLRVISMRDNKIKIQKPTETFNAVHYTLLKLDLSGDRNDPTNLQTLRNMTRMRNMRSLSISRLGSSSVGPEDFKDFGVELEDLQITRASLSGIQSHAFKHVRGLKRLDFSENGISSIENDAFHEIGHSLISLKMSHGYSGSALPAEPLRHLTSLQELDFSNNHISSMSDTSFHFLKNLRLLELHDNRIEQVLKGTFQGDIHSKLEEISLRFNHLTSISQHTFFDLEALRKLHLDDNKIDKIERRAFMNLDELEYLSLRGNKINNLADESFQNLPKLEILDMAFNQLPNFNFDYFDQVGTLSNLNVNVSHNQIRQLMYNSSWSGRNEHGGMYHSNIKILDLSHNNISIIHPGYFRPAEISLTHLHLGYNSLMNTTRDVFGNMPHLQWLDLSYNWIHELDFDAFKNTKQLQLVFFGHNYLSDIPQDIFKPVQGLRIVDFSHNHLRGLPDNLFYNGGMEKLDVSHNMMLKIPSSSLSSLAALTLCELHLSNNFISTIHSMDLSNKFRSLRYLDISYNYLLRIDDAVFATMPKLAVLDLSHNRDLKVMDKSFMGLENSLIKLGLENISLSTVPEIRLKYLREFRLGYNELPSIPQELAHNMSNLRMLDLSNNDLTNVPLMTQALPHLRRLMLSGNPITSLNNNSFDGVNEDLEMLDISNFRLHYFEYGCLDSLPHLRSLKLTAYSHLEHFNIPHLLRHHYNIRQLWIEAPQPFTRIVKKGSGPTQEMQTLQLGNPTDLQREMEGHLPSKLTNITFSGPQFTNLNERILRGMRSPYLYMQLFNTSLQALPPNFFKYMGRVRNISLDIRYHNRNLKKIPNPNTGAVPYLPNSVFLTDLKMSHTDLNCDCDLGWVEFWQRKRRQYICSSQTWTDTVFRTFMNSPCQVYGRHNCDEHDDDLRETRCENKGGQQLMEALKFDLECGWDNANCREAAFVVVMVCVAMVFWM

SEQ ID NO: 2155 - DNA, 5536 bp, DROSOPHILA
accaaagatcgcacggtgatgtccaacgccctgcactccaaggagctgaagttggcgttgccgactcgaccagcaagacggtaataatgctgctcaaaggtgccttgaaacgtgcgacacatactgaatatgccatccaactgtttttctgttttttatttttgttcttagctaaatgtaatatgtcaaataaacgaatttaaaaaaaacctaatcctgcgaaccaaacataggtgtgtgttgtgatggaggcaactcctgcgcaggcgcgcgatgtccgtaaatgtggtgagcattgccacgaattgtgcgcgccaaacgcaaattttcctgctgcgatgcatacgcactgccggtgtgaccagatcggtcactcttatcgatatcgttaccaatccagcttactagctttaataaattctataaacttgtatatcgaaaataaaattattattaatattatattaatatcatttcaaatggcaatgaatatttaattttagtaataaattggggtggatatatgcttttccgaatgtgaagaaaacatcatcctttcaatatctggtttatccctcccgtctgaaaattgtgaaaatacaagcgattccacattatgaataaacggatctaaaaatcaactttagataccttacaatggattgtaagttgcgttagcttaagtatgacctgcaattaaacaacaaatcaaagaaaagtcgtcccgagcgaggaaaaaaaataatatatgaaacacaaataattgttttccaaatgaccaagtattacgcctgacagaaatgcaataatttgttcttacatttatgtgaccctatcatcatcgaatcatatttcaaattccaattccgatttcgttattaggacatcgggctgtagccctgggtatcgtaatcgatagttgcgaaatagcagtcagcgatagtgtctgacaaaatcgacgttgttccacccctaacaaagagtggtgatctgagcgcagtcggttgatttcatttggttttttttttaattattcgtgtcgccgcgatcggatcggatttcccataatctctgagcgttccgcctatccttcaagtgaaatgtcgctgaatccgcagtacgaggacattggcaagggatttgtgcagcagtactatgcgatattcgatgacccggcgaatcgggcgaacgtggttaatttctatagcgtaagtgttgttgcttcccgcttctgctcgtcgcctttcatctctcctttattcccgtctccgctttcgcctgcacatttttcgcttgccatccccatcacacgcacaggtgacgcgcggcgcgcccttgaaaaattccgcctcctttcagcagaaaatgaataaagaaactgttgcaatgcgaaaaagagcgcgaaaaagagcagctggagatatacggtcggcgtatccgtgatatcgtgggaataggatgaatgttgataggggcgggggcagcgttcgattctcgaagtttcgggtgacacattacgcccatgctcgcataaataaatacacacatacgaaatatatggccaacatacaactgcggttagcacaatagggcccaatatacgatataaattcgtgaaaaaattgtattaatatcttgaaaaatatggcataattgtgtttcattagtttcaatcaattcagtttttttgtcacataaaagagtaaatgaaagaataaaaaagtctataatgataaagtattgaaaataaaactatctgtttgatatgtttttaatttaaatattaacagttttataaccaattttgttcttaataatacgaaatatcattactaagtaaaacatcatcataacacttatatcattatatattttatacttccaggctaccgactcattcatgacctttgaaggccaccaaatacagggggcacccaagattctggaaaaagttcaggtaagtcctgattatatacagtcatgggcatatgtataatattttgcatacccttcctattcctgcagagtctgagctttcagaagattaccagagtgataaccacagtggactcgcagccaactttcgatggcggagttctgatcaacgtccttggaagactacaggtaaaaccagaattctcaacaagaaaactgtcctaaactcgctgtcggggggaaattcaatgactgcctgcggcggcggttagaatattagcactgccgaccaattcaatcgattttcttttcaagttttgaattttatttttggtcttttcaacacgtaaatgcttgacaatcgtttttgtaacaaatagaacgttttgttttggctttcacataagaacattatttattttgcactgtttcccatttatttgttatcatgtatgggctttattaagcctgccactttattccattaagtgttcttcattctaagatacattatacccgttactagtgcagttaaagagtatactatattcgttaaaaagtatgtaacatgtagaagcaatcgttttcgacaaaatgtagtatatatattcttgatcaggatcaatagccgagtcgatctggccctctccatatgaacgtcgagatctcaggaactataaaagctagaaggttgatattaagcagaccgatcctagagacaccgacgcagcgcaagtttgttgatccatgttgccacgcccactcatattgttcaatatgaaatttcgcgttctcacttccagtcggaaaagtcgaccatagcattctctcttgttttgaatataatatccattgacttattgatgcagttatagtaggtagataaatgaaatgaattttaaaaagagtaactgcctcaatgtattttacgataccttattgttcaaagtggatatatgtagagacgtagaagcaaatttcaatcgcccatcacttaagatatgaaatcattcatcattcttccgtaaagtcgtaagggcagtgctatttgccgaccgccgctgcatctattattccatataagtcacctgaatctgaatcgaatatctcaattctggttattacaaaacgaaacacaaatgccaaaacaaaccaatgcagaccgacgaggatcagccgcatgcctatattcagaccttcgtattgaagccggtgggcggcagtttctttgtgcagcacgatatattccgactctcgctgcacgatgtgtagcaccagcgagcccgacctgccacgcccagtccacagactccagcgcccggctatatgtgtgtaaatcgagatcgagatcagcagccaaacgatcagccagcagacacgagacgagagccagttaaaaaacgaaagaaatccatatctaagcgataagatagttctgctgcttgtcgaccttatgccgcccagccatgcccactccgcccacatatacaaaaatatttatccttggcgtctcgtcgtcgtccaatttcttctaattattctcacagtacgtgaatgtccaacgaaaattaatcaaatcaaaatgttgcgcatttcatttcgtgcatggttttcgttgattttgagttggatttgctctttctttcggttggtcgctggggacctggaacctcctaataatgcaattttaatgtaacacaaacaatttctgtaacctctattgctttacatttttaactaaacggtttatatttatattatatttttagatgctttcaattgatattgcacttataaaaattctgtttttcatttgttacaaaaccaaataccaattgactagtcttaacttgcatattgttttgttcaatagctcgaagaagagaactgtaaatatcccaaattgttaagcgcaccctaatatgccttaaaaaaaaaactttcaaatgttgttcaattttgaatggaactgaggaaagttttgagaagttcttatatcagtgaataataattttgctcgcacatttggtataaagtttattctgctcgtgaaaatgttttggagttatgttcaatttatcgagcgagccctgtacagtaaacacgcaccttacacgatcaatcggctgccagttgtacaccctttccctctgaccctggcttcaaactgtgtgtactccattcatatctaactcaatacgttgaaattggtttttcgcacgcttgtgttattgactttaaatgtgactggtttgcctggcatctgctaacgtatttatgatttcattcctttgcagtgcgatgacgatcccccacatgccttctcgcaggtctttttcctgaaggccaacgcaggcaccttctttgtggcccacgacatcttccgtctcaacatccacaactctgcctaggagcactccacttacctacgtatgcacaccactcagcaccacacataatcgacatccaaagatgcccagcgccagatgataacaacaagctcggcagtggaactcagaaaaaaaaaatataacaaagccagccagcggtctcacgattatcagcaaatacaaaagttagaaaaagaaaaaaaaaaaaaaaccaataaaaaaataagaaaataacgctaactactattacgatgtcaacaaaatgggccgccagctcaccttcatttgtgtcccattgttgccggtactctcgctttacgatccacggaaccctagaattatatgttctgcgaacacctggatctcgcgatctaatttagctaggactatcgaatttggtggtatgtgccgtgctacaagctcgtatttcgaattcccgtgaaatgagcaggaacagcaggccgggatcatcgcctacataagtttagagtgattttctagaccgtttatatttccaattgaattatttgtactttaattatgaggattattttagatagccgtattgcaaatgtattgtgtcgagtgtctcgctctgtaaacaattacttgagtaccgggactgcaccacacacagtcgcaagtatcgactcttgctttctcatatgactaattgagcgatggcgaattactttttattgagagaaaaaaaaaacacttaaatataaagataaacgttaacagtttggttgtttgtatgattggcggaatggccagttgaaccggaaagatatgtatacccttataagctattaaatgcatacgaaagaagctccagcggatctggccagtggtttccgtctaaaaactgaacgattcacttgtcgcgaaatgtgaacaccgcatcgaatccgaatagcaccccattgacgatggacagcgaggccttgatgagcgcgagatcccgagttcgggtgcggaaggagaactcccaggcctcaatgatgaacacaccgctggccacgaacaaggtgcagcccaggacgctgaagaatatatcgatgcgcttgtgaatgggtgcccgcatcagaacgcctgcaattgcaaggtatcttaagtagatttgtgtgcaaatttcgtttttggttaacttattttagtattttaactcttaaggactggcattccaaggcgtacctgcaaagaccccg

SEQ ID NO: 2156 - DNA, 683 bp, DROSOPHILA
tcggttgatttcatttggttttttttttaattattcgtgtcgccgcgatcggatcggatttcccataatctctgagcgttccgcctatccttcaagtgaaatgtcgctgaatccgcagtacgaggacattggcaagggatttgtgcagcagtactatgcgatattcgatgacccggcgaatcgggcgaacgtggttaatttctatagcgctaccgactcattcatgacctttgaaggccaccaaatacagggggcacccaagattctggaaaaagttcagagtctgagctttcagaagattaccagagtgataaccacagtggactcgcagccaactttcgatggcggagttctgatcaacgtccttggaagactacagtgcgatgacgatcccccacatgccttctcgcaggtctttttcctgaaggccaacgcaggcaccttctttgtggcccacgacatcttccgtctcaacatccacaactctgcctaggagcactccacttacctacgtatgcacaccactcagcaccacacataatcgacatccaaagatgcccagcgccagatgataacaacaagctcggcagtggaactcagaaaaaaaaaatataacaaagccagccagcggtctcacgattatcagcaaatacaaaagttagaaaaagaaaaaaaaaaaaaaa

SEQ ID NO: 2157 - protein, 130 aa, DROSOPHILA
MSLNPQYEDIGKGFVQQYYAIFDDPANRANVVNFYSATDSFMTFEGHQIQGAPKILEKVQSLSFQKITRVITTVDSQPTFDGGVLINVLGRLQCDDDPPHAFSQVFFLKANAGTFFVAHDIFRLNIHNSA

SEQ ID NO: 2158 - DNA, 5239 bp, DROSOPHILA
tatgtacaatattaggaaccattcgtttggtaaagcaagtatatttttatgtttaggtctttattattgttgttccttatctttccacatatagatggtcatatacctaccatttcgcgccaacttcccatagttattatcaatgctcacagccatacatttctcaaccgctcccttagcgacatttaaaaactgtcactgccttagaaattgattaaaaaccgatatgatacggtttatggaatttacctagtcttaattagcaagagaacatttatttcaaggtgtaaagataatggcaggttttgaggtactgcatttacccctatcacacgttttgcatcatcactgaaaaaattcgttcatgattacttagcagttgcacatctgccaacctatggccacatttgttgtttcatttttcataatcctgggcaggtgaactgcaattttttagaattgggtgatttttagttcttaatagccaaaaagcacaatctaatgaacaaaaaccaaatcacccccttaattttgtgtccatatttgtgttctttactttcatattttctccgcctcatttcgtaaatccaacgaataaaaaacaatactcaacttaaaaatggaaaccaacttaaactcgaatctctaccaatgttaatatgcatacgttaaaaaaaatgacataaatatatcgcatatagttgggtagacagcgctttcacgaactacgtcagtgcatgcaaaacgatgaagatgataatccaggaaatacactcacacctgattctcaggtatacatttttgtaatctagcctgtttgctcagctttccgtttgcccagcttacccacgtgtacttatgatttaaattaaacttgcagaatagctcaacggatggcatttttaccaaccgttcgacgcatccgtttaaggtcattgagacagatgcgatgagcatacagagcatgacatcactgggtcgcgtgggccgaatcttggcgggcagcattgatccatctggtgagtagaaatcagtattttcacgaaaacatagcagccactgacactcttaattcatttgcttcaagctataagcatagatcgcgagtccctggcctcgttgaatgcgcaacagcagaagcagcaggcgcagcagcaacaacaggcgcagcctacatcgtctaccagctccaatactccaccgagcgttggaaacacctcttccgggatgagcacgcccagggtgtcgcccaagcatcagcagagtggtaaggaagtagccgccaccacgacagggattcctagtgccgcatcctccgcgcagagctctggtgttggctcgatggttttgcaggaaccagatgtgatagcaagcacaaagcttgcccagtctaaaactactgattccatcacctcgtcgggacccgtggcgccaccgcgaagaaagaagaagtctcgtaattgctccatcagttcctcagatcagtatagtcttcctcctgcggacaacgaagacactgatagtgatacgcggtctgtgaagagtgtgcagggtcttcagcaaaagctgcgggatgactttgtcatggagttcgagagctctcttaacaatgcaactagttcagcctccaatatcaccctgacctgctcctccaccaatacagttgtttctgcatcggcttcgacttcggcagcatcttcgtccttgccatcaacaattgcaattcatatgcgccccatggtcgcttcggtcaccattgctggtccaaaactcactcaatctctgggcagcagttccacgtcggtccactccaagccaagtccatcaaattcagcgaaaagcaattccgcaccagcgagggttaggtaagtgaatgttaaacctttggtggcctaaagttactaatggattactatcttctctagttccattgatccgaatcagggtctgaatctgtttaaggccatccagggaggttatgtggtgaaaccacgcgacgaggccagcaacaaggcgcaaggcccatcccaagatgaaatcgagcgcattgagaaaatgctgatggaaagcgcgaaccgaccaaagctggcgggaacgggatccaacagtttaggaagctctacacggtatgttacgtatgcttttccatttatggcatttaaaaatacctatccttccgcagctatcccggattttatcgcggtgttaacgataaggagcgccggaagtccgctggcgacgaagatgtgctcaaacagatgaacatttatgtgcgcacgcgaaccagctcaggcaagcagctaaccgactttgagatccttgaacaagttcctgttaaaaatttagacacgggagaaaatatgcctctatccgaaatgcgttcaccaccagtgcctgagggatggaatccgctctcgctacacatccttaagctgacctcccacctggaggtgatccagaaggagtccgacgaggagagtgtgattggcataccgcctagcatcgagggtcagcagcccgacgaagaagaactggaaacggaagatggcagtcgactgaaaaagaaaacggcccggatcaagaggttctttggcagcacaatgcgaaagacggtggacaaggccaagtcgattgcatccgaagtgtcgcatgcgcgacacaaagaggatgtggctgatattgttgatgcaatgaatcccgagcaaaatatcaaaatcaaggcttcctcgtccaacaagggaccctatgagtttaccaaactgcagcacgtccaggatttgagtggcgaagataccagtgccgtgtggtgcatgaagttcagttcctgcggtcgactcctggccactgctggacaggacaaggtgttaaggatttgggttcttaaagatgcctatccgtttttccaggtaagcaaattctatccgtgcaattatacattacgctaatgcctatattatttgtttaggacatgcgcaacaaatacaatgctgaccaaaaatcctcacctacgccctcgcaagagtcactcgtctcgcagcattcggctgaggaagccattgccatggctactgccgcagagaaatgcacgggccccttcatgccaaagcccttctgcacctacaatggacacacctccgatttactggacgtcagctggtcaaagaattacttcatactgtcaagcagcatggacaagactgtgcggctctggcacatttccagaaaggagtgcctttgctgttttcagcatatcgattttgtcaccgctattgcgttccatccacgcgatgatcgctactttttgagtggcagcctcgatggcaaactaaggttgtggaacatacccgacaaaaaggtggcactgtggaatgaggtagatggccagacaaagcttataacggctgccaacttctgccaaaatggacagttcgccgttgtagggagctacgatggtcgctgcatattttataacacggatcagctgaaataccacacgcagattcatgtgcgctccaccaggggtaaaaaccgcattggccgcaagatcagtggcattgaaccgatgcccggcgaagacaagattctagtcacatccaacgacagcagagtgcgcctgtacgatttgagggacttgaacttgtcctgcaagtacaagggctacttgaatgtgtcctcgcaaattaagggctcgttcagccacgatggaaagtacatcatagccgggtccgagaatcagtgcatctatatttggaaaacaaaccacgattactcaaaactcagttctgtgggtggcgcaaaaccttttgcttaatataaaatggtatttatttttctttgtcattgcaggttcgccgcgatcgcagcgacttttgggaaggcattaaagcacacaatgctacggtcacttgtgccatattcgcgccacacccagaggctatcatcaagcccgaaccggatgagatctccaatgagaaggtgggtcccaatcgcgttgaatcttgttctttatatttttcgagatcagttctattcaacatgttttccgcttgcagttggctcacaatcagccggatccactggtcgagcagcacaaaaagggatgtggttatgtgttggtcagcgccgatttcaatggcgccatcaaggtgttcatcaacaagacgaagccgaagcacagcagtctaccctacacggccattgcggattagtctttagatagaggatgggagatatagaagagtaaaagtgaaatactattttatttttgtattcgtgacattttgtatcgttagtaactagcgccattgctgatttgtatgcataatctgtaattactaattcctgtctgtccccacgcccattttaagttaataatcccataattccccttgtaaaagttgttaacaattgctgctggcgcgaactgtttaatattacgcaaaatatgttatgtatttttaacgctgagtgtgtgaatatgtgtatagatatttgtttaacaagttgattatttcgaaagtcaattgtatattgttatgcccttgtaagttacattttgactgtacagatgctttgatttcgttactctcgattacaattaaatctgtccgtctggccattaacctctttgatatgtaatctagttagaaatgtactgctggccaacctgcaagggtacgagcgaatcggtgggccgaatcgaaataagttattttatcgcctaaagtcttaacctaactaacctattataattaacttttaaatgatatatattttgtgtaaagtaaatatgtgcaaccaggacgctaaatgtaactttaattctaccaacgaaacttacgttggcgggggtttggttttgaagtgcttccggattagagtacgtctaaacattcattcctccagccaggcatggtatttagcaaagcttaaccttcatatttggggcttcctgaggtgcgagctggttgaaagttaagtagctggcaaagtaaacaggcggttgtaattctatactgatactgcagacattcgtaaatcttaggtattataattccgggaagggatgacgtatagataattaatgagggagcaagtgaaatgcaagacttgagtggaacagccttcggtttgaatggtttgactccctttgactgcctttttgccgtcccgcctgatttgcatagtttggggctgaccgtctactcgctcaataatgaatgcgtcagtttcaaatggc

SEQ ID NO: 2159 - DNA, 2934 bp, DROSOPHILA
ggcagcattgatccatctgctataagcatagatcgcgagtccctggcctcgttgaatgcgcaacagcagaagcagcaggcgcagcagcaacaacaggcgcagcctacatcgtctaccagctccaatactccaccgagcgttggaaacacctcttccgggatgagcacgcccagggtgtcgcccaagcatcagcagagtggtaaggaagtagccgccaccacgacagggattcctagtgccgcatcctccgcgcagagctctggtgttggctcgatggttttgcaggaaccagatgtgatagcaagcacaaagcttgcccagtctaaaactactgattccatcacctcgtcgggacccgtggcgccaccgcgaagaaagaagaagtctcgtaattgctccatcagttcctcagatcagtatagtcttcctcctgcggacaacgaagacactgatagtgatacgcggtctgtgaagagtgtgcagggtcttcagcaaaagctgcgggatgactttgtcatggagttcgagagctctcttaacaatgcaactagttcagcctccaatatcaccctgacctgctcctccaccaatacagttgtttctgcatcggcttcgacttcggcagcatcttcgtccttgccatcaacaattgcaattcatatgcgccccatggtcgcttcggtcaccattgctggtccaaaactcactcaatctctgggcagcagttccacgtcggtccactccaagccaagtccatcaaattcagcgaaaagcaattccgcaccagcgagggttagttccattgatccgaatcagggtctgaatctgtttaaggccatccagggaggttatgtggtgaaaccacgcgacgaggccagcaacaaggcgcaaggcccatcccaagatgaaatcgagcgcattgagaaaatgctgatggaaagcgcgaaccgaccaaagctggcgggaacgggatccaacagtttaggaagctctacacgctatcccggattttatcgcggtgttaacgataaggagcgccggaagtccgctggcgacgaagatgtgctcaaacagatgaacatttatgtgcgcacgcgaaccagctcaggcaagcagctaaccgactttgagatccttgaacaagttcctgttaaaaatttagacacgggagaaaatatgcctctatccgaaatgcgttcaccaccagtgcctgagggatggaatccgctctcgctacacatccttaagctgacctcccacctggaggtgatccagaaggagtccgacgaggagagtgtgattggcataccgcctagcatcgagggtcagcagcccgacgaagaagaactggaaacggaagatggcagtcgactgaaaaagaaaacggcccggatcaagaggttctttggcagcacaatgcgaaagacggtggacaaggccaagtcgattgcatccgaagtgtcgcatgcgcgacacaaagaggatgtggctgatattgttgatgcaatgaatcccgagcaaaatatcaaaatcaaggcttcctcgtccaacaagggaccctatgagtttaccaaactgcagcacgtccaggatttgagtggcgaagataccagtgccgtgtggtgcatgaagttcagttcctgcggtcgactcctggccactgctggacaggacaaggtgttaaggatttgggttcttaaagatgcctatccgtttttccaggacatgcgcaacaaatacaatgctgaccaaaaatcctcacctacgccctcgcaagagtcactcgtctcgcagcattcggctgaggaagccattgccatggctactgccgcagagaaatgcacgggccccttcatgccaaagcccttctgcacctacaatggacacacctccgatttactggacgtcagctggtcaaagaattacttcatactgtcaagcagcatggacaagactgtgcggctctggcacatttccagaaaggagtgcctttgctgttttcagcatatcgattttgtcaccgctattgcgttccatccacgcgatgatcgctactttttgagtggcagcctcgatggcaaactaaggttgtggaacatacccgacaaaaaggtggcactgtggaatgaggtagatggccagacaaagcttataacggctgccaacttctgccaaaatggacagttcgccgttgtagggagctacgatggtcgctgcatattttataacacggatcagctgaaataccacacgcagattcatgtgcgctccaccaggggtaaaaaccgcattggccgcaagatcagtggcattgaaccgatgcccggcgaagacaagattctagtcacatccaacgacagcagagtgcgcctgtacgatttgagggacttgaacttgtcctgcaagtacaagggctacttgaatgtgtcctcgcaaattaagggctcgttcagccacgatggaaagtacatcatagccgggtccgagaatcagtgcatctatatttggaaaacaaaccacgattactcaaaactcagttctgttcgccgcgatcgcagcgacttttgggaaggcattaaagcacacaatgctacggtcacttgtgccatattcgcgccacacccagaggctatcatcaagcccgaaccggatgagatctccaatgagaaggtgggtcccaatcgcgttgaatcttgttctttatatttttcgagatcagttctattcaacatgttttccgcttgcagttggctcacaatcagccggatccactggtcgagcagcacaaaaagggatgtggttatgtgttggtcagcgccgatttcaatggcgccatcaaggtgttcatcaacaagacgaagccgaagcacagcagtctaccctacacggccattgcggattagtctttagatagaggatgggagatatagaaga

SEQ ID NO: 2160 - protein, 916 aa, DROSOPHILA
MSTPRVSPKHQQSGKEVAATTTGIPSAASSAQSSGVGSMVLQEPDVIASTKLAQSKTTDSITSSGPVAPPRRKKKSRNCSISSSDQYSLPPADNEDTDSDTRSVKSVQGLQQKLRDDFVMEFESSLNNATSSASNITLTCSSTNTVVSASASTSAASSSLPSTIAIHMRPMVASVTIAGPKLTQSLGSSSTSVHSKPSPSNSAKSNSAPARVSSIDPNQGLNLFKAIQGGYVVKPRDEASNKAQGPSQDEIERIEKMLMESANRPKLAGTGSNSLGSSTRYPGFYRGVNDKERRKSAGDEDVLKQMNIYVRTRTSSGKQLTDFEILEQVPVKNLDTGENMPLSEMRSPPVPEGWNPLSLHILKLTSHLEVIQKESDEESVIGIPPSIEGQQPDEEELETEDGSRLKKKTARIKRFFGSTMRKTVDKAKSIASEVSHARHKEDVADIVDAMNPEQNIKIKASSSNKGPYEFTKLQHVQDLSGEDTSAVWCMKFSSCGRLLATAGQDKVLRIWVLKDAYPFFQDMRNKYNADQKSSPTPSQESLVSQHSAEEAIAMATAAEKCTGPFMPKPFCTYNGHTSDLLDVSWSKNYFILSSSMDKTVRLWHISRKECLCCFQHIDFVTAIAFHPRDDRYFLSGSLDGKLRLWNIPDKKVALWNEVDGQTKLITAANFCQNGQFAVVGSYDGRCIFYNTDQLKYHTQIHVRSTRGKNRIGRKISGIEPMPGEDKILVTSNDSRVRLYDLRDLNLSCKYKGYLNVSSQIKGSFSHDGKYIIAGSENQCIYIWKTNHDYSKLSSVRRDRSDFWEGIKAHNATVTCAIFAPHPEAIIKPEPDEISNEKVGPNRVESCSLYFSRSVLFNMFSACSWLTISRIHWSSSTKRDVVMCWSAPISMAPSRCSSTRRSRSTAVYPTRPLRISL

SEQ ID NO: 2161 - DNA, 3219 bp, DROSOPHILA
ttttgtagaattaataaaagtcgtgtgttattaagaaaatattaaaacgtattatatttattgtttgaataccagaacgtttcttattccgagcacatattgtagcgtttgcccctcgcttttggcatttaaaatggagcaaatattttagaattcacctgaatcgcatgcaaaagcctttgtcaacatcaatggtccgctgtgaccacgctctttgttgtagttttttgtgaatgcgcaattgttcagtgtcgtcatggctgtggcatgcacaaagcgccgattgcaacgcccatccatccacccagcaacccccccccccccccacctactaaagctttcaggatatgccatccaactaccaactaccataccgaccaaaacgcttttttttcggcgctgacatgtccaggcactggggcaaaaacaaacccatatatgtatattcaataggccgggcgctgccagagtgttttccgacgtttttctgtaattcgttgtaggttttttccaagttggctttcggccggtccgaaaaaagcggcctgcctacataaaggcgctagcatattaaaggcttaaacccactcaacggcagatgccatattgttgaaatatatgcagatacgtcgcgcatacgtcatgtgaagatggaatccggtttgcaaaatgcattccattcaagcagcgttctgtgatttttcattgcaatcggttaagcaatcgaatccaccagatttatgtattgtaagcatatatttccattcaaagctcaaagcgattttcaccttacctgcacaacaaaaacactacactagggtgtgatcgtagagctcggtttttcaaatttcgatcgaagtgggcctggattattgtgcaatgctgtcgtcctactgttatatctcattcagtttcctgtttcgctccgaataacttccaaattgaacagtaaaaatttgtaacaaaaataaagtataatatttttctagaaattttattttggaaaacttaagtcgaaaacatgtgctctccgtgcggtccttgtagtccatgcgatccctgctgcggtcccttcgagtgctcacccaagtgctataatgccgcccaattggaggccttgccacaatgtgctccacgtattccacctcccttccccaaatgcatcaccgtgcagcaaccaccacgcatgatctgcaagaaacgcgtggtgttcacggagaagattgtgccggagccaatggtggttaaccgatgcagacagattaccattccaaaggtcgttgatgccacgcgggtgatcaaggtgcccaagctgatttgggtgtcgcagatggtgcgagaacccagagtaatctactacccctcgatgatccccgatccctatgtggtgtgctatcccaagcgcgtctgcgaaccccgggaggtgtgtcagtcgatcctgtgccagccgaagccacagaccatcgacattccgccgccaagggagtactgctgctatccaaatggacccatcaactacaagcccagtgcagcgtgcccaccctgccccattggaccatgtgctcctggaggaccctgctgtccgctgccctgcttctccacaaaccagtatcccgttgccgagggtaggtgcggaccctgtggaccttgcggtccaggatgcggaccctgcggtccgcgatgtggtccctgcggacccggcccgtgcggaccctgtgggccgagatgcggtccgggtggaccgtgcgccgtgcccaattgcgggccctgcggcctcacaatgccgtcgggtccgtttgtcccggctccgtgtggaccctgtgctccatgcgggccatgtggaccgctcggcaatagtccttgcggtccttgcggaccctgcggaccctgttcgcccccgtgtccgtacgagtcacccgagtgcggcccctgctacccgtgcgccccaactccctggaatacccactgcggcccagttggtccttgcggtcctcaagtgccttgtggacccagcggcccctgttaacatcatcgttgtgctgcctggattgttgtcagaaaccggtgcccagtggaccaacttgtctatcaccaatacagattgccatagtgtattctcgccgttctgctcaaacaccaccaaaaaagtctacagttctctatactttgtcaacgcatggacgactcattggctgtaaataaaaatcggatttatgcatatataaggttttttcaatttcttttgacaggttatgcaatggtttctatccagataaaattttctaccaaatttttgtcaaatagtaggccttgcctctgcttgtcaatctacctatgttcgttactcaggcttagctcgcattttgaatccggtttcgcttcgatacacttctaaatttctctgatcaaattttataagaaacaaaaaacaaaaattaactttttactctttcggtttattctagtcgaaacttaaaatgtgctctccgtgcggtccttgtagtccatgcgatccctgctgcggtcccttcgagtgctcacccaagtgctacaatgccgcccaattggaggccttgccacaatgtgctccacgtattccaccacccttccccaaatgcatcaccgtgcagcaaccaccacgcatgatctgcaagaaacgcgttgtgttcacggagaagattgtgccggagccaatggtggttaaccgatgcaggcagatcaccattccaaaggtcgttgatgccacgcgggtgatcaaggtgcccaagctgatttgggtgtcgcagatggtgcgagaacccagagtaatctactacccctcgatgatccccgacccctatgtggtgtgctatcccaagcgcgtctgcgaaccacgtgaggtgtgtcagtcgatcctctgccagccgaagccccaaaccatcgacattccgccgccgagggagtactgctgctatccaaatggacccatcaactacaagcccagtgcagcgtgcccaccctgccccattggaccatgtgctcctggaggaccctgctgtccgctgccctgcttctccacaaaccaatacccagtggctgagggcagatgcggaccatgtggaccctgtggacccggatgcggaccttgcggaccctgcggaccttggggaccaggatgcggtccttgcggaccctgtggaccctgcggacccttcggaccaggctgtggtccatgcggac

SEQ ID NO: 2162 - DNA, 1219 bp, DROSOPHILA
tggaaaacttaagtcgaaaacatgtgctctccgtgcggtccttgtagtccatgcgatccctgctgcggtcccttcgagtgctcacccaagtgctataatgccgcccaattggaggccttgccacaatgtgctccacgtattccacctcccttccccaaatgcatcaccgtgcagcaaccaccacgcatgatctgcaagaaacgcgtggtgttcacggagaagattgtgccggagccaatggtggttaaccgatgcagacagattaccattccaaaggtcgttgatgccacgcgggtgatcaaggtgcccaagctgatttgggtgtcgcagatggtgcgagaacccagagtaatctactacccctcgatgatccccgatccctatgtggtgtgctatcccaagcgcgtctgcgaaccccgggaggtgtgtcagtcgatcctgtgccagccgaagccacagaccatcgacattccgccgccaagggagtactgctgctatccaaatggacccatcaactacaagcccagtgcagcgtgcccaccctgccccattggaccatgtgctcctggaggaccctgctgtccgctgccctgcttctccacaaaccagtatcccgttgccgagggtaggtgcggaccctgtggaccttgcggtccaggatgcggaccctgcggtccgcgatgtggtccctgcggacccggcccgtgcggaccctgtgggccgagatgcggtccgggtggaccgtgcgccgtgcccaattgcgggccctgcggcctcacaatgccgtcgggtccgtttgtcccggctccgtgtggaccctgtgctccatgcgggccatgtggaccgctcggcaatagtccttgcggtccttgcggaccctgcggaccctgttcgcccccgtgtccgtacgagtcacccgagtgcggcccctgctacccgtgcgccccaactccctggaatacccactgcggcccagttggtccttgcggtcctcaagtgccttgtggacccagcggcccctgttaacatcatcgttgtgctgcctggattgttgtcagaaaccggtgcccagtggaccaacttgtctatcaccaatacagattgccatagtgtattctcgccgttctgctcaaacaccaccaaaaaagtctacagttctctatactttgtcaacgcatggacgactcattggctgtaaataaaaatcggatttatgcat

SEQ ID NO: 2163 - protein, 334 aa, DROSOPHILA
MCSPCGPCSPCDPCCGPFECSPKCYNAAQLEALPQCAPRIPPPFPKCITVQQPPRMICKKRVVFTEKIVPEPMVVNRCRQITIPKVVDATRVIKVPKLIWVSQMVREPRVIYYPSMIPDPYVVCYPKRVCEPREVCQSILCQPKPQTIDIPPPREYCCYPNGPINYKPSAACPPCPIGPCAPGGPCCPLPCFSTNQYPVAEGRCGPCGPCGPGCGPCGPRCGPCGPGPCGPCGPRCGPGGPCAVPNCGPCGLTMPSGPFVPAPCGPCAPCGPCGPLGNSPCGPCGPCGPCSPPCPYESPECGPCYPCAPTPWNTHCGPVGPCGPQVPCGPSGPC

SEQ ID NO: 2164 - DNA, 2525 bp, DROSOPHILA
gatttttcagacgatcgtaaaatcgcacagatctacttatagtatagacccatatagcatatagctattgcgtagtaattgctgccaaatgcgaatttaaagcgatttaaagactgacaatttgcaggcggaagatagtggatgggacatgtacgtttatatagtttctaattaggaaaagattattatctatgctaagctgatagtgagaagcatagaccttatgggattaatatacatatgtacatgtatgtgaacttttgatttattggtctatcatcttcaattgtttggtctatacggaactgtgtgaacttgaggggtctccgaaattagaaatctactcaattagcttctaatttaagaatgtgcctgtattttcgatcatcaaaggcgtctgactaatttcgaagaaattagcacctggcaagtagtttcttaagatcattttatatgccaatatgcttagtttctgcatttaaatttaacttagtttaagtttaactacaatctctgcaagttcattcacatgcgacctattaaatccccattaccatttgcagttggttataaaaccaacgccgatcggcgattctagcaaattagcgcgataaatctagaccaactagctgagacggagacagttttaagtctctagacacttgagataagattacacttgcagagaaattgagtattttgcacataaatcaagtgcgaacacgacctatgttccaatgagttggaaatgatttaatgccggcctttcaagtacttgatccaagcgctttttaactataaactaatcgggcattgtgattacagttcaccaatttcttatttatatttcacattcgaatttcaagtgttcttttttttaagtactataatgttcttttgagcccattatgcttgaaataatccgttcgattttcatcacaactttcattggaactcctgatctgatggctggtgacattcataggtggtaggtactcacccttgggactctggggaatgaagtcgagggtgcgatccttgcagcgcaaatcctcgccggtgccatcgatccacacgtaggtggcctgaacgatgttctcctgcagcggcagtgaaagatagcgatcgaggatcgtcttgttgatgcgcgcgttgggcgagtcctccaggatcctagcggacatcttgttggcaccaacgccgcaatagtagggtccctggggtccggggaaaccgttcttgggccagcccaatggatggccatcaaagtcgaggaaggtgtactcctgctcaataccgaaccagggctcctctgcggcgcacttgttggccacctccaggcaggtcttgcgcttgttggtgtccgtgggggtgccgtcgaacttgtaggtgtcgcacatcaccaggatgttgttgccgcgccggaacgggtccttgtagatggccaccggatacaggtaggtgtccgagttggatccctcggcctggtagcacgagcttccatcgtagttccaaacgggtagctctgcaagaggcgaacagaaaaatgcaaaaattgggtagggttagtctttggacatttgtgcacgatgggggttaatttgaaaggggtgacctcgtcgctcacttagcatgcgataccctcgaattaaatataattgagggcaattgacttgcgattgcgatgttccgttcgaaagttcacatccccctattttcgaaaccataactcgttaacgtacttttgtaaatccaattgaaaaatgtttacatagcaaaatgatagttactttaaaactggtacagattaaaccccgtcgttctgctataaaatcattaaattcaatcatatatgcacataaaacttgcgttgtggatcgttaggaacttttatttaccttctaaattgtaactagctcgactgtagacttaaaacaaccgtcgaacttcctcatatatcaatttaaatttactttgacaaacaacttacttaatagacttatattttaaagttaagtggagagttagtcatagtacctaatttatatacaaatgagttagtgttattgtgaacacgttttgctcagagggaaagtaatgtatgtattattatattaaatttcatctttagagccctttgtttacgtaactgtaaattcaaatggatgaaacaattgtgcttattaagtttcaaaacgcaagctgcaaccttcccaatttcagaatctcgccttgcatttgatgataatcaaaaaaaaaaaaaaaaagaataaataaataaataaataatgcggcttgtgtgtgagaacagagaaaaattgtcgaaataatcccgaggtgttgggtgacgaatgtttgtttactcgccaaacccttttccccattgcctgttgtttatgataataaatagttaattccccgtatgtaaataatgctaatgaaaatatttcacttatgcaaatcttttgtggggggagtgggggcgttgcattgttgtaacaggcggggggtgaccttgagccagc

SEQ ID NO: 2165 - DNA, 1868 bp, DROSOPHILA
cccactgtatcagctccaagatcgaaactcccaattggaattagagcaaagggctccctccaaacaaaaaaaaaaaaataaaataaaaagagaaaacaacaagagaaaacaacaagataacattctacgcaagtgttaggtgtcaaagttcgcgtctggaattactttcattcaccgttcgggaaatcattaaaatcacacaataagatgcattccgcatgtccgctaggatcctggaggactcgcccaacgcgcgcatcaacaagacgatcctcgatcgctatctttcactgccgctgcaggagaacatcgttcaggccacctacgtgtggatcgatggcaccggcgaggatttgcgctgcaaggatcgcaccctcgacttcattccccagagtcccaaggagctacccgtttggaactacgatggaagctcgtgctaccaggccgagggatccaactcggacacctacctgtatccggtggccatctacaaggacccgttccggcgcggcaacaacatcctggtgatgtgcgacacctacaagttcgacggcacccccacggacaccaacaagcgcaagacctgcctggaggtggccaacaagtgcgccgcagaggagccctggttcggtattgagcaggagtacaccttcctcgactttgatggccatccattgggctggcccaagaacggtttccccggaccccagggaccctactattgcggcgttggtgccaacaaggtctacgcccgcgacattgtggatgcccactatcgcgcctgtctgtacgccggcatcaaggtgtccggcaccaatgccgaggtgatgcccgcccagtgggagttccaggtgggaccctgcgagggcatctccattggtgatgatctctggatggcccgtttcctcttgcatcgcatctccgaggagtttggcattgtgtccactctggatcccaagccgatgcctggcgattggaacggtgctggtgcccacaccaatgtgtcgacgaaggcaatgcgcgaagatggcggcattcgggacattgagaaggcggtggccaagctgtccaagtgccacgagaggcacattcgcgcctacgatcccaagcagggacaggacaatgcccgtcgtctgaccggaaagcacgagacgagctccatcaacgatttcagtgccggcgtggccaatcgcggatgcagcatacgcattcctcgcggcgtcaatgatgatggcaagggctatttcgaggatcgccgccccagctccaactgcgatccctactccgtggtggaggccatcttgcgcaccatctgcctggacgaataggacgggatgggatatgcctatctcccgaattgttgttatcgatttatagcttgttgttaaaccaccttttgatccactgatccaatgacccacgaacaacccgatcaactgaacaccgaacgcgaagttatttgcataacgtaggcttagtttttacctaacgtatttcccataaaccagaactagaaacctaaggcagccccctcctcttgctgatattttcaaagttttttttttcttttttttgtagctgctgttacttaggttttagtatgagttttttttttttgtttgttgaccaatcaaatatatagtaatgtggtcagcgtaatgacgatgaaatgaagaggagcaagaacccaaaaaagacatccccacgaagaagaagaaaaaaaaagataacataaagctctagtatcaaacaattccttgagaccccgcaaaaaaaagaaaacccagccccctacttgttaatgatattaaataattaactttaatcctaaactacatacatatactctctagttaagtaaatgcact

SEQ ID NO: 2166 - protein, 369 aa, DROSOPHILA
MSARILEDSPNARINKTILDRYLSLPLQENIVQATYVWIDGTGEDLRCKDRTLDFIPQSPKELPVWNYDGSSCYQAEGSNSDTYLYPVAIYKDPFRRGNNILVMCDTYKFDGTPTDTNKRKTCLEVANKCAAEEPWFGIEQEYTFLDFDGHPLGWPKNGFPGPQGPYYCGVGANKVYARDIVDAHYRACLYAGIKVSGTNAEVMPAQWEFQVGPCEGISIGDDLWMARFLLHRISEEFGIVSTLDPKPMPGDWNGAGAHTNVSTKAMREDGGIRDIEKAVAKLSKCHERHIRAYDPKQGQDNARRLTGKHETSSINDFSAGVANRGCSIRIPRGVNDDGKGYFEDRRPSSNCDPYSVVEAILRTICLDE

SEQ ID NO: 2167 - DNA, 1758 bp, DROSOPHILA
aattttacggtaattagcagcaattcccatgctattgtagttctattaaaagttaatcgccagcactttacagtgacagcaaaactagttatactagttgcgaactatgatcgaaaatgataccccaccgagctacatggttacaagactaagaatttttcaggtacaactttcactgaaatatagaactccgaaaataatgcattgtaagagaatacaagaaaaattattcagcatgttgataaattcaaattaaatagaagaaaacattttccgaactacctaatctatataatcaatcataaaacccgaaacaaaatcggaatttaaagaacaagattcactcaaatcgatatacccaacctacaaggtatcaactgcttctgttttcaaacccaacccgattgcaaccgatgtcagtatgcaagtgcacctgcagctatcaaaatgcttaaccccgaactcatgtcgctggagaaccaggtgttccgatgctacctgggatggtcggctatattgatactcaagatcttcgccgctggtatttacacgggtctcatgcgcttctttacggccgtaagttatcaaacttatcagttcaatcctgcagtatctacatcgtatctacatgaaaatgggttgagatttgtgtttctacattcacactcgcggtcagttcaagttgacttttatatggacacttgattttagagattgaaaagttagatcgcatgtgagaagggaaaacatattcatataataattttattaatttttatatttttagttaaatctattcgtttattaacgcacaatttagggtattttgtttttgctgccttcccattgtggcctctgctgtattcttcgggcaaaaacactcgcttctcttttcaagcaagcaagcggggcctccgccccgaaattcgcctattcgcttacgccgcaaagagagcttttatttgccggtataaaaaaaaaagcacacgcgagtatcgctcattttatatttcagcgacggccgagcaagttgttgaatcccagaccagacattttacgtactataaagataataaagttatagttaaaacacatacaatggccagccccgtggaactgctaagcctctccaatcccgtcttcaagagtttcaccttttgggtcggagttttggtgatcaaaatgctgctgatgagccttctgacagccatccagcgtttcgtgatccaacagcaccaaagccgaggtaggcgtaactctatatttcagaaattatttcaaaatgcttaaaaaaaaaaacaagaaggactagacctatgtgctcagaaggcggccgaggcgatgacctgcagggccatgtagacggtggcgcccaaggccacgaagaaggcgagggcacgggaaggctggggcaccacgaccacggcgtagaccagtgtgtggacgatgcgggcgatgcccacggcgcggaacaggttgatggccagaaaggcggccggatcagtcaggacgtagagcagaccgatggcgaagaagggcaggatgttctccaggtcgttgcggtgggcacggcgcacacgctccacgttcggatcgtcgaacttgaccttcagcttgggggacatcaggtcctcggggttggcgaaggtctgaaaatgaagataccgattaaagaatcgaaatacataaaattaggaatgtcatgcgcattcatatgcatctttttattgtttttccatttgaatttcgtatcgtttt

SEQ ID NO: 2168 - DNA, 649 bp, DROSOPHILA
cattttatatttcagcgacggccgagcaagttgttgaatcccagaccagacattttacgtactataaagataataaagttatagttaaaacacatacaatggccagccccgtggaactgctaagcctctccaatcccgtcttcaagagtttcaccttttgggtcggagttttggtgatcaaaatgctgctgatgagccttctgacagccatccagcgtttcaccttcgccaaccccgaggacctgatgtcccccaagctgaaggtcaagttcgacgatccgaacgtggagcgtgtgcgccgtgcccaccgcaacgacctggagaacatcctgcccttcttcgccatcggtctgctctacgtcctgactgatccggccgcctttctggccatcaacctgttccgcgccgtgggcatcgcccgcatcgtccacacactggtctacgccgtggtcgtggtgccccagccttcccgtgccctcgccttcttcgtggccttgggcgccaccgtctacatggccctgcaggtcatcgcctcggccgccttctgagcacataggtctagtccttcttgtttttttttttaagcattttgaaataatttctgaaatatagagttacgcctacctcggctttggtgctgttggatcac

SEQ ID NO: 2169 - protein, 149 aa, DROSOPHILA
MASPVELLSLSNPVFKSFTFWVGVLVIKMLLMSLLTAIQRFTFANPEDLMSPKLKVKFDDPNVERVRRAHRNDLENILPFFAIGLLYVLTDPAAFLAINLFRAVGIARIVHTLVYAVVVVPQPSRALAFFVALGATVYMALQVIASAAF

SEQ ID NO: 2170 - DNA, 3915 bp, DROSOPHILA
ccacgcggcgttccattagactaggacccatggatacgccgccggttcttggctgaaattgaggagcagctgggtcatcatcggtctcggagtcgctgttctcgtcgaagatggagggcctttcgactcgttttagaggtactttcttctgttggccgggtaaaataaggccatatctgcacggtgttgaaacgggtccttaaaaaactgctcaaattgtttatttttaacaaattacttactgttttgccattcttgtttatttatgaataattagtatgaccgtctgaagcgaccacaaaaatccctcaatggtgcaaaactgctgacagcaacgctttaccggctaaaagaaccgttgtatatcgataggaggaccattcgatagtattaagataatagtttgaaacacggatagtatcacaaaattcgttatttcaatgtgaaactactttaaaacttgtgctttaatcaacttgtatttaattgtgtttcaatggaccaatcattactttattttctgttttattgccaaaccaaggctcttaccccttgaaatcatgttagtgcaactctagagacgtaaaatacacatacaaatatggcgaaatattgaaacaaattaaaataaatttaaatataaataaattgttatgttaataaagcgtttaattatcacttaaggcctgctgttttttttttatttatttttttacgccaatggaaacatcggtccttagtctggctacgcagaaaaatatagacgggatcatgatgctcggggggatcagagaaatatcaaagattacttctgaagccgttcaagtctattcacatgcatagtggcagttgggctccaaataattggaagcgattttagtcaagccagcaaccgcggcctgcgtccggctaactatcgataggcacgttgagcgtagacacattcgacaaacgcggccacactgttctgcgtctttttccttccgtttccctttcttttccctttttcacgtttgcgtgagtacgtgtactccgagttttgttcaacaaaattgtatttaactctcttttatttcctctatttgcagcggtcgtgtaaaacagtttttgcaaacaaatccaggtaaatgccgcttccattggacccgttttaagcgcgaaaattcagccagattagattggcggcgatcgccggccgaaacatgtgcaaatccacccaactccgttttttttattacccatttttttttactgtgggccaatgtgccaaaactgatcagtttaccgtgtaaacaatgcatgaaatgcctcgctacatgcgctatatatatgtatttttttggttataatttttttaatgtgcaaacgaatatgaagtgaaaaattggccaaagtgtgtggcacagtgttgttgtgcatgtgtgggtgggtgtgagcggctttaaattgtggcaaaaagttgggcattcagttgaatcgaatgcacgaccgaaaaccggctaaattaaacaaatttttacgcagtttagttggtaaacttacccgaaatagttgttgtttacagccacttgtacgcacacacacacagccgcagaaacacagacagtatcatttttttttctttgctattttgcacgtgttttacttgctgtttctgcttctttttttattcaatgttccgttcctcgctgatttaaaaagtgaagtaaaaaactgttaaaaatcataatcaatattaaaaaacgattcgtcgtctgtccgcgtgaatttccgaaaaggcgccacgcctcctgccctccagaaatctagagtattataatagtagccacttttattgaatactttattatgctcataatggttcatatgtgttagggaaacctttttccaataagtcatatgccacacttgtataggctccataagttgatatgttttgtttaggtggtcaattgatctgttcttgtagtacacatagttttacgtacttttcaagttagtttttcatttaatagggcttaagctttgttagccaacctcatagtactacttatatagtagttatatgcaatttagtgagatacttttttttagtaggctctgagcacgttttgcttggttttgtagactgattttatagagcaatgggggtggcaaagtctgcactttcgattaaagcccaagacatcatctttttttttctgtgattattgcctcttgactaattgtgttcccgaacattttgcagccatggtgcgtatgaacgtattggccgatgccttgaagtgcataaacaacgccgagaagcgtggcaagcggcaggtgctgctgcgtccctgctccaaggtgatcatcaagttcctgaccgtgatgatgaagcatggctatatcggcgaattcgagatcgtcgacgatcatcgttccggcaagatcgttgtcaacctgaccggtaggctaaacaagtgcggcgtcatctcgccccgcttcgatgtgcccatcaacgacatcgagaaatggaccaacaatctgttgccctcgcgtcagtttggttacgttgtgctcaccacctctggcggcatcatggaccacgaggaggctaggagaaaacatttgggaggcaaaattctcggcttcttcttctagagaaaccaagttcgcatcgtagagagtctgtatgtgctgctaaggagtttgatatgtagattgacgttttatttcaccgaccatgcaaccaactatgtactttgtgcacaggaaacaaggggcgaaaacgctgctacgttcattcagaaaacaaacgacgatgaatgttcacaaagttacgcgaaataaaatgattgatacataataattttaataacgattttgtctacgatccatatactatgttaagcggtacagtgataaatcaatagcgacagtaaaacgatctgttaacataaaacccaatttgtgtataatataacctcgaccggagttacttatagctggatattgtcaattttatggctgaaatcaagacaattaggatgttaagaacgcgccatgcggtttcttttgaggtgcttaaaacacggttacgtgctttccataatgaaagtaagggccaattgttcccactcttgacaccttaaagccaaaaatgattagaccatcatagttttggtattcccacctaggtttcttattatttgttagaacttcttcaccaagaaaacctcaattactgtcaaaaattgtttatgaagcaaataatgcttgttagaatttgttgtagtttctatagaacaaaatgtacatgtaaaacgtacatttacatgcttcttcaggttttcaactgttttccagcacaagttccgaatttatgctgtagataactgctgcaatttttgagtaaaaatttgttttaattatgataaagtgtattcactcgatgagtcaaatttgatgttatctcaagttatccctagggagtactaggttttttatgaacgggtgttgggtttgtgatattcgtttttaggcattacttgttatcaacacttaaagtttttgcgggcaaattgcagccctcgagttcagtgctgcaaaactcgtcacaaacgcagctcaactaattttcgaatcgtatccagcactatatattcattaaaaatccattgcatactttgtggctcatttgaaattgactgactgttagattcgaattgatggcacttggaaattcaattatccgatcagtatcctgacccaaatgagtctcctgtctagagacaattggcattattaagtacaattacattttatatcgactaccgatcgatatcgccgttgcgtgcggcttagaacaaatataattgatgagcagcccacgcagcgttatctatgtacttcatatttgtgggagaccccaac

SEQ ID NO: 2171 - DNA, 723 bp, DROSOPHILA
ccctttttcacgtttgcgtgacggtcgtgtaaaacagtttttgcaaacaaatccagccatggtgcgtatgaacgtattggccgatgccttgaagtgcataaacaacgccgagaagcgtggcaagcggcaggtgctgctgcgtccctgctccaaggtgatcatcaagttcctgaccgtgatgatgaagcatggctatatcggcgaattcgagatcgtcgacgatcatcgttccggcaagatcgttgtcaacctgaccggtaggctaaacaagtgcggcgtcatctcgccccgcttcgatgtgcccatcaacgacatcgagaaatggaccaacaatctgttgccctcgcgtcagtttggttacgttgtgctcaccacctctggcggcatcatggaccacgaggaggctaggagaaaacatttgggaggcaaaattctcggcttcttcttctagagaaaccaagttcgcatcgtagagagtctgtatgtgctgctaaggagtttgatatgtagattgacgttttatttcaccgaccatgcaaccaactatgtactttgtgcacaggaaacaaggggcgaaaacgctgctacgttcattcagaaaacaaacgacgatgaatgttcacaaagttacgcgaaataaaatgattgatacataataattttaataacgattttgtctacgatccatatactatgttaagcggtacagtgataaatcaatag

SEQ ID NO: 2172 - protein, 130 aa, DROSOPHILA
MVRMNVLADALKCINNAEKRGKRQVLLRPCSKVIIKFLTVMMKHGYIGEFEIVDDHRSGKIVVNLTGRLNKCGVISPRFDVPINDIEKWTNNLLPSRQFGYVVLTTSGGIMDHEEARRKHLGGKILGFFF

SEQ ID NO: 2173 - DNA, 13518 bp, DROSOPHILA
tttgctaaagtcgttatgaaataataatcgatatttcaattccacccatttgttaaacttccagcgaagtttgatcgaaaataagttctcatgggaatttaaattgattagtcatatttttggtaatgaagctggaaactttcgatttacattaaatgatagatccgtcaaaagatcacctcatttttagtaccatcttttttttttacataagccccttgtatcacatcttgcaccttatcaatgccagacttcttccgctatatttgagttccctgcgaatttttatcgctgcttacatgtcaattatggcattagctttacaactagaaccgaacaatagtgctttgacaatatcgaggcgcccatataaacagcgattgcttggcaaacaccaaaagtctggacatcaagtgtgtgcagatcaaacacggtatatggatatggagaataaaatccggaggataaaacattgattattccccagatagaggtacatatatcgcgactattacgaccgtggcaacataattttacagccactaattgcataatacacacgcatctccgcaattacttaattagccaacggcaattgcaattaaagtacatacaaatcgaaagcgggccataaaggaaaaggggttttcttggccaagatattacgacaaactgcatacctggctcaatggggcgtggccacctgcctgccagccatcgcagaccggtgcgaaagagacggagcaccagacagacggagatagcggtagtcaagcactcaggccatcttgaatttcgaccgagcaacggaaatgagggttaaaaacgcccaagtaaaggcactgctcgtgcgctagaaagagacaactagtgagtgccgactgcggtggttgttttttttgagcctctctgcctgtttatctgattttccactgctttgagttttttatcagtcgagtcttgctctacgtttcagtacgtgttcgacctgcatactgagttgacgtcgccacgcacggaataacatttcaaattagtagattagccctgcaaaacaaaaatccatctcgtgagtgagtgctgaaaaatagcgtttcgaaatattatcgatatctcggtcgtatgttactgtgctcccaaaaaacacatcaccagccagtgataactgtaaagattgacaaagcaaaatatatccattataacccaaactgaaactccagaaaatgtgcaactaaaacatattggccatcaaagtgataagacttagagattaacgccggattattggacaccggaccgagcactgggactatcttcggagaaagcgcacctaatctaacctcaaaatggtttcgcactactacaacacactgccctacacacaaaagcacagtgccgccaatttggcctatgcctcagcggcgggccagccatggaactggacgcccaactaccaccacacgccgccgaaccaccagttcctgggcgatgtggactcctcgcatgccgcccaccacgcggccgctgcccaccagatgtactacaactcccatcacatgttccactcggcggcggcggcctctgccggggagtggcactcacccgcctcgagcacggcggataacttcgttcagaatgtgcccacgtcggcccaccagctgatgcagcagcaccaccatcatcacgcccatgcctccagcagttccgccagttccgggagcagcagtagcggtggtgcaccgggtgcgccccagctcaacgagaccaacagcagcatcggcgtcggaggagcaggcggtggcggtggtgttggcggggccaccgatggaggaccaggttccgcaccacccaaccatcagcagcacatcgccgaaggtctgccgtcgccaccgattaccgtttcgggctcggaaatctctagcccgggggcgccgacttctgcctcgtcgccgcatcatcacttggcacaccatttgagtgccgtcgccaacaacaacaacaacaacaacaacaacaacaatagcccatccacccataacaacaacaacaataacaattcggtgagcaacaacaacaggacatcgccatcgaagccgccatacttcgactggatgaagaagcccgcctatccagcacaaccacaaccaggtgagtccttagagacccaagaatatattaaatacagatttagtgttttatgagggggtatgatcggttacttcataactttatgagtaaggctaataacctgcttttactgcaaagttaaggtctatgcttgccattgtcactagcttgtatgagttttttttttttaatcgaatgtgaaataagatcttactcaccgaaggcttttagtccgaaagacctcgattacccgaatttttgtgtattcagctacttagtcattccactgaccttcgattccgcgtaccctgcgcttgggtttctcccgcatccgcctggctacattccgaacccgaagattccatattgcccagcacataatgcactgcattgtcttcccgccaagctcgtgctgttcgcgcttttccctgtccatctctcacggtacatatatgggcttttataagaatccgtttgcctggcgcgcatccaagtccaaatggccaattagctcataaaaatcaaattctgttcaagcttcacttttatgatattcagttggggtcgcgagatccccgatccgacgccttgatttatggccaccccgtgttcaccgtccacatgagtgtttctgtttgtttgctccactctgtctccgtctcgattccgattccattgactaattttgtatcgtaaatcaacttaacaactataagcatttgaaaatggtttgatcaacttaccaataaccagacagcatttgatggaaagtccatcagagtagaggactggactgtaaaggcttaggaaagttagggagttcggaacctatttcacagcaattagcattatgtggagtgtctaattgaaggtttcactattttctaaaaatagtgaatattctgaataataagtgaataatacccaattcgactctcttctctcagttcatgcaaattttctgtgattatgtggatttcttgcgttttgtttgctgtgttttcctacacctctggaaaaacaagcaaaggcaattcagatggcagtgcagcgatctcaaacatgagaaggaataaaccactcacacatttgttcacgatttatgacccgggcgcatgtcaagaaggggaaaatgaagacgacgatatcgacgatatcgacaataacgccgatatccattaagcccataaaatctgttggcatgcaattagcgtttatggccgctaatccagctgatcaagccgacaaggcgactcaagtttgccttatttattattattcaaaaccccctttagcctccgctgtctgaatgtcacctttctgacgcgcgactgattgtaattcttgccgtatttcatttgcctaaaaagcacaaatatttaagtaagaataaatattatataaaaataaagttagatattatttacagccactatgagcgatcagcagcaccttttgccaacactttgctcaggtattatctctctggcattttctttgaattgatggtctcgccaaatcgagtaataattagtaatctgccttttccaacagaagagaagaggggggctgtgactaacacttcgtgatttttgatagaattataaaaggtccattttccgttgtctgcgcggcatgtggcggcatgtggcggcagggcacgtcgaaggcccacttcagctttcggggtgtggcaataaaacggcaaccacgattgtcgctggatgcagatgccgtgtacttttgtttcaatggctggtggttcgggcgggtttttcgattagattagctagcgtggggaatcaaataaacgcccgccctgtcaataagtcctgaaaaccccacccaacccatggggctgcgagttctattttctgttgcttcaataatgtgccgagtgatatggaaacgtggccacaaaaaaaaaaaaaaaaagagttctttgcgtgttatctaaaacgtcaaaagcgttgttgataagcgattccgctgcgtttgcgacgggcatattgattaaaacaatatagggtcgtaaaccaataaaaattagtattacttccaataaaaactaaatagcgacatttacgatcaaatctatgcaatcattattaaacggcaagaaatttaagtgtccatagttcagaaaaggatagttccaacaattctggtttgccaaagttggctaaagtatccaaccaattgtatcagttatccaatgttgcccaaataaggctcctcattctttgatccttcgattggccaacatctcattgcattgaacgcacttagcaatacatttttgcttattagctgtccgtaatttattgtcgttataatttctccggagaaccaaatgtatctaggggcccaaggagttcttactgggattgtctgtagattttcagcattgcccgtgttgggacataaaaactaatgccacctgacacattgagatttaatgtgtcaatatgcacagaaaatttatatctagccacataaataatcgaaaaagagagagagagagagagagagaaggaatatatggcgggcttggatttatattgctttcccgacgcatctgaaaagtgttgtactgctccaccggcgcggatgggatacctttgtggtccgattttggtctgggtcccgctccgagtaccagtaccgttcccggtcccaagataagccatcgaaaatggccactagctgcagtggaaatatgtttggttcggtttccttatcagcactatcgctgtttgccgatgacatttacccttcccgttcacccgtccaaagtttcctcctccgctcctgcacgggtcaaaaatgaagtcgatttttggctgcgactgatctacgtggagtgtgcgtttggatcggtgattgacatgatgggattagcattggaactcgctggccaggccgtcccatctccctgtccgtttgtcacggacttgttaccaatgtgtcgtttgctctgggcttagttgtccaaataatagaatagaatcgtgtttgggttttcctgctctatttgtattggccctgatattggtaataaccagaaattcgagtcttgtcccaaagccctgcgcacacagccgtatatatgtccatatacgcataggtctccactttcgtgtacatgtttttgatataccattcgaggcgtatcgagtttatattggaggcgctagggattccgggggcttaaattggggttacggacagcttactcaacggagtgataaattaaaatggtagctgttcaaaatgggtgcgaaatgtgtcggacgatgtgttatttattaatggaaattggcgcattttattttgatgaattataaaacaatgtagaatgtaaagaccatggaaactaatttaaactactgtacaatccatttggaaatctttgcctcaagttattttatcaatgaaagtaaacagcaaagagagagtccagaaactgtaaattatagccacgtttcctgttcgccataaaccataattccataatgggaatactgcgatgtacatatgtacatagttcgtatcgggaaaacgaggcgaaagccttttgtttggggggcaacttggccaagtgacagggaaatccgattgtcaatcaacgaggtccgcctgaattatgacaacacaaaacgttgcaatgatgatggctcggacggacggatgacacctgctagtgtctcaggccaaaggcaacccgcgattgtatgattgagtagctgactgattgaagtttaaggcttgatgattgtggagtgggaggcggcagcgaattctgattcaatttcgagtcgtttggcgattccttttatgaggtgacaacatttacgatacggtagcaaaaacggaaagaaagatttgtatgtatatggccggtggccaacgttaatcgcttaacaatacaataaagtagcaataattataaaaactaaatgaaatgccccgccatcgtataaatgacccacaaccatgaatgaaccagtgcgcgcgaatatatatgattgccatatttgtgatttttatgcccgactttgattaggatgattatacgcttgatgagcccgcggattactattgcccttcttgtttggactgtaggtatctcggtggtatatggtgctcgccaactgtgccacatatgtacttacatatattcccttccgattctgtttgcgcctgccgcatttgctcagtttcacctcggagttcaggcaaatattgttgcacactgacccgaaccccctgcctgggccaaaaaacactgagataacggttagggggcgggggggggggggggggccggagaatcgggtggggaatggctggggaaatttatagtgcttcctcggcgcagccgtaagaatttattgcacattattttgtctaatagttttatgaagcgcaaatttactttcaataatgtgggcttcagtgggcttttaagtatttattgtggctgtagtgatcaatgggttgatactgatttaaagcggttatatgattttatttggttggggctgaagctgcgaaagtggctccatttcttaactcaagaacttatcgctaagtaagaaatgttttaaataacttgtatactctcattgatgaacacagaatctaatcccatgtataattcccgtcgaatcgcagacctgagcagctcgcccaacttagaggatctgagtgatttgctggacgcaagcggtaggagtcgcatccacagtctggatattttccatttattactaaaaaaaactatagttaactttcctttgttgcctctaatgcgatttttgtgtttttcgttttgatgcatgcaatttttttgatttgcgactgagtggggaaggtcgtaaagacccccctccgcctcatcctactcatattccccaaatcatatagccataaactttattgcgcttgcatcgtcgtggcaaataattaacgtacatttgaaaataatttttagtggcctaagaaaaaaaaatactaccccccttccttttcatcatttcttgctgtattcctcgccgcatctttctattgcctgacttggcgtatttatggctttaatggcatctcattcaggccataagcaggccgcaattttcccttcgatggccgccattttttccagccacatcggcctctctctctcacctcgcctccgtctcgctcgctcactcgctcgctctgcatctgctcctccgtttgagccataaataaagcgagctctgagtcagacttggactaaagctggaggtttttcggggagccatcgctgccactccattggcgtgccacggggttgcgtgccgcgcatatatatgtcggatatatgtttattcgtatgtacgtatatatatgtacatctgggcacgtacgagcggcattcgtttgttgcacgcgatctgatattatgattatatccactccgcctcgtttcttaccccattcgcatttatggggctgcgtgtcagcgtgatcaaatgaggaggaggaggaggaggaggaggaggaggagggaccggaatttatatctgggagtggtctccacagaggaaaacttggagaagaactcacatttgcatatgtatgtctgcctgccatataacgtgtttgcatgtcgcatgtttcattatgacggtggccattttggctttccgtctgtggtacgaacttaactttatttttggatactctttaatgttactcttgatgtaaaagattcgtaatgcctaggctaagaacctttttctattcaaatatcaccattctatatacacacgaaatacctctaatcctcataaaacaaagcaatcacttatccttatcggctaaacttacaatttgaaaacttaatctgtttgcaagacaaagggtaaagacgaccctattatcccaaccttcccccaaggacaccgggtaccgttacagtaggcttagcccagaaaaggaagaaagaaggaaaaataaacgtcaaatcgaatcaaatgattttatgatgtaatttgagctaatatttacgatataagagcagctaaaacagcagcaaaatgccaaataaatgttattgttatattgtcgctcggtggtgagagccaaaaagacatatataagccccatcctacaagtattccacgtttatgatgctggtggatggcggatggtggatggtggatggaggatggtggaaagacaaaacaaaagcagagcaaaacaagtggaaacaaagaaaagccaaatattcgcaaaagtctttaagctgggcgaaatggctggggggaacttccagcagcgaaatggggtgtcaaaaagtcaagtgttgaggtttgtgtgtccaaatctccggggtgccattgacgaaattgctctttccgctggcgttcgaggacttcctccacgccacaagactatcgctttaatattcaggcagaaaaaccgcttaaattcgagcggagctgacttatggaaagccaggtaataaatgtctcccaataggttttcacgggttggaccagagacaacaatccgaaatcaggatgtcacgggggtgatgtcttcagcactcagtgacaaattaacgcccagcggggtggcggagaaaacaccatgaccaggacacagcatctgcggatgcttccaccaccatcagagaccgtggctaaccgcagtggtggcatcagttacccaactgcaacttgtccttggccactgatttttccccggggggcggaccacataattgcacagcaatcaacagctgttctaatgggaaacagaccagaccagacctcctcagtccgctacaatttatggccaaatgatccttgctcttgctctacttcagctgtttggacaattcttctttgtcggcatgcgaagttaagacagcacttgggccaattgactccgccggcggaattgccgctgtttggcctggaattactactgaatgcacttagcgatgcctgtaatcacattctgcccagcacattctggttaccttggttggtatgagagcacttcggcaatgatttcgcacagtgctgcctgcgtgtgatcacagaaccatctgaatccaaccaactacccccaagaacgttcgatgagtggggaacagccactaaagcttatcgggacaaatgtccaacgatccccgagctctacagtttgtaactccgtcgatattattgatacagacctcaactgggattagtagtgcgtacgctggccgctcttagaactttgccgacgggcaaagccggctgaataatctatagttacatgtggcaggcgtacattgcggtgcaaacaccacaaaagcattagcagttcaaatcagactctcaattggttcgacttaggaacgaactccattcgatataaattacgctgcgttggggcccagcgacaaagccataaaaaatgtcacaccttgacgcacaattctatttaattgctagtaaaataagcggagtactatatatgatgtatgcatgtattatacatatgtatataacggatggatatcccagatatctacgaggcggattttcgagctcaattgtttgcagaagtgacggggactttcagattttttgccattcattcgcaatcttatcatcttcctggcaaagaggcgagtggagatcgcagtaggatcttagaggttcagacaacgcagctttagcattaggatcaagttgatccacacccatcgtttgtcttgccccgtttattaacgccataaaacactcagctcgctggtatggtggcttatagtcgtgcagatacgtatgtatgtacgatttattagattatggccgtgaaggtcagcggagccaggcacccgcgcccgcacccgtgaaccgcccactgccctgctccagtttgtccccgattccgtgcggatttgcttatgtttgccctccgtttaaggtgtgagaagtgggagcctccaagtggcaaccagataaagtcttagatagagataaggtggccacgctgtggtgcagcctcttggggaatgttgtgatccacagaagttaactggaaattgggtcgcagtgagagagaagttgaagatgtcaatgttagacactcgactagcttacaacagttgttcaaagtggcagagttcaagcgataattctactcttttatgtaaccccatctaaggcagatatcccaccttactcatagtttacttcacattgcgaaatcagccgaaaattctctactactatttacccggtaaatcctatgagctgataatactgttgttctaatttagccatttttatttgtgcacttcctcaaatccgtcagctctgtctgaacaagttattttttgtgtacgcgccggactgttcggggagcccagccctctttatcagtagatttggaggcccaagaacgcacgcgcaaggagattttcccaacgaaagcaccaaaatggcaaggcggcagactggaaatcgtagatttatagtgcgaagcgaaaaatctagattgagtgggctttaacattgctcctcggctgagttcttcttgctgctgcgattgccacattagactaagcaaacgagaagccacggcgacagcaataaattcacgtccaaataaagtgtaaagaacaaacagaagagtgggggagataaggggactggggaaatggtttagcggggcttaccaaaaagagttatagtattcttgacgcatttcttcccgcgaaagatacactctcagcatttcttctgccgaaagatacactctcagcaatttcttcttcttcgatttcgaaactcaagaagaggattcagctgaattggtagcaattctcgaaagagctcatatccccaggcccattatgaatgcataactagacggatttggtcagtggccatatatcatctatcgcagggcattccgaggtcttcaacacctactcctggcactcttggcactcttcgcctatcttctgccgttgctgttgaactttatcatctgtgaaaatatttgcttgtttgcctatttgctcaattttaattgtgagaacaccacggtatcgctgcacataaaaaattagagcaaatccccgggccgaaatgctgtttacccacaagtatttcccgctggcgtgggtgtgtttatcacgtacgtagactgtgccacgatcccgtggcctttttcatgccttcggagatgagttctccggctagcgttgtctagcgttggctcattccatggccgctgcctgtggggatccgtcatttgttcgagttctatttgagttctgattgactaattgcgcagcccagcgccacgttgcccgccacagcgattcttcggagaatcgtggctcccagagtcgtcggcttttgtgagtgattttgatgtgaaccgcttcgactgggactgctcctccaatctcgccgctcggcatgtgacagccttctatggctatcataatttaaatattgtcatctgctatagcaagatgagctggaacatgttgcacatgaggagcaacatgtttgtccacctgacgccagtcactccactcgcttggcacccacatcagctggcaaacttggccgacagcttcggccctctgacgacagaaatcgcacatgatctctggaggagatcttgacttttcgctagttaagtggtgaacgcagttttcgaatccactggtttttaagaagaataaccatgaatcctttcgatcattttatttttaaatgcaagttgaatgatttttgttatccttctaaatggtttgattagtgataaattagtttttgcatgttagaaatgccttcttgacaagcgtttttttcaactcaactaacatatctctcatctcttttgcaggcaaaacccgcaccaaggataagtaccgcgtggtgtacaccgacttccagcgcctggagctggagaaggagtactgcacctcccgctacatcaccatccggcggaagagcgagctcgcccagacgctgtcgctgtcggagcgccaggttaagatctggttccagaaccgccgcgccaaggagcgcaagcagaacaagaagggtagcgatccgaacgtgatgggcgtgggagtgcagcatgcggactacagccagctgctggacgccaaagcgaagctggagccgggcctgcacctgtcccactcgctggcccactcgatgaaccccatggcggcgatgaacattcccgccatgcgcctgcatccccacctggccgcccacagccactccttggcggcggtggcggcgcactcacaccagctgcagcagcagcacagtgcgcagatgtccgctgcggcggcagtgggcacgctctcgatgtgacacgaccattcctgttatgcggcgagcggcgacagtaacaactacatggagccccatcatccgctgctgggtggtagcgagcggggtggagtaggaggcgtaggaggcgtaggaggaggaggcggacaaccgtgcgatgtgtccttcagtgctcccgctctcgccttggacttggcttaacccttaggtcgcgcagtcagactgtttcgaccgaaccgaaaagttaataggcagccggacgaatggaggacttggcggccgttgcacctggaatattgcacgttgttaatttttgtgattgtatattcctggtttcgacacgcgccagagtcctcacagctaaacaagtcttatattattcttgtattatgtttgttttttgttcaacgtgtgtagtagcttaaagtaaaatgaatagctcgtaagcagtagtaagtaaagttgcccgagaaaaacaagaacaattcaaaccagccgtcccagccgattaacgtttaaaagtactcgctgcagttaaacataattttagtacaagcaactcattttagagcgcaacttgattcttcagcccgtgtaaatagccgcatatataaagagttttaacgtttattacttttatgtatcgtaataacaattagccgtagttaatatagccgtactaaatgttaaatgtaacgcactcttcgagcacacaagcaaaattaccatttaaataaataattttaacgtattcacccgcatctttacttagttcaatttggcggcaattaatttataacttgtgaatgtgtacgtgtgtatatgtatgtgcatagctatttaaataaaatatgaacaccatagataaagcaactcaatggaacttcaatttcttactggggttaataagggttaacgttcacagctacgctccacctaccaaaagcaacaacaacaacaagtgcggcaaacgtcaatcaactaatcggcccttctctttacccaatcgttcgcctcctca

SEQ ID NO: 2174 - DNA, 1630 bp, DROSOPHILA
ttgacgtcgccacgcacggaataacatttcaaattagtagattagccctgcaaaacaaaaatccatctcgtgagtgagtgctgaaaaatagcgtttcgaaatattatcgatatctcggtcgtatgttactgtgctcccaaaaaacacatcaccagccagtgataactgtaaagattgacaaagcaaaatatatccattataacccaaactgaaactccagaaaatgtgcaactaaaacatattggccatcaaagtgataagacttagagattaacgccggattattggacaccggaccgagcactgggactatcttcggagaaagcgcacctaatctaacctcaaaatggtttcgcactactacaacacactgccctacacacaaaagcacagtgccgccaatttggcctatgcctcagcggcgggccagccatggaactggacgcccaactaccaccacacgccgccgaaccaccagttcctgggcgatgtggactcctcgcatgccgcccaccacgcggccgctgcccaccagatgtactacaactcccatcacatgttccactcggcggcggcggcctctgccggggagtggcactcacccgcctcgagcacggcggataacttcgttcagaatgtgcccacgtcggcccaccagctgatgcagcagcaccaccatcatcacgcccatgcctccagcagttccgccagttccgggagcagcagtagcggtggtgcaccgggtgcgccccagctcaacgagaccaacagcagcatcggcgtcggaggagcaggcggtggcggtggtgttggcggggccaccgatggaggaccaggttccgcaccacccaaccatcagcagcacatcgccgaaggtctgccgtcgccaccgattaccgtttcgggctcggaaatctctagcccgggggcgccgacttctgcctcgtcgccgcatcatcacttggcacaccatttgagtgccgtcgccaacaacaacaacaacaacaacaacaacaacaatagcccatccacccataacaacaacaacaataacaattcggtgagcaacaacaacaggacatcgccatcgaagccgccatacttcgactggatgaagaagcccgcctatccagcacaaccacaaccaggcaaaacccgcaccaaggataagtaccgcgtggtgtacaccgacttccagcgcctggagctggagaaggagtactgcacctcccgctacatcaccatccggcggaagagcgagctcgcccagacgctgtcgctgtcggagcgccaggttaagatctggttccagaaccgccgcgccaaggagcgcaagcagaacaagaagggtagcgatccgaacgtgatgggcgtgggagtgcagcatgcggactacagccagctgctggacgccaaagcgaagctggagccgggcctgcacctgtcccactcgctggcccactcgatgaaccccatggcggcgatgaacattcccgccatgcgcctgcatccccacctggccgcccacagccactccttggcggcggtggcggcgcactcacaccagctgcagcagcagcacagtgcgcagatgtccgctgcggcggcagtgggcacgctctcgatgtga

SEQ ID NO: 2175 - protein, 427 aa, DROSOPHILA
MVSHYYNTLPYTQKHSAANLAYASAAGQPWNWTPNYHHTPPNHQFLGDVDSSHAAHHAAAAHQMYYNSHHMFHSAAAASAGEWHSPASSTADNFVQNVPTSAHQLMQQHHHHHAHASSSSASSGSSSSGGAPGAPQLNETNSSIGVGGAGGGGGVGGATDGGPGSAPPNHQQHIAEGLPSPPITVSGSEISSPGAPTSASSPHHHLAHHLSAVANNNNNNNNNNNSPSTHNNNNNNNSVSNNNRTSPSKPPYFDWMKKPAYPAQPQPGKTRTKDKYRVVYTDFQRLELEKEYCTSRYITIRRKSELAQTLSLSERQVKIWFQNRRAKERKQNKKGSDPNVMGVGVQHADYSQLLDAKAKLEPGLHLSHSLAHSMNPMAAMNIPAMRLHPHLAAHSHSLAAVAAHSHQLQQQHSAQMSAAAAVGTLSM

SEQ ID NO: 2176 - DNA, 3436 bp, DROSOPHILA
tacggccaaaagtgttgactgtctttgattttgtttgtctgcccgcctgcctggccaactcgctctctcaactcccccgaccagacatcgctgcccagggggaaaggactaacaccagcaattacacacagttttgtcaatcgagcaaaagttcagaggaatgcgcgcataatcagcaaatgaatcataaaccagatggaggaccatttgctcattacggcttgtaggtccaatgctgttgtaattacacggggaaaaacatgatgaaatagcattagttataagatatctgaaacaatgcccaaaataatgcaataccatctttcagatttatttaatatagcaataatacttaacacttatagttcttaaatctttttcgttgcgtgtacagcagagcctgttagcaaacgcattgtggctacaaacaaattacaaaatcggctaaacttaagccgccgtgttgcgtgcagtttatgactaaagagccgacggcggatgcgctgaaatcccggtcactgcaattggctttttcccaaccgcactcacgtgcagtctccacacacacacacacacgggatcacacatcggtggtgggcggtggggcaaagccctgcctgtctatcggccaaaacaaagttaaatcggccaaatcctttgaccacgtcacacttttatacataatcgttcgtcgagcacgtgcagacaaccgcaatgttgtgcgaggatggcaaaaaaaaaaaataataaaaacataaaaaaggacaacaaaaagctcacacaaaaacaacgagagcaaattacaggggcggacagcgggcgacagcaaatattacgtatacgtgcgttcaatgtcctgatggcgttgcaagcaaggccaataatgcaaaaggcattaacaggcgcaggcactggttttccatagcagttattgccattaacatggcttaattagccaactggctgtaacaacaccggcttaaagcataattgtaaatatttccggagttaaacaaacccgaacgactgaaccactgaataatgaaagcccggaaagctaggccagggatctgagtagcgttacataggatatagcagtgcgcacaatctgtgggtgaaaaaggaagtgcaattaataaatatattagttgaaagtcggtaattaatagtatgaattaatcattcacttgaggtgtctttttggacacttttataaacgctttactcaccgtgatgagcgtctcccgattggcctcgaagaagtaaccatcgatgggacatcccaaactcgatcgcatcatggcaatttttaaggagcttacaagctgcaggttttcctgcagcagatggggccagctggactcgtagatggcctggccaaatagctgacactccgaatggatgctcgatccgcagaagcagtatatagacacctggccaacaactgctgccgtaaatgcggcatagaagagtaacgctggctgcaggatattggcagacagttggtagcacaggacacacaagtgcagtgaggctgccacaaactggcagatgagcggtctgaaatattcgtttaagaaatggcccaggttcaaacacaacgcatatagttgaaacacgtgctttaagttctcatgagtctctttggtatttctgccctcaaagtgcatcattttgtgcctggcaatctggaatagggcacagagattatggctcagagaacagaacagtgtgtccacacaaacggtgggcagtgccacgcccaatgcagcacacacattccagaaataggaaatgatgtagttggacagcttcatattgtcccagggatatctgcagaaactgtatcttaatattctggatattaagcagtactttttcttacacactgggaaatggaaatttcggctgcaattcacctgttcgtggtagctaatcagcatggatagaggggacatcaggcaggccgaaaggccagccgtaatgaaacagtaggcatacatagcactgatgaactgatcccgacgactttccctggtcactatcatttcagcgacagcggtgtgggtttctattataataggaaatagagtttatacaatgcatctcaataatagatagcttacccgtttgcaaaacacaatagaactgccctattaggaacttgaagtccttgtaaagccaaaggaaaagcccgattttgcacagggccagcaaatccacgagaaccgagcagagtgagtcggttaattgctccacattttggacgttttgcaggccaaacgcaatggtcaggggcatgaaactggccaccgagagaatgcagcagatgctgcgccaaggatatcgatggccaacatcctgctcgtgcaacaattcgagtccgagaaggcgaaataaagcggactgcagtcggaggaacttgtccgtcagcatgtcgaatgagaagtgagtgagtcctcctaatgggaagtgtagctcactggaggtttgtgctcattagcggcttagtaaaatcaataagccattaaagcgagcaacctataattgtatttaatatttaaattcgagtgccatgaccttcagcctgctggcgctcgcaaatgaagtggcggttgtacaagtgtcttggtctctgggaaatttcgaatgcatcagcatacaaatcttggccctctgatgtttgcacaataaattatacttaattaaaaacaattaaaagcaaattccaattgcagccgtcaagcagctcggcctgtggtcttgcatgcagcaaatctgtgagccactgcaaatatttggcagcaatgctaagcaaaaactaaaacaaatcctagctgcatttcaaatgtgaaaacttttgcttgcctcgcatcctgcagctcagaattgcaagctgctgttttgggattcgtctaacatttcagggttttaattactgctaagcccgagacttttaccggctccatcgtatcggtattgttgtcgtggtcaaagatcccagcagcttcagatgcagctgcaactggccagccggcacaagtttggccatcgtttggtcggagaatttagatgggtaaaataaattaatgcaattacatgctggcagcttaagacccgagttaaggcctaagtggagtcataaagcacacacaaattgagttcgggacaaatgccacagactttgcagcgacggcattattaattcgaatgtgtgaatgccgcagtgaggcagtgaggtccaattctatttactcaattattaaccgtcagacggagtaattaattacgagttcttacctctcggattgaaaacagagccactaccgatggccatcctctggcaatggaacaactttcgtcctaggcacataaaacaaacattgacacactgaccggcgcaccacgaagcccacgaaaatggaaaatggaaaat

SEQ ID NO: 2177 - DNA, 1314 bp, DROSOPHILA
atgctgacggacaagttcctccgactgcagtccgctttatttcgccttctcggactcgaattgttgcacgagcaggatgttggccatcgatatccttggcgcagcatctgctgcattctctcggtggccagtttcatgcccctgaccattgcgtttggcctgcaaaacgtccaaaatgtggagcaattaaccgactcactctgctcggttctcgtggatttgctggccctgtgcaaaatcgggcttttcctttggctttacaaggacttcaagttcctaatagggcagttctattgtgttttgcaaacggaaacccacaccgctgtcgctgaaatgatagtgaccagggaaagtcgtcgggatcagttcatcagtgctatgtatgcctactgtttcattacggctggcctttcggcctgcctgatgtcccctctatccatgctgattagctaccacgaacaggtgaattgcagccgaaatttccatttcccagtgtgtaagaaaaagtactgcttaatatccagaatattaagatacagtttctgcagatatccctgggacaatatgaagctgtccaactacatcatttcctatttctggaatgtgtgtgctgcattgggcgtggcactgcccaccgtttgtgtggacacactgttctgttctctgagccataatctctgtgccctattccagattgccaggcacaaaatgatgcactttgagggcagaaataccaaagagactcatgagaacttaaagcacgtgtttcaactatatgcgttgtgtttgaacctgggccatttcttaaacgaatatttcagaccgctcatctgccagtttgtggcagcctcactgcacttgtgtgtcctgtgctaccaactgtctgccaatatcctgcagccagcgttactcttctatgccgcatttacggcagcagttgttggccaggtgtctatatactgcttctgcggatcgagcatccattcggagtgtcagctatttggccaggccatctacgagtccagctggccccatctgctgcaggaaaacctgcagcttgtaagctccttaaaaattgccatgatgcgatcgagtttgggatgtcccatcgatggttacttcttcgaggccaatcgggagacgctcatcacggtgagtaaagcgtttataaaagtgtccaaaaagacacctcaagtgaatgattaaattgtgcgcactgctatatcctatgtaacgctactcagatccctggcctagctttccgggctttcattattcagtggttcagtcgttcgggtttgtttaactccggaa

SEQ ID NO: 2178 - protein, 401 aa, DROSOPHILA
MLTDKFLRLQSALFRLLGLELLHEQDVGHRYPWRSICCILSVASFMPLTIAFGLQNVQNVEQLTDSLCSVLVDLLALCKIGLFLWLYKDFKFLIGQFYCVLQTETHTAVAEMIVTRESRRDQFISAMYAYCFITAGLSACLMSPLSMLISYHEQVNCSRNFHFPVCKKKYCLISRILRYSFCRYPWDNMKLSNYIISYFWNVCAALGVALPTVCVDTLFCSLSHNLCALFQIARHKMMHFEGRNTKETHENLKHVFQLYALCLNLGHFLNEYFRPLICQFVAASLHLCVLCYQLSANILQPALLFYAAFTAAVVGQVSIYCFCGSSIHSECQLFGQAIYESSWPHLLQENLQLVSSLKIAMMRSSLGCPIDGYFFEANRETLITVSKAFIKVSKKTPQVND

SEQ ID NO: 2179 - DNA, 5510 bp, DROSOPHILA
gctgcttcttcggccactgtaaatgaaccgttaggctggaacagggggtggtggtggttgcgttagtgcgctgctgctgttgttgttgctgttgcggcagcaacaaattgccgttgtttatcgttttttttttatccgcgtttcgttttcaatcagctagacttttccacattcgacgaactcaatatgtcgcgatcaactcgtatccgatcgagaatcgtttgcattaactttataatacacgattattttgacgacactaccgaactttttgctgctgtaaacgtcacacaaacacacacacacacacacgcacaggcaattgcacacacctcagcagcagcaattttttctctcgccctctctccctatgctgttctgtatgactttatttttatttaaatactagtactttttttaaaaggactactttaattcaatcactcgttatacatcgaccgaatattgcactggaaaaaaatacagcgttcgttcgacgacggtgaattcacgaatgttttttttcgcccactggcggtgtgaccgtcgcgcaaaagctgaagtaagccgctaaataagtattaccatatactaaaattctctgaagcgcagatagctgataaccgatagaaaagtttctactgcattatcgattatttgaataataccaaaaataccaatgatagctgtttagcacagactcaaacctgtacagtgggctgcaagtgctgttattacatgtttgtaaatgattttgaaacattcaaccatatgagataagtatgaatcttaatggagttatgttgctcagagtaataagttgttgttcagcattccattgatgaaaagtgtccataagatctttgtcgtttaatgataggaaataggctatttgttgataaatttaaaatacattttgtggttaatgattgttggcgacataaataacccataaaaatgcgccgaggcggtgaaatattttcgcggtatctgcgcacgggcacaccagctagatggcgtctttaggagtgtgtaaaattaatcaggaaagttacctgaatgcaaacgcgattttaaaagtcgcatctgctgattaagtgggcaaatcgagtgctcctcgcgccacaattagtccgtggtacagtggcctcactaattgcgcaaaacacacatctgtaagcgcatattaaccgtatattttaaagcggtaaatctgcgctctttgctaattttcattttcgtgggaaaatcgcaaagggctgaaacctgcgataatggatatttttgatatggtcaaagcggcgccgccgccgcaaactattaatccggtggacaccaagctctccactccgtcgcccataccgcccgattcgccaatcgacgtaaatggtaaattgagcataattttgtttgcctgcaaattggctggcaatcctagaagtttaataacctccaatcgttttttccattttctgtcagacctcctggagagtggaaaccaattggacgagaatgacttgcgcatgtcgagaaaatcaaagaatgtcgaacagtgcagcattgatctgtttgattcggaaacatcattcgaccatctcgacgagtcattggccaagaggaagcgtaagagcgtggctaactcaaaaccaaacaaaagcaggaaatccactgtctctgcatcgacgccgcacaacaagaggccaaaagtgtccattgacgacgacggcgaggccatcgaggaggaccagcaatcgatggtggtcgttcccaccaagacgaaggctcagcaaaagatgttcagcgatcagcagtcgccgaatgttaaaagaaaggtgcgggtgctattacgtcgcctgaaacagacagaaatcgattcggccgtcgaatctttggccaattcatcatttatcaatgtgcccgagatcgttaaccagagcggtactagtggccgtagcaggcacaaaaagagaaaaacgtcacctaagaaacaaaagtcatcaacagcgcagaccaatttccacatcaaagttcctttgcagaatggcgccaaaaagcgtgctctgaaccactcgttgcgcgctcatacaccgccgcccagtttggccaagagttctgaaagcacacactccgcactgaagcgaagtcccaagcccaagatcaaggcgaagagattatccagtcgcggacgcaacaccgatccggatttggttaagcgttatggcgcgcatttctttggctgtgtggtgaaggtgaggaggacgcgtttaccaagtgccaagtggcctgactgcaaaccgcctcccattggcgacggagttgtcaggaaggtgtatcccaagaaggcggtatccttcagcgaggccgtcgagattctgggcagccccgggggtccatcacgtcggtctactttcggttcgctttcatcgagaggagctccgaaaccgacacgactgcagcgtgtggatgccactggcaatgtgctggaggacatagcactgacctccacgccgctcttctcgtcatcttctggaggctcgcgcgagcgggttaggcgccgctcatgcaacggtacgcctgtggtcggaaggctcaagttacgcaggttgggccgcctaagcatagacaacagctcctccaggtctgatggaggtggagataatgatgatgacgatgaggagtatataggtaggaggatgcacttattaaactgacatcaaactcgatgtaatcgcattaatcatgtctcattttgtattaaatgatttcgttatttttatgacaggatttgaccaaatcaaattaaagaagaattgagctaaaactaatgcaattctctccatttttacgtccagtgcccaacgatgtgccggggtcccagagatctggaacgcctccgcccaagaaaaagaagatatccttcaccacgaccatcagtgatgatgaggacgaaaagccggtactaaaaaagcagaaggatgcacaaaaaaagcagccaaaacccctaaaagaaagatcaaacaaaaagacggacaagatgctaaacgaaaaggagacgactgacaaaatgcaaacgaaaaaggagaaaaaaacggaaaactcaccagttgtggaaattgaatcctccgatcctgatgtcgaaatcaaaccaccagtgaaggaaatcgaaacgaatgagcgagagggagacgcacacgaaactgagacaaatgaagtagaaagagatagagaagaacaatttgtggatgcaacagagaaaaatacagatgaggcgaaggaaaaaaaagtagtaaaagatatgccagagttaaaagaggctgacaattcggaggaaaaatcggaagatgctcgagaagaagttttgctagacgaggacgagaaaaatctggaggaaaatgcagctgaaatcagcgataacgccgtcaaatctttagaaaaaccaacgaacgaagacagggttgagaaagtagaggacgaggtcgagcatgccgaggagttcagtgacttgccgaccccaccacagctcccgtccacaactgacgataacgaagatgacgtgctggagatccagacgtcgttggacgatgtccgtcaattgcatacgccatcatcccgccagagtacgcccaaatcgcgcagtcgcctcgattccggtgactccgattgcagctttaagtccgccagcgataacgccaagctgctagctggacaagccattgaggaaacagagcagaaagcaagcaaagcgccgaacgatgacgaggatcaacaaacagcagcaaccatcatcggtgatcccatcgattcacccgaactgccggccgagcttatgaccccgccctcggcgcccaggacagtgaatggtgaacccaccagcgaatccagatcaacggcaacgacatactactcgcccatggaggatcccatggccacgctagatgacgtcatcatggaccagctatccggtgagtgccagacgatcgcctccatcgcaaggcaatctcaaataatagcatgaatacttagggagtacaagtggggactgttaagtcttcaagacagtaaagtacgtcattttctactttaattcttgccaagtagtctcgcttttcacgaaacttctctattttgtgaggccaaaaactcttacgttaaagctctagtgacacttggtcattggtcaagcattccattgattgatttaatgaacattcgcccgttgcgtacatttgtcattaaaacaactacttaataggcattttttgtactttctctggtcttctctaagtctgggtatcttaattaagtgtaagtgtataggcaatgcacaatttccagttgcaatttgaacttgcttatatttcatactttcgtaaatgttaatttgaatgcaccttctaataactatttgctctgcttatgccttttagaacccaactttcagttgaactccagccgccatgccatctcgaggggtacactggacgaaataatgaccgcgttagaatcgtagtaagctggcaaattgcgcaccaagtacagatagacagatacagatcgaaaccgaagcatacacacagacacagacatagctacaaactcacacgcacacacgtaggtttattaaggaccgattaatttgtacatttaactgaatttataattagttctccctacgatcaagaagtagtcttacgtttatttttaaagacatattcaatttatatgcaaactcacgttgaaaataccaaagtatttttgcaagagaaagctattggtgcaaacgttaatattttgcacttatatgattgctaaattagtcagcaaaacagggacaaaatttaacacagctcactcactcaacttgcaaatgtgtgcgatagaccgtaaaaattaatattttaatattattaacggttaagcggaatcagaaaatcaattttcaatgtttaagctacttaaacagagcgttacgttagtttgactttcaagaatacgtattgttcgtttctcatcctttttttttttgacaacttagatttaagaaacacttgcgttcatgcacatatataaatataaatatatatatttaagtatggatcgtcttaaatgtactgtaagttcaatgtattaatgtacatcatcatcataaaatgtatgtatgtaaaaagaaaacagattaaaaatggataaaatatgttgccagttttcaatgggattggctgagaaactttttcgaaatttgccgccatttgaagatgttgccacattcgaacattgacgttgccatattgtgaaaagtcttgtaccgtttattttaagctatgtaaaaatgatgttatttttattacctaacatgttttttttttcacagaatattctacagttaatttatacagattgaataaatttaatgtgctagaaagagatttttttgtgactaatttgaatagataaatggaaagatgttatcttgctttatgaacaacacacacttaactttctgatatatt

SEQ ID NO: 2180 - DNA, 2788 bp, DROSOPHILA
gcacaccagctagatggcgtctttaggagtgtgtaaaattaatcaggaaagttacctgaatgcaaacgcgattttaaaagtcgcatctgctgattaagtgggcaaatcgagtgctcctcgcgccacaattagtccgtggtacagtggcctcactaattgcgcaaaacacacatctgtaagcgcatattaaccgtatattttaaagcggtaaatctgcgctctttgctaattttcattttcgtgggaaaatcgcaaagggctgaaacctgcgataatggatatttttgatatggtcaaagcggcgccgccgccgcaaactattaatccggtggacaccaagctctccactccgtcgcccataccgcccgattcgccaatcgacgtaaatgacctcctggagagtggaaaccaattggacgagaatgacttgcgcatgtcgagaaaatcaaagaatgtcgaacagtgcagcattgatctgtttgattcggaaacatcattcgaccatctcgacgagtcattggccaagaggaagcgtaagagcgtggctaactcaaaaccaaacaaaagcaggaaatccactgtctctgcatcgacgccgcacaacaagaggccaaaagtgtccattgacgacgacggcgaggccatcgaggaggaccagcaatcgatggtggtcgttcccaccaagacgaaggctcagcaaaagatgttcagcgatcagcagtcgccgaatgttaaaagaaaggtgcgggtgctattacgtcgcctgaaacagacagaaatcgattcggccgtcgaatctttggccaattcatcatttatcaatgtgcccgagatcgttaaccagagcggtactagtggccgtagcaggcacaaaaagagaaaaacgtcacctaagaaacaaaagtcatcaacagcgcagaccaatttccacatcaaagttcctttgcagaatggcgccaaaaagcgtgctctgaaccactcgttgcgcgctcatacaccgccgcccagtttggccaagagttctgaaagcacacactccgcactgaagcgaagtcccaagcccaagatcaaggcgaagagattatccagtcgcggacgcaacaccgatccggatttggttaagcgttatggcgcgcatttctttggctgtgtggtgaaggtgaggaggacgcgtttaccaagtgccaagtggcctgactgcaaaccgcctcccattggcgacggagttgtcaggaaggtgtatcccaagaaggcggtatccttcagcgaggccgtcgagattctgggcagccccgggggtccatcacgtcggtctactttcggttcgctttcatcgagaggagctccgaaaccgacacgactgcagcgtgtggatgccactggcaatgtgctggaggacatagcactgacctccacgccgctcttctcgtcatcttctggaggctcgcgcgagcgggttaggcgccgctcatgcaacggtacgcctgtggtcggaaggctcaagttacgcaggttgggccgcctaagcatagacaacagctcctccaggtctgatggaggtggagataatgatgatgacgatgaggagtatatagtgcccaacgatgtgccggggtcccagagatctggaacgcctccgcccaagaaaaagaagatatccttcaccacgaccatcagtgatgatgaggacgaaaagccggtactaaaaaagcagaaggatgcacaaaaaaagcagccaaaacccctaaaagaaagatcaaacaaaaagacggacaagatgctaaacgaaaaggagacgactgacaaaatgcaaacgaaaaaggagaaaaaaacggaaaactcaccagttgtggaaattgaatcctccgatcctgatgtcgaaatcaaaccaccagtgaaggaaatcgaaacgaatgagcgagagggagacgcacacgaaactgagacaaatgaagtagaaagagatagagaagaacaatttgtggatgcaacagagaaaaatacagatgaggcgaaggaaaaaaaagtagtaaaagatatgccagagttaaaagaggctgacaattcggaggaaaaatcggaagatgctcgagaagaagttttgctagacgaggacgagaaaaatctggaggaaaatgcagctgaaatcagcgataacgccgtcaaatctttagaaaaaccaacgaacgaagacagggttgagaaagtagaggacgaggtcgagcatgccgaggagttcagtgacttgccgaccccaccacagctcccgtccacaactgacgataacgaagatgacgtgctggagatccagacgtcgttggacgatgtccgtcaattgcatacgccatcatcccgccagagtacgcccaaatcgcgcagtcgcctcgattccggtgactccgattgcagctttaagtccgccagcgataacgccaagctgctagctggacaagccattgaggaaacagagcagaaagcaagcaaagcgccgaacgatgacgaggatcaacaaacagcagcaaccatcatcggtgatcccatcgattcacccgaactgccggccgagcttatgaccccgccctcggcgcccaggacagtgaatggtgaacccaccagcgaatccagatcaacggcaacgacatactactcgcccatggaggatcccatggccacgctagatgacgtcatcatggaccagctatccgaacccaactttcagttgaactccagccgccatgccatctcgaggggtacactggacgaaataatgaccgcgttagaatcgtag

SEQ ID NO: 2181 - protein, 837 aa, DROSOPHILA
MDIFDMVKAAPPPQTINPVDTKLSTPSPIPPDSPIDVNDLLESGNQLDENDLRMSRKSKNVEQCSIDLFDSETSFDHLDESLAKRKRKSVANSKPNKSRKSTVSASTPHNKRPKVSIDDDGEAIEEDQQSMVVVPTKTKAQQKMFSDQQSPNVKRKVRVLLRRLKQTEIDSAVESLANSSFINVPEIVNQSGTSGRSRHKKRKTSPKKQKSSTAQTNFHIKVPLQNGAKKRALNHSLRAHTPPPSLAKSSESTHSALKRSPKPKIKAKRLSSRGRNTDPDLVKRYGAHFFGCVVKVRRTRLPSAKWPDCKPPPIGDGVVRKVYPKKAVSFSEAVEILGSPGGPSRRSTFGSLSSRGAPKPTRLQRVDATGNVLEDIALTSTPLFSSSSGGSRERVRRRSCNGTPVVGRLKLRRLGRLSIDNSSSRSDGGGDNDDDDEEYIVPNDVPGSQRSGTPPPKKKKISFTTTISDDEDEKPVLKKQKDAQKKQPKPLKERSNKKTDKMLNEKETTDKMQTKKEKKTENSPVVEIESSDPDVEIKPPVKEIETNEREGDAHETETNEVERDREEQFVDATEKNTDEAKEKKVVKDMPELKEADNSEEKSEDAREEVLLDEDEKNLEENAAEISDNAVKSLEKPTNEDRVEKVEDEVEHAEEFSDLPTPPQLPSTTDDNEDDVLEIQTSLDDVRQLHTPSSRQSTPKSRSRLDSGDSDCSFKSASDNAKLLAGQAIEETEQKASKAPNDDEDQQTAATIIGDPIDSPELPAELMTPPSAPRTVNGEPTSESRSTATTYYSPMEDPMATLDDVIMDQLSEPNFQLNSSRHAISRGTLDEIMTALES

SEQ ID NO: 2182 - DNA, 4915 bp, DROSOPHILA
tcttggattttatgggctcttccagttgggaaacctcacatgcctcggaaaactcctccgctatggattttttctttttctttgccttcgtatcacactgctccacactgtcatcaactgactccactgctcgatgctcggtttcaggcgtagtcttcagcttgcgctgaagcttctccagcatctcgcgctcctgctgctccaggcgggcgatctttccgctcagctttaggccatgccgtgctcctttgtgcgcagtccttcctccgcaggccttgaagagttccgcatctgtgagtaccgccaccttggtgacctcaatgtcctccaccctgatgcgttcggaggtctcaacctctccaccgctctgcgtgagcagcgaagtctgcaggaagttgtcgtaggtggcctttccatcgcttgcgtgctgctccttcgctttcttcagcttgcgcgcggagaatcctctagtggatatctccaccgcttcctcgccctttctgcgggaggtggacacctgtccgtcctgctgaatctggacgtccacattgctggcggcctcgttaaagcagcgctcccaccaatggtcattgaattcctgggcgcgatccactcccagtcccgcgttatcgaacttcaaggcggccttcaagggaactgcgattccggtgttgttcttgcccaatccgtcgccctctttccagccgtattttcccagtatcttcttggcgaaatccatcacaagaaatgtgaaaaatcaaaataaacaattgtgcacgtgcggcgcaattgttatcgataagcagatctattatttcacatcactaacaattattacagggctacttgtgtcgataggttctgccaattacagggtgactacggtcctagcacaacagagctgcattcgggcgccgaaatttgaactaccgaaaattagacgattctgtgtaaattatcaaggaagtaaatcattaaataaaaacaaacttggccaagattccattacacattcatttctcctttatttcagatttcagctgcgctcttcggctcatttcgtttgcaactactcttagtacaagtttcttcataaatattaagtggcaatgaacaaagacagcttttacataaagaaactgattttttcgaatacaaaatacttgaaaaaacgtagactttcagtacgcgccacaataaaatcgaaaagttgctgagctcaacgatccaccgcatctccgcccagccacgcccacacactcgcccatccaagatgttagtcgcagaggtgatctccacgagatgcctgccgcatgtccaagaacttcggggagagagagagccttggtgggcgcgcatggagatcctccgccgaatgggccgagtgcacgaggatggctggagttcgttcgggccatcgattgggttgtgttttcggtgagccggaagcttgctttaagtaaaatctaattttaatgtctgtcgtctgggtatgggcgtgagcgttggctagtccaatccgattgaatccaatcctccttcctcctgatatttcggttgttcaacttaaagtaggtgtggtcttctcctcgctcgcatgttttttaaaaacaaaattacatgtattatgtggttgttgttggtatttataattagatagttgtacaggatgttcttgtttgctatcaatcaatcaatcaatcattttatcattaataatcgaaaacgaacgtaggtgttgcttgttctggttgttgttgttgtttgtttgtttgaagtgttgtttggttgctattctcgttcgcatgcgactggcgcacgcgcccgatcgcaggaaacaaggacgagcaatcgatgtgcagcaggcgcgcttagaaggcgaacagcagcaggaaggccatcatcaaacagaacagacccatggcctcggacagggcgaagcccagaatggcgtaggagaacagctgctgtttcagcgatgggttcctggcgtagccgatgatgagggaaccgaatactgttccgataccagcacctgttgtattggttcgttgtgtttcggtcgcgaagttgggaggagaaagaagatcaaagcattagtaccctgtccaagtcagttggcatctccggttctcgccgaagctcgcaagtgagaaatggaattcggacaatggggaatggatgggtcaccctgacgcgcctttagcttctttcaccaggtagtcagtcacagattagtctgaattgagttctgccttagaggcagcaagcacatcgcactaaaaacgctggccacgaaaggtttcaatgccaaccaggcggcggtcaccgggggcaacggcaacacctggtagcaggatttctggtactttcgccctgcaatcacacaggtttcctgctgggaaatgaagccgcaacaaacagctggctcggccgattctcagaccttcccggggcaatggtttgtggagtaatcagatactcgttgtgtgggccccagatgctagtttgcaactgactggaggaaaagaagcccaaggcgtctggggatcccctctgactgaatgatgtaggtgcccaacgaaaccaatacataccggatccagcgacaccgactgttgcggcaccagcaccaatgaatttggcggccgagtcaatgtcacgcgtgactggcgaggtctggaatgacctgatctgtggcagcaatgcaacgggggttgtgttctgagcggccaaagtctggctctggctgatgatggcgctgctcaatggtcgcaagtactgcttggagttggcgaggaactagaaaggtagatgagcgttcgttgattatataagcggtattccacgccgtgtgtacattgcttgagataaagtttctggccgtgataagagatatattatgcataaaattcataatattttacctaacccccattaccactactaatctactactaatagcttatagacaacaaaaattgagaattgattcatataatcttttcatggtttatcatgtttaccaattcaatttataagtataggaatgctatggaaaatgttccataaatacccgaaattccttcacatcgtactacaagtaagaactatttgtgtgtgaaatagaaacttagtgcttgggcatttagatcacacatgaccggatcttggcaaatacactaatactgctgcttaaccctcgagtgccgaccaagttcattgctctgctgtaatgccaagttatgcaatcgttaagtaattttccctcgattggcactttggctgctgtgtttgttgtgcttcagaggctactagcatagttgttggtggcccgatattaacaactatagttttataaacaatgtcaattattgtcaatttgtattaccccgcacccctctcatttttcaacaccctactggaaagctttcgccggttctaacctcaaagacacacaccacagacctgaaagcaggtgttatacaatgaagggatagcctttgaaactgcaaataaaagaactcactaaattctacgcacagatgctgagcgataattcacaatttctcgcatttaattagtagattccactgggcgcacacataacctcaaagttatgcaactgtgtgccgtccgtgttttctcaccgcggccattggaagttcaccacgccagggcggcattcaaatggttagatcgggaaaatcaatgcacttttccgataattatgtaatttcctgcacattttaactttatctcgcacaattcggacataaaaatggggaaggggtacttacggcgctcctggcaactggggcaatgcgagagactgtcgacacgaacattttcggttgaatttcctttttgttttgcttacgacaaaattgaagctagcgcacggctctgcaaagatatagacggagatatcgattagttctgggctgactttctgtcccaagaatacattgtatcaagtcccacgccgcctcagaaaagttacgtaacatgcggaaaatctgccctcgcaccggattttcactcgactctcagctcgatctgtgctcagtcatcaattgaaaccgatttgctggcttttcctctgcgaatttgccgattttctaacttttccagtgacgcaacgactcgaggcacacacgcacaccactgcaaaaccagaatggcacacgtgtgtgtgtgcgagtgtgccgcaagatggcggcgcattatcaaacacgtttcgcactttaattggcgaaatttcacacgattcttcactaattccgcgttttttggctatctgaggcgtttgcacggctgttacccaacagaggggtgctgataaggggggtgctccgccagcggacggaaaaacccggaaaaagcaactcacttcgaacgaacccttcacaacagtaaaacgaatttgacaatttcgctgacttttggggggtgctaagtgtggccgtcagcgggagctgggaaaaaggacgataggtcgatttaatactggaaagtaccagaaataccattttggttgagaacccaatccacggtgcaagtcctggctacacattttcagcagagacgcgccccaggagcgagtctttgctagaataggaggttgcccttgcacaataggcgcagtgtgaccataacagtagtggatacgtagaatcaattaaatagccctttcccacgaaactgcgtctttctaattttgtttatttatttatactacaaattaataaaataaaatctttggcgaacggtccataaaaacgggtcattctgaaaatttttcaaccagcaaatgcaatagataaattagataattagataattagataaattagataagttttcaatgaatttggcaagtgtagggccaaataagtatgtataatcgtttgtg

SEQ ID NO: 2183 - DNA, 1355 bp, DROSOPHILA
tctttgcagagccgtgcgctagcttcaattttgtcgtaagcaaaacaaaaaggaaattcaaccgaaaatgttcgtgtcgacagtctctcgcattgccccagttgccaggagcgccttcctcgccaactccaagcagtacttgcgaccattgagcagcgccatcatcagccagagccagactttggccgctcagaacacaacccccgttgcattgctgccacagatcaggtcattccagacctcgccagtcacgcgtgacattgactcggccgccaaattcattggtgctggtgccgcaacagtcggtgtcgctggatccggtgctggtatcggaacagtattcggttccctcatcatcggctacgccaggaacccatcgctgaaacagcagctgttctcctacgccattctgggcttcgccctgtccgaggccatgggtctgttctgtttgatgatggccttcctgctgctgttcgccttctaagcgcgcctgctgcacatcgattgctcgtccttgtttcctgcgatcgggcgcgtgcgccagtcgcatgcgaacgagaatagcaaccaaacaacacttcaaacaaacaaacaacaacaacaaccagaacaagcaacacctacgttcgttttcgattattaatgataaaatgattgattgattgattgatagcaaacaagaacatcctgtacaactatctaattataaataccaacaacaaccacataatacatgtaattttgtttttaaaaaacatgcgagcgaggagaagaccacacctactttaagttgaacaaccgaaatatcaggaggaaggaggattggattcaatcggattggactagccaacgctcacgcccatacccagacgacagacattaaaattagattttacttaaagcaagcttccggctcaccgaaaacacaacccaatcgatggcccgaacgaactccagccatcctcgtgcactcggcccattcggcggaggatctccatgcgcgcccaccaaggctctctctctccccgaagttcttggacatgcggcaggcatctcgtggagatcacctctgcgactaacatcttggatgggcgagtgtgtgggcgtggctgggcggagatgcggtggatcgttgagctcagcaacttttcgattttattgtggcgcgtactgaaagtctacgttttttcaagtattttgtattcgaaaaaatcagtttctttatgtaaaagctgtctttgttcattgccacttaatatttatgaagaaacttgtactaagagtagttgcaaacgaaatgagccgaagagcgcagctgaaatctgaaataaaggagaaatgaatgtgtaatggaa

SEQ ID NO: 2184 - protein, 138 aa, DROSOPHILA
MFVSTVSRIAPVARSAFLANSKQYLRPLSSAIISQSQTLAAQNTTPVALLPQIRSFQTSPVTRDIDSAAKFIGAGAATVGVAGSGAGIGTVFGSLIIGYARNPSLKQQLFSYAILGFALSEAMGLFCLMMAFLLLFAF

SEQ ID NO: 2185 - DNA, 4020 bp, DROSOPHILA
tcagtacgaattgtcgtgtcaagcgcacaggaagcgatcgcaacccggatcggattggatcggccggatcgagccaccatatgtactatatacaaacacacatatatatatagatatatcgcagtctttacggtgaacagcgtcgatcgcatgtggacaaacaattaaatgtaatgccaaacaaaaatagtaaatagcgaataataatcggcagtcggggcaagttatcaacaataaaaaaaatatattaacccttaatttaataatacgtaaacagcgcaatggaaattgccaaataaagcgtaaataaaataatccaattccgtatgccacaaataaacaataaacaaaacattcaacattcaatgtgcatagtttacacaaaacactatacgtttctatataaattaataactaataactgcaacaataaaaccttaaaatcttttgtgcattatgatataaaaaaaatgttttacaagcttgagtaatttttttttaattatgagcaataaaaaaaaccctcaattctatattgtttgttactttattgcgtccacattcgagcaacacaaagaaaatgataaaacaaagaaaaaaattgttgttaacaaatgacgaaaagaaatgaacttaatcgttaactggtttgcaaactccacaaaatttatcaaatttattttctttaaagtgtaatttaaggagtttattttggttgccattcaagtgaaatcatcagcaatcgcggcgcatataaatttcgacacacatccgaggcaaatagaaataattgtatatatacatatattatttactggaacaaaaaccagttttgaaactcaaatttcacatagatggaatacaactaatgatagtaaaagccaacgcacaataaacagcgaaataaacgagttttttaagttggcaattataatattttttccaaccgctctactcctttttttttgcactaccaataaccattgtgttttttgttttgttttgttttttattttttgcacgtgaagacaaggtcaaagaagcgctaaaaagtgaagttaagtcgaaacaaacacgaagataccaaagaagatatgacggccaacacagggacgtcgggtgaaaatctgatgggaaatggtggaaagacgcatgaaccctccacgcccacttcggatacggaagtggccagcggcacgccaacggaactgagcgaaatcttcttcgtggacaatagccggcgcaagcagagcatcaaaatccaggtgaaactatgcccggaaggcgtttacctgcgacgcgaaaccgaggaagatgatcacatcaatgagcagctgatcaggatcgatgatatcataggatcacgctacggacggcgtttgaagaaacgagcccgaggcggtctaaactcctgccgcaatccaaatgttccgggccaggaggcggattcggaaccggatagcgataatagcgcctatttgtacatctatgcatatttgaagaaggagaaaccgttgcgacgtgtccaaacgctccggattctacgctttcgttcgagcaatgactacggagtgaatctacagaccgccgagatgtggcatcatacgattcgaaagcacaagcgtggcaatggcagcagttcgcccgccgattgtggcaaacagttgctcatcctactgaatccgaaatccggttcgggcaaagggcgtgagctcttccagaaacaggtggcacctttgctgacggaagcagaggtgcaatacgatctccagatcaccacacatccgcagtatgccaaggagttcgtgcggaccagaagggatctgctgacacgctattcgggcattgtggttgcctccggcgatggtctattctacgaagtgctcaatgggctaatggaacgcatggattggcgccgagcctgcagggagctaccgcttggcattataccatgtggttccgggaatggtctggccaaaagtgtggcccatcattgcaatgaaccgtacgaaccgaagcccattctccacgccaccttgacctgcatggcgggcaaaagtacacccatggatgtggtcagagtggagctggcgacgcgggacaagcactttgtgatgtactccttcctgtcggtgggctggggtctgatagccgacatcgatatagagagcgagcgattgagatcgattggagcgcaaaggtttacgctgtgggccatcaagcgattgatcgggctgcgcagctacaaaggccgagtgtcctatctactgggcaagggcaagaaggaaccaccagtggaagcggctcgagagttgcctgcagaatcaacggctgcaggaatccgctcatctctgcctctgaatgccggggaattccatgatctacccgaggaggaggagggggaggcggtcttggatggagaacagttcgccgatgccatatctttggatcgttcggtttaccgccagcatgccgacagttggcactcggccatgtccaggcgaacggcatattactccctgggcggacccagtatgcgatccaatcgcagccggatgagcattagccagcggatcgaggcagcaaatgcggaattcgctgagagggtgccaacgggcaccattccaccattacagatgccactgctcagcagcgatggttggatctgcgaggatggtgactttgtgatggtccatgccgcctataccacccatctctcctccgatgtcttctttgcgcccgaatcccgtctggacgatggcctcatctacctggtgatcatccggagaggcgttagtcgccatcagctgctcaatttcatgctgaacctaaacgcaggcacccatctgcccatcggcgaggatccgttcatcaaggtggtgccttgtcgggcattccgcatcgagccgagcagctccgatggcatcctggtggtggacggcgagcgggtggaatatggacccattcaggcggaggttatgcccggcctgatcaatgtgatgaccaccagtgggcagtagtgaaatattaaatccgtgtgctttgcaaagccttaatcataacgagatacattcgaagaatgtcaacattcaatagctactttagatcaaacttagtttataagaagttgcctttccaattaataacccttactaaattcataacttttttatatctgctaggaactttttccaaagtttacgcattttgacattattaggtggtaaagttcacaaaatttctattatctctgtttctattgttagtgaaaacccattctcatggctctgaaacgcaatctgtaatttttccatcagcccatcaaaaaaaaaaaaggaacttcacactatgcacttaagtagttggttataagttgttttctattattttttttttttttaatcggtcgatagtgttaattattttaagaaccatacgtagacaaataataaaccaaaatgctataaaaaatgtagaaaaagattgtgcgggtacaagggctactagtattttgcaggtgttttgttgccttggaaacgattgattgattctattgcatatttagttttgcaaattcacaaatacaaaaaaaaaaacgcgggaattcgccgctcatccggttgcatgacgatctttatcgatattggaccccaaagtttgggcctgcgaaagcaccaacacgaaggcaaatggaaacgcacctggtcgaagttcaagtggggacttcatacaaacaccgattggccagattaaccctgactgaatgggaaaaaaagcaagggattatggttacccaaccaaccgaatggaaaattaacacctagtaaccgtgtgtaacactaaaggtcaagttggttaagttgtgtcgatgatataacgctaatcatagcgttattcatagatatgcagttacctaattaatcaagctatacaataaaacaccatcattaaatattaaccatttgatatagaaattctatgaaaaatatgctcatgagaagacaaaactttctttttgtc

SEQ ID NO: 2186 - DNA, 2020 bp, DROSOPHILA
ttttgttttttattttttgcacgtgaagacaaggtcaaagaagcgctaaaaagtgaagttaagtcgaaacaaacacgaagataccaaagaagatatgacggccaacacagggacgtcgggtgaaaatctgatgggaaatggtggaaagacgcatgaaccctccacgcccacttcggatacggaagtggccagcggcacgccaacggaactgagcgaaatcttcttcgtggacaatagccggcgcaagcagagcatcaaaatccaggtgaaactatgcccggaaggcgtttacctgcgacgcgaaaccgaggaagatgatcacatcaatgagcagctgatcaggatcgatgatatcataggatcacgctacggacggcgtttgaagaaacgagcccgaggcggtctaaactcctgccgcaatccaaatgttccgggccaggaggcggattcggaaccggatagcgataatagcgcctatttgtacatctatgcatatttgaagaaggagaaaccgttgcgacgtgtccaaacgctccggattctacgctttcgttcgagcaatgactacggagtgaatctacagaccgccgagatgtggcatcatacgattcgaaagcacaagcgtggcaatggcagcagttcgcccgccgattgtggcaaacagttgctcatcctactgaatccgaaatccggttcgggcaaagggcgtgagctcttccagaaacaggtggcacctttgctgacggaagcagaggtgcaatacgatctccagatcaccacacatccgcagtatgccaaggagttcgtgcggaccagaagggatctgctgacacgctattcgggcattgtggttgcctccggcgatggtctattctacgaagtgctcaatgggctaatggaacgcatggattggcgccgagcctgcagggagctaccgcttggcattataccatgtggttccgggaatggtctggccaaaagtgtggcccatcattgcaatgaaccgtacgaaccgaagcccattctccacgccaccttgacctgcatggcgggcaaaagtacacccatggatgtggtcagagtggagctggcgacgcgggacaagcactttgtgatgtactccttcctgtcggtgggctggggtctgatagccgacatcgatatagagagcgagcgattgagatcgattggagcgcaaaggtttacgctgtgggccatcaagcgattgatcgggctgcgcagctacaaaggccgagtgtcctatctactgggcaagggcaagaaggaaccaccagtggaagcggctcgagagttgcctgcagaatcaacggctgcaggaatccgctcatctctgcctctgaatgccggggaattccatgatctacccgaggaggaggagggggaggcggtcttggatggagaacagttcgccgatgccatatctttggatcgttcggtttaccgccagcatgccgacagttggcactcggccatgtccaggcgaacggcatattactccctgggcggacccagtatgcgatccaatcgcagccggatgagcattagccagcggatcgaggcagcaaatgcggaattcgctgagagggtgccaacgggcaccattccaccattacagatgccactgctcagcagcgatggttggatctgcgaggatggtgactttgtgatggtccatgccgcctataccacccatctctcctccgatgtcttctttgcgcccgaatcccgtctggacgatggcctcatctacctggtgatcatccggagaggcgttagtcgccatcagctgctcaatttcatgctgaacctaaacgcaggcacccatctgcccatcggcgaggatccgttcatcaaggtggtgccttgtcgggcattccgcatcgagccgagcagctccgatggcatcctggtggtggacggcgagcgggtggaatatggacccattcaggcggaggttatgcccggcctgatcaatgtgatgaccaccagtgggcagtag

SEQ ID NO: 2187 - protein, 641 aa, DROSOPHILA
MTANTGTSGENLMGNGGKTHEPSTPTSDTEVASGTPTELSEIFFVDNSRRKQSIKIQVKLCPEGVYLRRETEEDDHINEQLIRIDDIIGSRYGRRLKKRARGGLNSCRNPNVPGQEADSEPDSDNSAYLYIYAYLKKEKPLRRVQTLRILRFRSSNDYGVNLQTAEMWHHTIRKHKRGNGSSSPADCGKQLLILLNPKSGSGKGRELFQKQVAPLLTEAEVQYDLQITTHPQYAKEFVRTRRDLLTRYSGIVVASGDGLFYEVLNGLMERMDWRRACRELPLGIIPCGSGNGLAKSVAHHCNEPYEPKPILHATLTCMAGKSTPMDVVRVELATRDKHFVMYSFLSVGWGLIADIDIESERLRSIGAQRFTLWAIKRLIGLRSYKGRVSYLLGKGKKEPPVEAARELPAESTAAGIRSSLPLNAGEFHDLPEEEEGEAVLDGEQFADAISLDRSVYRQHADSWHSAMSRRTAYYSLGGPSMRSNRSRMSISQRIEAANAEFAERVPTGTIPPLQMPLLSSDGWICEDGDFVMVHAAYTTHLSSDVFFAPESRLDDGLIYLVIIRRGVSRHQLLNFMLNLNAGTHLPIGEDPFIKVVPCRAFRIEPSSSDGILVVDGERVEYGPIQAEVMPGLINVMTTSGQ

SEQ ID NO: 2188 - DNA, 10174 bp, DROSOPHILA
tcagtgtagagcaggctgtaaaggagcccaatgaatttgcatcaaaactaaacggacaaaaaaacgaatttcgctgactaacttaactgaggttgtgtttataaattaaaataaaaacttacatctaaaaagatttgtagaacatttcaacatttggggtttgcggttcgaattcgtttcaaatgtcttttaaattactattgcattagaggcggagaagaaagatttaaaattaagactgggcagcattgtttcacatacaatcctcgttacatttcttatagaacatattataatatgcatttcatgcgcgaatggttcaaaatattttatttaatccagctaaactacgggctttccactttaagttacaagtttgtgcggtcggaagggattttaaacagagtgcaggcaatgaccattgaaccatttaggcatgaaatgccctaaatcaagtattaatataaaataaaccaattatgctcctcgtgcttcgtattaaaaatatcgctctacacactggctttctttgttgcattgactaataaacattttcattttaaagtagattccacatttggtgctcgcctggcaacccatttccattcatttatttgatgaaatgtttgtacaattttctcgtttcccctattgttgttggcttttggctcatgtttcgctctctatacatataaataaatttgtcgaaaaacattgcatacaaaatttgtcaaaaattcattaaacatcttgtaattatgttatgtacagcgatcgttgccatttagtgtgtgttgattaggtttttttatgcaattatttacagtgtcaacaacaaatgcctaaaaactaaataataattcttgtttacaaattggcccgccggctgaacaggacttaatccaaacatcaatgggcctacataacaatattattattaatattattattattgcattacgtgtatggtttatgttagggtgttcgggtgctcggtactctacttcatgcggttgatgactaagtcggcgaccacctggagacccttctggtagggcgactccgtgagctcctgggccagccgtatcgcctcgttgcagtgcttcttggccagaaaccgggtctgctccagaccgtgcgacttgtgcaccagctcgaaggcgcgctccacgtcgccgggctcgctgaagcgccgcatcaccatgggattcagctcggggtactggaatgtacggaaaaggcatttcaattatgcaggttatgcagtttgcagctatgtagcggctttaaacgcactgcacgcgtgcacagcccgcggaatgcatagcaaatgggcattggtaatcggtggcaattgatgagttacagtcgcattgtatcatctgcgcatctagccaaccacccacccacatgacatcatcacaccttcaccgcccgcaccatgaatacatcatcgttgcgatggcgcgaagccactttggatgcatagcaaatagacatctggacaaagagacagctcaatctagctcatatatacacagagaaaaatggtaactcaatctaaaaagaaaacacgtaggtatgcagacatatgaatttaagtgtggcatacttttatacacctacgatttacgacttatgttgcattataacgatttttctctgtgcacaacgaaacagcttagattggttggcaagccaactaggaaatatccaacagatcccagattccgcactcaccttctcgcatgcaaagaggacgggagcggtggccagacccagcttcaaatccgccgccgtcggcttgcccatctgctcggtggaggagacaaagtccagcatgtcgtcgaccagctgaaaggccaagccgatgttgcgtccgtactggaaggccacctcggccacgttgtcgtcggcctgggcaatcacggcggtctgcaggagagccggagcatcgagaatagagaacagagaacagagggttcaagatcagcacaaattgcaggggattgggcacaatggtgcgagactgcgtgcacactaattgccgaattaagcggctagggtctggtcaataagtgcctggtctggtggtcgggctcgcatgatggtaatgaatactcaccgccttcagtgcattggcgatcagcgatgcggtcttcctgtatgtcttggtcagataatgggcgaagcgctcgttctccgtttcccttgagcccagctgcatgaactcgccttggaccaaatcggtcaagatctgcaagagattacgaacaaggcgtcataaaaatgtcacagtaagtggttggggttatggttatggcttcaattgttctcggcctggggattcccgggcgcagatgaatggttcattacgcaattcgcaatgtttcccctacactgataaaaaaaaacggtcgaatttgcaatatgaatatggatattccagatatagcatttgaatgttttttccctaaaaatgaacacatttcgtctcgctttaaagccgctgatacgctcgtgtgtgtgtgtgtgtaacttccgcttggctaaaacctcgaatgcaaacagcaaatacaattgtgccaaatggatctggcaaacaagatttcattcagatctccaaagaagatggatattttggctatcgccgcttctgtttgttcatcaattgtgtggcacgcccttcgattcgcctgcgcataggcattttcattgattcggacgagaaattcacaggcagttgtcaaaatcattggcaaacaatagtgggcgctgaaaaatggcggcttccaccaaggagctcaaggtgaggcggcttcaactggccaaaatgcccggccaaattcctcggacctaccgaccaccgctgaactttcaatgttaattaacactgacaaaaagccaactacaagtgcgtgagctctaacaacttggccagcaagtgcatttggagccacacaaattaacacaatgccgccttttaagcagctaaatgagaccaaatgcagcgctcgcggaatcgagtgcaattttcggtaaaactatgctttagcctcgaaaccactttgctagccatttattgggaattttctttttcaatcgcaagcttccgactaggggaatttgacagcattcaagcattttcagagattcagagacactgaggaccattaattgttatgtactcttcacagcttatgagcctaataaaagggtggggttttccaacggcgttcaaagtgataaccgtttggtttagcccaaaatgcgggaatagtcataaattcacttgattgaaaggcagacggacattctacccattttattaatgccatccgacgtcttagaaaccgctgattttattcagacacgtgcacagcatatttaatgtgaaaaatctgataaatatatgccgaagattttagattgtcgtagatgaaagaaactggcaaaaagtcgtgtataaacgagtgacaaaaacagttgaatgcatacaaagtttttgacacaaagaatctggtttcttggcacataaatttccacagcttttgattaccaaactagttaaacaaactacttagaatagatttttaatcggacaaacaagtgtgcgttgggtaatctcaaacttttcttcatacatatgtgcaaattcggcagcccagagaaatttgcataaatggtggggaccagtttggcttagaactagtttcaagacgaatgatatcacgatcgcgaagaaagtttcattttgttggggtcaaagtgcttggcatgcaaatgagccacattatgcgatagacgcacgagtatgagtcgagtatatcggccagatcgggttaatgatatagacaaatagcggcggatgagtgtctgggccgcaccttggccatcttcaggccaatcctcaggtgttacgcatgttttttctacgcgaattgagaaaacgccaaatgtgtaacccaaaaacgtaggcaagtttattgtgtttgccttggctattaactggccggcagctcgattgtgtaaatatgcagagaagctgggagcttgaagagatctgagattcggagccacctaggtcttggtttacagggcagtagatcaagtttcactttccatggcaggtgtgactaattcgaaaatcgtaggaactacgtgtaggtatttctgcggaatgtggggattcacaaggacacgaatgcacatttccgactcatgtgaaaagtgaatgccgctttttgcaaagtttctcgaactctggcgaagggcaaaccttgggaatccaacttccagggacgcaggaagtttgcaggcccggtgatttgtgccccattaaaagtggcaactggtttttggtttcccaaccaacagaacgagaaaaattcatcagtttaagataaatactggtccatcaattgtgtaaaactaggcacctgatgcgattacgtactttcttgacaaaaaaactaaaggcttgttcttgtgtatagatatatttccccaaaatccggcagttattaagatgggcaggctttactaagtaagttgcttagcttttaagtttgctctgtcaattaactagcagcataaaatgtgcgaggcacttggtatcttctacaaatgtttgtcttcggtagaattttaagcagcaaagttattttcgtaccatgatcttagaactatatgctgagtgtagtttcttgattgttacttatatatagtcattagtcatatccttgcaattcaaagtttccttacctgactcagcacgatcgtcacatcatcgctgcgcagacgagctatcataatcgaggcaatcgataagatgtaatcaccagccattgtgacctgtaaaagcgatgagacatggtcagaaacaagcggccataacaaaagatcggccaacacaatcgctgtaagacagttatgtgttgcaacgttaacagccagcagcgagttggcttaaaggcaagaaaacccaaccgacatgtgactaagatgagcgccaatacaatcaaaggcgagaaatttccgcttcttgtgaagatggggtttggattaatttgtgcattttaatttgaagacatgtcgaaagggaactattttgggatctattattgaattattgaacgcagcggcaagaggcagcgccattcgattttgaggcctttcaaatgatgcaagatagatgttgacaaagtcaataaacacttcaaatcgaaatacgcaacaaattgatgtcaaagtcaggctttgggccccaatgattgctattcggctgtttcggttgccgagcgactcggggcgtgtgtttggctttgtttgtttggctctggcaaacatcggtggcatcgatgatgccacatgccatatcacccatgtcacgcggatcgatccttaccttcttgtggttccacagagcattcacgctgggcttgccgcgtcggaagtccgactgatcgatgacatcgtcgtggaccagactggccgagtgcaccatctccgaaaagagggcgatctgtcgctgtttgtgtactaattggctgtcaaggcgataggaagatacatgatttaggactagggcaaatatccaaaaactacacctacatacatatgtatgtaagtgtttgcaggggtatgtgtgatttcatttggtcgggctgcgcacatttcgcaaaacagtgctaatcaattacactcgtctacacagataaatgacagaaactaatagcaacattttaaactctactaaacttaaaaaaaaaaacaggaaagttcgttagaaatgtgaatacttttacgttaggtaataaccacgagttctttttgaaaataataaaatcaaaaacagaggcagtatttatttacgactaccattactaagcttgtaagctcttctcatgtagatattaattagtcacatctactagtactcactgtgactcgttgttcaggtgatagtttatcgccttggccatcagcatggtaaccatgggtcgcagagccttgccctggccatcgaagtaatagctggcaatggtgtccaactctggctgggatgtgcccgatttcagcagctgaaagaagattcgaaagggggaattagtcaagatcacttccagttgttttcgccgttctgtagaatctggcctaaatacgcaaatatttgtattctaaggcgcgagaaaaaaaaaaacctcgttctgagggaaaaaaccatctaatcaatgacgttcttagcatctgaatggaaccggtaacataattcttaagatttgcgattggacatggaattttagtttcaatcaaacttgttaccgaacttgttatactaataaggatctaggaattatatcgaacttacatatcgcacatcgtcgtagaagtacttgaggtcgtcatcgagtatgatgtagggatcgatctggaactccctcacaggacctgctggctgttgtgtgtggaccgagctgtgctgcctcagattcgccttggaactttgcgagtactgcagcgattggctgcacttgtggggactttgctgcaagttggaaaatggtagaacggttagcgatttcgattgcgatttcgggcaaaggctgcaattactaacaaagtgtgaataatgatggagcaaacaagtcacttaacaactttcaattgcggctgtgtcacgtctaacaagttttgccttgcccgccggcgtgttttctgttttctgttttagccgaaaaattaataactggaaaattgcagtggctacagtcttgggctgtaacccccgtaaatggccaactaattgaagtcgattgttgacgccctcgcgcgactcttgaccttgtcgccaaaatttgaattgttaaaaccacaaatccttttgttgccgtcacaaaagagagcaaacacgcgctgctctgctgaattgttgctaaattgttggccaaaaagtggtgccattttccacacaggaaaaaaacttcgaaacttacaagacgaatgaagactttcttaatcgcaaatgtaaagtgaaatggcactttgattggattagtcaatttttcctctttgataacccaaacttaatggacaagcatttttaatttctcccggtgcattgcttttgaattgattttcttttcaaatccgtttgtgtgccattatgcaaagtttgcatttgtttgcttcttgtgcagcctgtcaactagtcaactagtcaaccagtcaaccaatcaaccagtcagcctctcagtctgtcaataaagcgccacacatgctggcatgataacatgtaaattcgatgttgccagctgtcagctgaggtagcaacatttacaccaccgaatatttgaccatttcaactgggtgtgattgcggactatgcggtgacccacttgtggcctggttgtcctgccacgggccaatgaccatcatttgccgcccttggccagcggtcttcatccgcatcttgtgcagcatcatcatcagcatcatgatcatcatcttcgtcattgggaatacacgtgtgggcttttggatggcaaactggttcggttttggtcttcgaaggggcccacagcatcgtaaaatacccaaacaaattgttgaccattgaaaagagcttgtaatgacccagtttcatatttaatatgtgtcataaacatcggaatgggctttgcttttggcgagtagaaagcgcgccgtgcgatcggtggcatattacaaaatcgacgcatcacaatttacagcagcagccggaagaaatccaattaaattcgagtcgcggtagctttcgttttcaatatgtgcgccaaattaaaattagttgataattttgcaaaggccaaaaataacagaaaccgagccgcacagccatttctttgtgtggaacgtgcagaaatgcatttaattgtggccatttcgagttggccgcaaacgttgaatgacttttaagcgttgtaaaatgcttttcacaggtgcccacgaaagccgaacggattttaagtgtctctaaacccattgaactgcttgccgttggccacttggatgatgttatggctgaagtgcccgattgtactatattaaagccaggtcaacgatctgcgctaaaatttgggtgcctacttggtcttagatcccactgaatttcactatgcaaatttaaactggagtttgtcgatcttattgcgtgcacaaaagcaaaagcagcagcactcgaattaaccacataggaagtggactctttcgttgcacttggctgctgaagacgaaccgaggatttggactcagtcagctcgatgtggtttattgtgtaaccgggggcaaggaaatagcgaagtatctagaaaagtgaagatgttcacacttggtaagacgtggtatggctttgattaatcaaacattggactaatcttcattggaggtttttagtaagtggagttcagcttgcgagataatctggcattgggttgataaggttaaaccgcaattggcccggagcaatcgagctccgaaagatatccagtttaacctccttttgccccacatgcaactggccacaaaagaggagccgcggcgattggcaagccaactttcacatcgattcgaaaggaaataataataacgatctcttcgccaacaatgcggcacataatttacttttatttgcttagtggacggcggtgcctctgccaattttcatttaaatacgcgcattttcgcagccattagtttaattgtggaaagattggccaaaatgggcgcagtgatcaaagcaattgcagcatttagcggcgtgtgtaaatatcggcagacaagtgccaaaagcgaatcaagccaaactggaaatggaattttcgccccagggcgctcccacgacataatcctctccagatgtgtaccatccaattcagaccaaagcccactcggagttgccaaccgaagatgaagacaattaacggctgaaagtatttaaacactttcgagtgccggcccaaactcgcactgattgatgtctgttttgattgaaagccccacataaaaccggggaaattgcgacattttgcattgcttattgatggctttacgactcacttttgtccagagagcctcgcattgttgtgatttctgctctcgtttggcccggaattcgctcagtttctttttggccatttgtatgcggcatcataagccatttctattcaatatggcaatatgagaagcttgaaaattacctttgcatgttgctattttaatggaggccgattcgaattacacaaactgttagcacctgcgattcgaaaactattcaattatggcaaacaacttctgtgcctaccttgcgtagcgaaagaacattcatgtcgttaactacataattatttacaaattagtcgacgcaattaacagaaaacttaatttgttaagctgctgtgattatgtgacaattggttttacttggctgactttttttatcaggaagattgatgtctaaaggatgaaaagagctccttcgaccttggcaaaatcgaaaagccctgctgtcatcagcttgcaaacattttaattgcttccttttctggatggccaaaaagaaataccgtcgccgcgatcgaacatgacaggccgacgcgtcggcagcggaagcggccaaaagcgaggtattggccaaaagcggacacaagacacgaccaagaaagtgagcacagctgagggccgcgaagacggggctttggacttactttccctttttgtcatcgctgcggttgtattgccacggctgacataaccaacgcttttgtgggccaaaaaggggaactacagcgcgaggggggggcggggcggcgccaacgattggctttgtaatttctctgttcgatttgaatcgcgggagcttcttcattagccaagttcgctggcaagtggttaacatgcgtgttaacaacccagtcgcaccgcaggcatccgaactcaagtgagtgtgaatgccaaagtggccgagtgtttgcctccaaactgggcaatttgtatttgacaaagtgctcatcgcggcattgagaacgcttctgaatctcaaatcccgccgagatgcagcagctcgagtggctagcataatctgtcggcattgtttgctaatgtctcaattgcacagcccacgatgcgtcacggtttc

SEQ ID NO: 2189 - DNA, 1293 bp, DROSOPHILA
atggccaaaaagaaactgagcgaattccgggccaaacgagagcagaaatcacaacaatgcgaggctctctggacaaaaatacttcgctatttccttgcccccggttacacaataaaccacatcgagctgactgagtccaaatcctcggttcgtcttcagcagccaagtgcaacgaaagagtccacttcctatgtgcaaagtccccacaagtgcagccaatcgctgcagtactcgcaaagttccaaggcgaatctgaggcagcacagctcggtccacacacaacagccagcaggtcctgtgagggagttccagatcgatccctacatcatactcgatgacgacctcaagtacttctacgacgatgtgcgatatctgctgaaatcgggcacatcccagccagagttggacaccattgccagctattacttcgatggccagggcaaggctctgcgacccatggttaccatgctgatggccaaggcgataaactatcacctgaacaacgagtcacaccaattagtacacaaacagcgacagatcgccctcttttcggagatggtgcactcggccagtctggtccacgacgatgtcatcgatcagtcggacttccgacgcggcaagcccagcgtgaatgctctgtggaaccacaagaaggtcacaatggctggtgattacatcttatcgattgcctcgattatgatagctcgtctgcgcagcgatgatgtgacgatcgtgctgagtcagatcttgaccgatttggtccaaggcgagttcatgcagctgggctcaagggaaacggagaacgagcgcttcgcccattatctgaccaagacatacaggaagaccgcatcgctgatcgccaatgcactgaaggcgaccgccgtgattgcccaggccgacgacaacgtggccgaggtggccttccagtacggacgcaacatcggcttggcctttcagctggtcgacgacatgctggactttgtctcctccaccgagcagatgggcaagccgacggcggcggatttgaagctgggtctggccaccgctcccgtcctctttgcatgcgagaagtaccccgagctgaatcccatggtgatgcggcgcttcagcgagcccggcgacgtggagcgcgccttcgagctggtgcacaagtcgcacggtctggagcagacccggtttctggccaagaagcactgcaacgaggcgatacggctggcccaggagctcacggagtcgccctaccagaagggtctccaggtggtcgccgacttagtcatcaaccgcatgaagtag

SEQ ID NO: 2190 - protein, 430 aa, DROSOPHILA
MAKKKLSEFRAKREQKSQQCEALWTKILRYFLAPGYTINHIELTESKSSVRLQQPSATKESTSYVQSPHKCSQSLQYSQSSKANLRQHSSVHTQQPAGPVREFQIDPYIILDDDLKYFYDDVRYLLKSGTSQPELDTIASYYFDGQGKALRPMVTMLMAKAINYHLNNESHQLVHKQRQIALFSEMVHSASLVHDDVIDQSDFRRGKPSVNALWNHKKVTMAGDYILSIASIMIARLRSDDVTIVLSQILTDLVQGEFMQLGSRETENERFAHYLTKTYRKTASLIANALKATAVIAQADDNVAEVAFQYGRNIGLAFQLVDDMLDFVSSTEQMGKPTAADLKLGLATAPVLFACEKYPELNPMVMRRFSEPGDVERAFELVHKSHGLEQTRFLAKKHCNEAIRLAQELTESPYQKGLQVVADLVINRMK

SEQ ID NO: 2191 - DNA, 3504 bp, DROSOPHILA
ctacgcctttgtgccgttctctgcgggaccacgcagctgtgtgggtgagttgcagatataacactgaagcaaattatgtgaatattcggatcgtctatatgaataatgttttgtttcatttattataattatttttttagggcgcaagtatgcgatgctcaagctgaagatcctactgtcgaccattttgcggaactaccgtgtctactcggacctgaccgaatcggacttcaaactgcaggcggacatcatcctaaagcgtgaggagggattccgcgtgcgcctccagccgcggaccagttgaaccccggtggccgcgacgaacatcagctaggcgaaccaggtggaccaggtggagcgggtggggcaggcggaacaggcgggcagcacaccatacaccgtacaccgcaaacaataagctacacagaacggacacttatccatacatataactccacttgttggcaagtgatagtcaccggtttatacagtaatattgataatattaaataataataaacgtgctcccacactcgatttattgaatagtataatgattatttttttgacgcatttaacacaaaaagcaaccacaactatcgtcatcttcctttaattgttctactcctcttttttttttttggttatttaataattataatacctatttgtgtgtaatgattttgacaataaatcttttgtgtaattatacaaatggattttagtgggaaatttaaatgttttcatacagcaaatggagttgacagccatttggttgctgttattactcgtcttctattttatgcgtcttaaaattcaaatatgcgcgccattcgtagcattaaccaacactgtaccagctggcaatgtaaattggtatatttttggtatataactatcgaccctcggccatcactaacatgcagcgttgccccatcccatctaacgcaagtaccaaactaatttggccatctggcagcactggtcaaaagtgacacggcgacaaccagcttaaaagcgaaagttaacaattaacaattgctggcgtccatagccaaacacacgagccagaaactggagccaccccaaagccagaatgtcgcacgccatcgacgaactgcaggcgatcatcgccgatctgaagacggagctggagacggagccgaaatccagtggcggcgtcgctagcaacagccgcctggcacgcgatcgcatcgatcgcatgtccgccgaggtggtggactccaatccgtacagccgcctgatggccctgcagcggatgaacatcgtcaaggactacgagcgcattcgctacaaggcggtggccattgtgggcgtgggcggcgtgggaagcgtcaccgccgacatgcttacacggtgcgtgcacaacaagaagagaagggcaacagtcattgtgcaccacagctagcactccaaatatgttgtctttaattaaaggctatgtattaatcaattgatttcctgcagctgcggcattggcaaactgatactcttcgactacgacaaagtggagctggccaacatgaacagactgttctttacgcccgatcaggcgggcctctccaaagttgcggccgccgccgctaccctgagctttatcaatccggacgtggagattgagacgcacaactacaatattacaacggtggagaactttgatcgcttcctggacacaatatcgcagggcggacggatagctggccagccggtggatctggtgctcagctgtgtggacaattttgaggcacgaatggcaatcaatgcagcgtgcaatgaacgcaatctcaactggtttgagtcgggagtttcggaaaatgccgtctcggggcacattcagtttatccgtcctggcgataccgcctgtttcgcttgtgcaccacccttggtggtggccgagaacatcgacgagaagacgctgaagagagagggcgtgtgcgccgcttcattgcccacaactatgggcattacggctggcttccttgtccagaacgcattaaagtatctgctgaatttcggcgaggtctctgactatctgggctacaatgcccttagcgacttctttcccaagatgacgctcaaaccgaatccgcagtgcgatgacagaaactgtttagttcggcaaaaagagttccaagccaggcccaaacctgtgctgatcgaagagaaggcagtcagcgaagagccgctgcatgccaccaacgaatggggcatcgaactggtcgccgaggatgcgccagaaagtaatacaacgcccgccgaaaccccagtgatgggtgaagggctgaggctcgcctacgaggctcctgagaagtccagcgaaacgtcagaggaaactgtatctgcagctaccgcggacgaaaccagtctggaagacctgatggcgcaaatgaagtccatgtaaattgattccgtactccgtatttatagacactttttgtaaaacacacactttttttttgataaactcagcttcgatttgtgtaaaacttgggccgagccattttttatttatttatatatagtaacttttagtcacttgattaaatgctttatgctcaaaattatttgaattacgcgggaaatttcaattcttgcagtttctagtatttcagtattttaagcttcccctatctggcagcacggtcaactagtccgttatcgattggcagcgataacgattgacaattttgttgtcgcgttgtcacacaaaaacgaagaaaactcctgaaaaaagaaaaaagagtttttctgagcatttcgcaaacttctcttggaaatcaagggcatcaaaacacaatagagagcagatagaagatgggcaagaaggatgaaaagtcacagcaaggcgaggaggtgagtaaaccggttgccggcttggcatttggtccattaagatgtgttccacgtcattgtagaatgtaaatgtaaactaagtgaatatgtgcataaactaactccatcctgtttcatgtgccctgccagctggtgaaggtcaacaagtgggatggatccgcagtgaagcacgccctcgatgatgcagtgaaaacctgcctccttggcgatcgtccccagctgaaggagcaattcggcctggtcaacacccgtttggccctctgcgccctcgccgtttccgtggctataatggcccatgcttgggacttcacccaccccttcccggaatcccgtccagtgctcctcttcagtgttttggcctactttgcactcctcggcattctgaccctgcactccagtttccgcgagaagggcacctttgcggtggccctgcagaaggacaaggagcgggagcgcctgtgggaggccagctccgatatgcgcaagtacgacgacaagtacctgctgaccctcagtgttcgcgacacgaaaaatggcaagcggcgcgagcagagcagcaacaagtcgtgcgccgccttcatcgatcagaatggcatcgtcctggacaacctggtggccaacgaggtcaac

SEQ ID NO: 2192 - DNA, 1393 bp, DROSOPHILA
cgacaaccagcttaaaagcgaaagttaacaattaacaattgctggcgtccatagccaaacacacgagccagaaactggagccaccccaaagccagaatgtcgcacgccatcgacgaactgcaggcgatcatcgccgatctgaagacggagctggagacggagccgaaatccagtggcggcgtcgctagcaacagccgcctggcacgcgatcgcatcgatcgcatgtccgccgaggtggtggactccaatccgtacagccgcctgatggccctgcagcggatgaacatcgtcaaggactacgagcgcattcgctacaaggcggtggccattgtgggcgtgggcggcgtgggaagcgtcaccgccgacatgcttacacgctgcggcattggcaaactgatactcttcgactacgacaaagtggagctggccaacatgaacagactgttctttacgcccgatcaggcgggcctctccaaagttgcggccgccgccgctaccctgagctttatcaatccggacgtggagattgagacgcacaactacaatattacaacggtggagaactttgatcgcttcctggacacaatatcgcagggcggacggatagctggccagccggtggatctggtgctcagctgtgtggacaattttgaggcacgaatggcaatcaatgcagcgtgcaatgaacgcaatctcaactggtttgagtcgggagtttcggaaaatgccgtctcggggcacattcagtttatccgtcctggcgataccgcctgtttcgcttgtgcaccacccttggtggtggccgagaacatcgacgagaagacgctgaagagagagggcgtgtgcgccgcttcattgcccacaactatgggcattacggctggcttccttgtccagaacgcattaaagtatctgctgaatttcggcgaggtctctgactatctgggctacaatgcccttagcgacttctttcccaagatgacgctcaaaccgaatccgcagtgcgatgacagaaactgtttagttcggcaaaaagagttccaagccaggcccaaacctgtgctgatcgaagagaaggcagtcagcgaagagccgctgcatgccaccaacgaatggggcatcgaactggtcgccgaggatgcgccagaaagtaatacaacgcccgccgaaaccccagtgatgggtgaagggctgaggctcgcctacgaggctcctgagaagtccagcgaaacgtcagaggaaactgtatctgcagctaccgcggacgaaaccagtctggaagacctgatggcgcaaatgaagtccatgtaaattgattccgtactccgtatttatagacactttttgtaaaacacacactttttttttgataaactcagcttcgatttgtgta

SEQ ID NO: 2193 - protein, 404 aa, DROSOPHILA
MSHAIDELQAIIADLKTELETEPKSSGGVASNSRLARDRIDRMSAEVVDSNPYSRLMALQRMNIVKDYERIRYKAVAIVGVGGVGSVTADMLTRCGIGKLILFDYDKVELANMNRLFFTPDQAGLSKVAAAAATLSFINPDVEIETHNYNITTVENFDRFLDTISQGGRIAGQPVDLVLSCVDNFEARMAINAACNERNLNWFESGVSENAVSGHIQFIRPGDTACFACAPPLVVAENIDEKTLKREGVCAASLPTTMGITAGFLVQNALKYLLNFGEVSDYLGYNALSDFFPKMTLKPNPQCDDRNCLVRQKEFQARPKPVLIEEKAVSEEPLHATNEWGIELVAEDAPESNTTPAETPVMGEGLRLAYEAPEKSSETSEETVSAATADETSLEDLMAQMKSM

SEQ ID NO: 2194 - DNA, 4538 bp, DROSOPHILA
cacaaaaaccaagtattttttttgtttttatatttttacaaatgtctcaagtgtaccagatgcgtctggcttcttaagcaagaaaggagcatgtaagcgaatcgaacgaaatatatatatgtggagaaaaactatcataatcattgaagttttattggcgttgcaagtggggagcacagttcacgtagtaacgaattcacatagtatctactcgtacaaaactaaataaaaataaatgcgataaaagtaattatataaacgaattgtaactttttgttaaaagagaattaaaagaaattaagagaattaaagaaattaaaagaaacttattgcattgccactggcttgaaggaatcatctcgagagctataagagctggtgatttggaatattagttaatttcaaactgttctgacatttttatgttaaatttctacttattgaagttgcaaatacttaccatagtacatgtagaattgtatacttacttgcatttataaactaatacaaaattctttcaaaagatgtctcctaaggataaccgaataatatattagtattttcgggaaagctaacaataaaatcttcagtggatagatattttccttgaacagcttataagaaagttaatatcttacacagatataaagattgtatatacagtataaaattcttttgcgtaataatgggttggttaatctataagtttttacaaataagctttttatggccaggagagaatgcgtcaggtagcaaattagataaattaaatacgaattaaaacgaaaatcccagagacctttagccctttaagcattttttaacttcgacgtttacagactatatgtatttataattaatttaattataaatatcaaaagtttaaaatacttttaatacaatcgttcagcaacgtaggatgtttcttcagttcagttctagccatatcataccattttggacatataaatacatatgtataacaaagcgtgaaatcgatactttgatactttaggataaaactttatttgatataatcaaaatgcatgcgggtataagttaaaaatgcgtaacatagtctgtaggtggttggatttttaggacacagatcaggaactggagaacgctccagtttagtggctgccgccgttggtggtgccattggccttgggcttctgcttgccggcggcaatgaaagtggtcacgtccagcttggtggccagagctttgagctccaccttgccggccgggttcttgcccaggatgagcacgctggggtccacttcgaggacgcgggccaacttgcccagaatctcggattcgttcagtcggattactcgtttgttgagcgccttgattgcgggatcggactgctggcggttcatgctcacgatctgcgtgatcagcgtctcctgacccacgacgcccaggacagaactaagtgggaaaaaaacaagaggttataaacggtggagcgaaaggaaggaattgcggtgatcatacccatcatcctgatccacgacgggcagctggtccacgcggtgtttcttcatcagggcaatagcctcaccaacagttgcatccgacttgagaatgaccgggggagcgggtagctccaactccgcgatggccaggctccaccaccagtgaccgtgctcgtttaccggctccttgaagttgcgcgcctccatccagttgtccgacacgaacttggtcatgtagttgcgtatgccatcgggcagaatgaccacgcaccgctggcctttcttcaatttgcgggcatgctcgagggcagcgtgcatcgctccgccactggacccgccgcacaacagaccctcctccgcgttcaggcgtctgctcatggggaaacagtctgagtcgccgattttcgtccacacatccacgacggtgtcatcgaatacggtgggcggaaagtcgtagccgatgccctccacctcgtagaattgcacatcggtcttgttgagctcagcagggcgggcaaggatcgagccatagggatccacgccgactatctggcaactgggaacctgctccttgatcttacgcccaataccactgatagttcccgccgttcccgccgagaccactatcatatcgaccttgttgtccagctgccacagaatctcggcggcagtgccatcgtagtgagccagcggattgccagcgttgcgatactgatccaagacaatcgagttgggcgtttcccgctgcagctgctgagcaacgtagatcagtccctccggcgaatcgtaggctgcctccgttggagtacgtatgatcttggccccgagggttcgcagcgcggacaccttctcgttggacatcttctccggcatcacgataatgcacttgtatcccttaacggcacaggccattgccagtccaatgcccgtgtttccagacgttggttcgatgatggtgtagcctggcttgagcaggccctgctcctcggcgtcctgcaccatgcggtacccaatgcggtccttcactgatccacccggattaaggaactcgcacttggcatctgtagaggggaaagaggcaattaaatgatcttagattagatctgttcgtattgttactctgaggccacattgtgggttaggaaatgagattgtatgactaagtcagtgaaactcttcggtggatttttaggctatagacttacacatctcgcattcgatgccgtcgctggcgggaatgttgttcaacttgaccagtggcgtgcatccgatcacctcgaggatgttgggcgtaatctgctggcggtgggcgatgccccgatggatgtggggcgacttctcggctgtacccagatgccatttgcacttggacggcttgccgggatcgatgaagtccgcgggcctctcgtatggcttcggttgtggcatctctgaaagaaggaatttatatgaaaaagtgtttgggaatctctgtagcgaatataacatattgttgcttattttaatatatttgtagaagcaatataaaagtgtatccttcttcttcttcttctatagaagaagaatttccggaacttgggaatacttttgtaggggcgtaccaagatactttcttacaatatcagaccccaactaagatacgatttattaaattattaacatatagtgataatagtatgacttgaaaaagcttatctgctcctgaattcgaaaagattcgattgatttgcgatctaacaaacgccagatggtgccggtgttacctccgatgacccgtatcttatcactccagattccggtgtgcaaatgggggaaaaatctcaatcaaaatatactttctgttgtctcattgcgacgaggttgcgaaattgcgtgagattactattcaatcgaaagcgaaaagatcgggcccaaaagcgatgacgtgacaaaactcaaaaatatgcaaatcagatggaaacaggaagggcagcttgtttatttcaatttgcacagatcccgaagtcggattatcttaagaagatatatgaaaatacgcattttttctagctgtaattatttaaaggatacaaaactaagattcttaggctcaaggctttccttatcacaacgaaattttaaaatacgcgaggtattccattaaaattcgattctttgtggaatttagtctatctttagtctattctagacgttcagttcccagttcgaagccctttctttaactggttattaaatagggactaccgtcgtttaagtgggtttccattttgtagataaggttttcaggtggcactgattgcttgcgctgtatacgacacgccactcgaaacctatctatcacctacaaagtaaactcaaataagggaacatttattatatgaaaagctttgccaacgttgtgagggtatcttgtgaactcaggactaatgatagggtaggtcggaatctgtagtatcggcatgtattaaattaacttaataattgaatggagcgcaaagtctttctaaaatgctaccttagtgtttatataaattttctaatataaataattaacgaattgcatttaaaaggaattaaaaaaacagctacgtactatttattaagcgtcccgttgaatctatttataaaattatacgttatgtttttaatttgaacgtaagctgaataaagtggtattgagatacttgatgtataaaactatccttttataatatgaatataacatataaatccaaatatttcaatgtaaggtgagcattaaagtaaagaaacattatcagacgactaaaatattatttatgtaaatttcgaatcaaaatatcgttttactattttaaatttacgcaaaatttacgcatttgaaaattatataattttaatattaatgtgtttcttttttttctgtgtaaactctaaactttcccggttttcctttttattgctctttcttgtttatctcccccgccgatgacatgcacacacacgcatttttccatatacatacatatgtctatacatatttgttttacaagcacgcggcttcaaaatagaaca

SEQ ID NO: 2195 - DNA, 1995 bp, DROSOPHILA
tacagctagaaaaaatgcgtattttcatatatcttcttaagataatccgacttcgggatctgtgcaaattgaaataaacaagctgcccttcctgtttccatctgatttgcatatttttgagttttgtcacgtcatcgcttttgggcccgatcttttcgctttcgattgaatagtaatctcacgcaatttcgcaacctcgtcgcaatgagacaacagaaagtatattttgattgagatttttcccccatttgcacaccggaatctggagtgataagatacgggtcatcggagagatgccacaaccgaagccatacgagaggcccgcggacttcatcgatcccggcaagccgtccaagtgcaaatggcatctgggtacagccgagaagtcgccccacatccatcggggcatcgcccaccgccagcagattacgcccaacatcctcgaggtgatcggatgcacgccactggtcaagttgaacaacattcccgccagcgacggcatcgaatgcgagatgtatgccaagtgcgagttccttaatccgggtggatcagtgaaggaccgcattgggtaccgcatggtgcaggacgccgaggagcagggcctgctcaagccaggctacaccatcatcgaaccaacgtctggaaacacgggcattggactggcaatggcctgtgccgttaagggatacaagtgcattatcgtgatgccggagaagatgtccaacgagaaggtgtccgcgctgcgaaccctcggggccaagatcatacgtactccaacggaggcagcctacgattcgccggagggactgatctacgttgctcagcagctgcagcgggaaacgcccaactcgattgtcttggatcagtatcgcaacgctggcaatccgctggctcactacgatggcactgccgccgagattctgtggcagctggacaacaaggtcgatatgatagtggtctcggcgggaacggcgggaactatcagtggtattgggcgtaagatcaaggagcaggttcccagttgccagatagtcggcgtggatccctatggctcgatccttgcccgccctgctgagctcaacaagaccgatgtgcaattctacgaggtggagggcatcggctacgactttccgcccaccgtattcgatgacaccgtcgtggatgtgtggacgaaaatcggcgactcagactgtttccccatgagcagacgcctgaacgcggaggagggtctgttgtgcggcgggtccagtggcggagcgatgcacgctgccctcgagcatgcccgcaaattgaagaaaggccagcggtgcgtggtcattctgcccgatggcatacgcaactacatgaccaagttcgtgtcggacaactggatggaggcgcgcaacttcaaggagccggtaaacgagcacggtcactggtggtggagcctggccatcgcggagttggagctacccgctcccccggtcattctcaagtcggatgcaactgttggtgaggctattgccctgatgaagaaacaccgcgtggaccagctgcccgtcgtggatcaggatgatggttctgtcctgggcgtcgtgggtcaggagacgctgatcacgcagatcgtgagcatgaaccgccagcagtccgatcccgcaatcaaggcgctcaacaaacgagtaatccgactgaacgaatccgagattctgggcaagttggcccgcgtcctcgaagtggaccccagcgtgctcatcctgggcaagaacccggccggcaaggtggagctcaaagctctggccaccaagctggacgtgaccactttcattgccgccggcaagcagaagcccaaggccaatggcaccaccaacggcggcagccactaaactggagcgttctccagttcctgatctgtgtcctaaaaatccaaccacctacagactatgttacgcatttttaacttatacccgcatgcattttgattatatcaaataaagttttatcctaaagtatcaaagt

SEQ ID NO: 2196 - protein, 522 aa, DROSOPHILA
MPQPKPYERPADFIDPGKPSKCKWHLGTAEKSPHIHRGIAHRQQITPNILEVIGCTPLVKLNNIPASDGIECEMYAKCEFLNPGGSVKDRIGYRMVQDAEEQGLLKPGYTIIEPTSGNTGIGLAMACAVKGYKCIIVMPEKMSNEKVSALRTLGAKIIRTPTEAAYDSPEGLIYVAQQLQRETPNSIVLDQYRNAGNPLAHYDGTAAEILWQLDNKVDMIVVSAGTAGTISGIGRKIKEQVPSCQIVGVDPYGSILARPAELNKTDVQFYEVEGIGYDFPPTVFDDTVVDVWTKIGDSDCFPMSRRLNAEEGLLCGGSSGGAMHAALEHARKLKKGQRCVVILPDGIRNYMTKFVSDNWMEARNFKEPVNEHGHWWWSLAIAELELPAPPVILKSDATVGEAIALMKKHRVDQLPVVDQDDGSVLGVVGQETLITQIVSMNRQQSDPAIKALNKRVIRLNESEILGKLARVLEVDPSVLILGKNPAGKVELKALATKLDVTTFIAAGKQKPKANGTTNGGSH

SEQ ID NO: 2197 - DNA, 3347 bp, DROSOPHILA
gtttgatgaaagttatttccatttccctgacgaaaatatagcagggctgctttgattaaagctgtcgaataataataacgacgttgcttaaattgtttatgctgcttgttttgattccatttcccggctatgttgctggttgccttgactagctgttgttagggcaacccaatcctacccaactcagcccagtccaactatccccaacccatccgatttaatgtaatttctggtaccccccttccggttacctgtcagccgcacttgcaacatgcaacagtcgaatagcaatgccagagcattgtgggccctttgaatgcaccaacgcaacacaacacatcccaaccaatcccctgccaagttatagagctcacgccgttgcgtaaacaaaacacgcagccctgacttaatggctatgcacattagcaacgtgccagggactttcccagttgccaggtctccgggtccaggtcaagtagccccgtagcccccttggctcctgggaagcggcggacgtggaacgatggccacgctcaataagtgtatgggaccataaatggaaatatttactcggcaccgtcaacacggcaaagtgagttgagtgaggctgtgggttaagtaagtgcaagtgcaaaagtcaactttgcccggatctcaaattgcctaacaaccgactgccaggctctttgacgacttcacttaaagtgcatgtgccgttgctaccataaaagttgcgcaatcaaacttcgcagccacttcaatgggcttgaggaatcagttccatgggatgtcatcgatttttcattaatacctggattttacctaatttccgcaggccttgaattttgattatctcgctaatgtgatttttattttagactgtctaaggtacaccgcaaaaaataaaataagataaggacattcttgtagatgagtgcaatcagtttactagtgtaaattgttggcatacaaagtggcatacatatatcatgaaaatgttctactttcgtcctgtgggtgtcttccaggagaggcgattcctgtgaatggtcaacctcggctttttaaactgtgcgagcccacggcgatcttcaattatcgatgaagtagtgtagaacatgatgtggtcaaccttgtagtacttcgtcatccccataaattctaaagtgcttattatgtcctcctcgcggaagccagtcgctttgctcagctcttcgatggtcaccaggtccggtgatgagtggtgcctcagcagattgaggaggatgtggccccaatagctgaggtaacaaagtctggcaactttcgacagcggcttcttgggacctccgatgcatgcctccctgcgagagatctcgtagctcagatcaatcaacaactttccgtatcccttgcgcatatagggcggtaaaacaaggatgcaattcaggttgatattcagcatagtcttctccctggcgaagtaacctgcaaagtgctcgccatccttgtccttcaaacacaggatataaaacaagaacgaactcgagctgtaaagaattttcttgttttccagaaagagctttgacattaggcagaggcactggcaatacagctgctccttatggccatcgacctcgtagatataaatattgtcttttcggtataacaagctgcccggcggacacctcttcttgcaatcgtataggtggtaggagtaacttttccgcaagcacatgtattttaggcagaattcacaaacgtaaatggtggtcgccttgtcgtttattacaggatagggactggaagacgtggtctcgatctcgtaacgcccaaattgcaccttttcgatgtttcttatgactttcactttcgcgtcctctttctctttctggacatcacttttttcattatctattgtctcctggcgctggcgatcatccacattgctactggcattagtgtgtaataaagaaatcatattaggttccttgacgccttccaattgcttcttcggtgtagcccctattctttgagcttcgatgcacgatccagtaatggttttagtttcctgaatgtttttttgaagagatgaatcgttctgaagctgggatttccccatttcggacttagaagcactttggcctaaaccgcgagtcgcggaggattccttggcattagtctgaagagtggcaaaaaaaaaataaattatcagcagtttttcattcctcatatgatattctttgaccagtattgttcttaccaattgcagggctctcggaatgtccggcaatttcgaacttatcccgtcctgatcgcccaacggctgatactttaaatggtcacctgatctgttttccttgtccatttgtcaattcctattgcgaatttcaccctttttagaaagcgtggtttttcactagtgatgacacatttagcttgatatcgattagtgatatcaataatgaaacgataaagtttgttgtcaaaaaatcgaatcatctaaggaagcaccaatatcaaagcattaaagttatttttaaattttaattccaatttaactttctgaacatatattgagcaaaaatatatattatacaataagttgtatacatttttttcagtgagaaaacatttcgggatataatctcagtcctacgccacaccctgctaccttgatctatcgaagacgccagtgcagggacaacccggctcaatactaattaaaataaatgaacatttacgtcgtcacagcaggtggatgtgagggcgagaggccaggagaccgggcgaaagattaggtgacgagcccgggccaacgggagacatcattaaaatgcatggttcaaacggtgcgtatacttaatatagattggattgagagtgtgtggatggcgggatggggggggggggggggttctagcaggatggaaagctcctggatgagttggctccttttgctacagcattcgcttgcggtggctgtaatctttatgcgccatgtttttatttgtatttattattgcgtttgcggagagcagagtagcgaagagcacactttgtttgcaggtgaaatattccacgcatccagcgaaatgagaatttattgacttcactctgcatatgtgcgtgtgtctgtgtgtgtgtgccttttctataagagtctctgtttgcgtacacgtaaaaatattatagcgatttgatatatagctttgtgctgcaaaatatctatgcgctgcagaaatataaaaatgtcatgtctctactagagaatattacacaaaaatgattaaaattatatacatacttcgaatctcattaaaatcaaacactttttattgctgtgctgcttcgtttccgcttgaaac

SEQ ID NO: 2198 - DNA, 1266 bp, DROSOPHILA
atggacaaggaaaacagatcaggtgaccatttaaagtatcagccgttgggcgatcaggacgggataagttcgaaattgccggacattccgagagccctgcaattgactaatgccaaggaatcctccgcgactcgcggtttaggccaaagtgcttctaagtccgaaatggggaaatcccagcttcagaacgattcatctcttcaaaaaaacattcaggaaactaaaaccattactggatcgtgcatcgaagctcaaagaataggggctacaccgaagaagcaattggaaggcgtcaaggaacctaatatgatttctttattacacactaatgccagtagcaatgtggatgatcgccagcgccaggagacaatagataatgaaaaaagtgatgtccagaaagagaaagaggacgcgaaagtgaaagtcataagaaacatcgaaaaggtgcaatttgggcgttacgagatcgagaccacgtcttccagtccctatcctgtaataaacgacaaggcgaccaccatttacgtttgtgaattctgcctaaaatacatgtgcttgcggaaaagttactcctaccacctatacgattgcaagaagaggtgtccgccgggcagcttgttataccgaaaagacaatatttatatctacgaggtcgatggccataaggagcagctgtattgccagtgcctctgcctaatgtcaaagctctttctggaaaacaagaaaattctttacagctcgagttcgttcttgttttatatcctgtgtttgaaggacaaggatggcgagcactttgcaggttacttcgccagggagaagactatgctgaatatcaacctgaattgcatccttgttttaccgccctatatgcgcaagggatacggaaagttgttgattgatctgagctacgagatctctcgcagggaggcatgcatcggaggtcccaagaagccgctgtcgaaagttgccagactttgttacctcagctattggggccacatcctcctcaatctgctgaggcaccactcatcaccggacctggtgaccatcgaagagctgagcaaagcgactggcttccgcgaggaggacataataagcactttagaatttatggggatgacgaagtactacaaggttgaccacatcatgttctacactacttcatcgataattgaagatcgccgtgggctcgcacagtttaaaaagccgaggttgaccattcacaggaatcgcctctcctggaagacacccacaggacgaaagtag

SEQ ID NO: 2199 - protein, 421 aa, DROSOPHILA
MDKENRSGDHLKYQPLGDQDGISSKLPDIPRALQLTNAKESSATRGLGQSASKSEMGKSQLQNDSSLQKNIQETKTITGSCIEAQRIGATPKKQLEGVKEPNMISLLHTNASSNVDDRQRQETIDNEKSDVQKEKEDAKVKVIRNIEKVQFGRYEIETTSSSPYPVINDKATTIYVCEFCLKYMCLRKSYSYHLYDCKKRCPPGSLLYRKDNIYIYEVDGHKEQLYCQCLCLMSKLFLENKKILYSSSSFLFYILCLKDKDGEHFAGYFAREKTMLNINLNCILVLPPYMRKGYGKLLIDLSYEISRREACIGGPKKPLSKVARLCYLSYWGHILLNLLRHHSSPDLVTIEELSKATGFREEDIISTLEFMGMTKYYKVDHIMFYTTSSIIEDRRGLAQFKKPRLTIHRNRLSWKTPTGRK

SEQ ID NO: 2200 - DNA, 7978 bp, DROSOPHILA
aaaagagcatgcggaatgagtctacagatagcgcacacttgacccttgcttaacacggaatgacgatcctaaaaatctcaagttgaacgaaaatctgttttgcgaatcagaatccatgattagacagggattagaagttagacagaatcctatagtcgatatcccaggatatcagatacccgtaactcagctaggggaagtgaaaacgataaattttaacgtttttctggcatatcgatacaaattgggaaaaaacaaaaaaaaaactgtttcaaaagattgggcgaggcagttttgggcggtttcttggtataccaatagaaattgtctaggcaaataataacacaaacaaataatcaaaactttttactacgttttgtgcagcttgtggacaatagtcttcgaaaaagtttttagctgaacgctaaaaaaaattgcggtttgtgggcgtggcaatatgagggtaaaatcttgccctccgtctttgtttcgggacattttagcttccatagtttaaaagaatatacatatctactttatggggtgagaaacgctaccttctacctgatacatctagtatactcttttactctacgggtattaaaatgagtttaaatttcaaaaagaagttaaaagaagttttggtaaataggtatttgacctggaaagctattattttattttgaaatcaaaataagagaaatcgctatagtcgagttcctcgatagatgagataatttgaaagcaacgtttttgttcacgatttctttattttagataaacaataccttagaattacttgcattattatgttatacctaactgaaagtatttcattaattacatgtgtaatatgccgtaaataatcgtggcagcatcaacgaagactatacgcattgtagggattattttaacaaataacttgtataggaacagtttttgaattttataacgacccccaaaacaacgttttaattcaatttggacacaccaaaaaatgttagattataaaattttaaagtggaattatgacaaatcttgtttttgcaccttgataatctctttaagttttgatgacgaccataacaatcaaataaaattgttcgacagtaaatccaattagtgttcttaagactgttgttaaagctatgtaagttttaaatggtacaaaaggaaaatgttactgtggctattgttgctgttgctgcgtctgatgatgtctcttctctcgagctcgttcgatatgccgctttcgttcttcttttgtccaataacgacctatttttacttcagatattgtatcgtcttccgtcgtggtaacctcgttgtaacgcatatttttccgcaatgcaacttggggtcgattacgtactggccgttttactatgtaccgcgttccatctggtcgccttttaaccttccataccatgggtatttcctcagcactttcaccgttaagcaaagtagcatttttttgtaagcttgttgaaatatgacatctgtttgcaacctttacaaaagtaatcaaaacttttatttatagaatatgggcaaaaaaatatattcaatggaatatgagagagatggaatatgagatacatgtatatactaatagatttaatagatttgcaagcctacttatatggtatatttgccctttgaattttattgaaaatgtacaatgtttttagaattgttctttttttgatgcataatttttcactaaaaatcgatttaaaacctcctttcatgtgatctcttattggaatgatcttagaaaaaagttgaataaagtagtaaatagtggtaaaaatatgtattttcctgacctgttgatccttacatgttttaaattttaaacccatagaaaacgttcagtaaatgcacttataagaaaattattaaaatattttcaatggatgatacttaattcattaagatgtgtaacattcaaatgaaatcttagatttaaccgtcaactgttaaaatcattgtcatccattcgttttaatcccctactaataccattttaccccatatgcacatacattaaacttgtacttacctcttgactactaacaaagtggtaactactcaaatttggggcgttaaactgtggacaatgactataggaatcatcagttggtttaactcttagtatttcaatgtcgcttttaagtggatgaatttcattttcagacccaacgttggtataccgctctgaagtggaataatgttaatggtaattaaatgaagttcacgatatatcgttttcagtttgtaaatcttataataagacgttcagttaaatgttacacaaatttgaaaatgttaattgcttcagaattttttttatcaaggcaaaaatgataaatcgttttatacccgtggagaaaagtatctaacaggtagaagaaagcgtttcaaccatataaagtatatacatatattcttgatcagtgtcaataggcgagtcgttctggacatgaacgtctatgcacgcccacacttttgaaaaattttaaaattttttcttattgtattcccccatatttattgatatcccagacaaattatgaaatttcgcgttcgcatttacactagctgagtaacgggtatctgatagtcggggaacttgactatagcattctctaaaatggcgttaaaatgggcgggtccaaattttttgacatatcgatagagagaatcactgcatgctgtcccaactttataacttttatagcttccgagatctcgacgtttttaaggacacaggggcatggccagacagactcgtctagtaatcaataatatatatttacgtcttattgtttgaacgttggtactggttcactttcagaatcttatggaatggcctcataggtgtgcgcgcaatcacattgcagatttacttatttttggcttaaagattgattgaagctttttctataatccaagtttgcattcggtcgaagctttattttactacacgacttgttagattgctcaatgatatttttcgccaataaagatattttaacattttagtcagatgagtttttttggtggtatatgatagcatttgtcagattgaatagcggacgtaagttaagaaaatcttatcaagttcatccactacatttgtatagtcatctggcaaaaatgtattagcatactcaaaatgtatatcttcgacatcatcgtcgtcctataaaaatttgttaaaccatttacacctttgaattttatactttgattaataaaaatggtttctatcgattctcaatggttaacacaactgtaggcacttattttcgatagataaataatattttgtctacaattcctcaacctacactgcgtctctttttgttgaatccaatcggaaaaatatttatcattaacatattgacttttccagttaaaatataagcctttagtttcaactttctagcttttatatctaccgacatctcgacatccgtaaggacagagggacatgaccagatagactcgtctagtaatcaagaatttatactttacagggtttgaaattttcttcaaccgtttactagctttttaacgagcctagtaccatttaattcaaagtttaaaaagtaaaaggtgaagagcttttaaagtggagcacgtctgatatgtcagacgctacgtactatctgcaactaaaatataattgttatgcataccgctgacatacgctgtaggcagattggaagagcagagaccaatacggccagacttgccgaatggtaatagcaacatagtgcttacacctgtggcatccaaatgatcattggggctatcaataacagtactatctagcttgcgaccagtggcgatggcttcatcaggatttgtagtattttgatggggggaggcgctattattagaatcaccagtgttgtaggcacttgaggagttatcgacctcttcgccaggagccgcggcgttccctgtaacaacattattttgtccataagagctgtatgccactccactactgctggatgcgcttgtgttggttaaggtgctacgcaatgtaaaaacacgactacaagtaggttgctgtactaatttcaacggcgggggtcgaccaactagagtttgtctagttttctggtattgtggcttcaagcccaaccactgggcgactctttgagtttgttgttgcattgttctttctaatgattcggccggtctcgatgctattggagatgaacaacctattgacgtcttgtcgtttgaacgttggtacggtgaacaatacactggttcactttcagaatcttctggaatggtttcgtaaatgtgctcgctttcatcgtactcatattgcagatgaacttcttcttggcttaaaggtagattgaatttttttttataatccaagtttgcattcggtcgaagctttattttactacaggacttggtagattgctcaatgatatttttcgccaaagaagatattttaacgtttgaatcagatgagttcttttctggtatgtgatagcattcgtcagattgcatggcggatttattggatagttcttccaaagacttgacgtgagttaacaaaaccttatccaatttatccactacatttgtatagtcatctggcagaaatgtattagcatactcaaaatgtatatcttcgtcatcatcgtcttcctataaaaaatttgttccaaaatattgcagctagttaaaatatttacagttttaaactttatactttgattaataaaaatggttttatcggttatcaatgggtcacacaactgtaggcacttattttggataaataaataatatttttctacaaattctcaactcccactgcggtctgttttaagaatacaatcacaaaaatatttaccattaacattattgacttttcaaatattatacatatcgctatggactttatagtcccaacacccatctcatctatatggaatgtgggtattaatagtattactaacctggttaagcacatattttataaaacgagtttgaggattcatggaaaatcgttagtaagcgtatgcgaatttgaccgtaaggtaaatatatatataaagatatactccaaacaaaaccatgattttaagttacgagattgaaggcggttactctgaggcaacaagtcgaaatcggatctaaattaaaaaccagaacgaacaatattttttttaatttaatggtgcgcattttttagcgtattaaattctacagtggtataaccccttactatagttatgaactaagtgtttatttgggaatttttttttggtattagaaatttcgacttacagggtatagaattcgactaactagtagcgttactgatgtactactcctggctatctgagtttctaactcctcctggtttttaacatccaagccgttaatacgaagaatctgatccccctgtcgcaggcgcccatcacgataggctatactttccggttgtacaccactgatgaacacatcctcactatgttctaaaacgttacctagtatgtcacctttattcgtgtcggtacttgattgctgaattccggaggaggtaacaatgagcccgatttgattgctgcttgactgttcaacacctttaacaagcgttacttcctgttgattataaaaaaatactattattttgaatcccaacacacatatctaagcaactgacagttttaggatctgttataaatacatcggtttcaataatatttatgtagacggcgagagtaaataaaccactggcgtacaaaaggcaatcaccttataccttccaaaaatttttatttattttatttgatattttttgctttctcgaaatttgtttaaatatcattgtgtgcaaatacttagcaagtgacagtgtacacacaactccaaaaaattttaataataaactttgtgaatattaataataactgttatgcccgtccgaccgctcgatcattcaaagtctacagatggcttgtgttggtatatagtctctcctcaacgaatataacaaaactgcaacatacatatgtatgtacatatggagaatatgagcatttaaaatttctgcacttcgcaagggcaagggttgaatgtgggcccgcagcccaagcaaacgctacacaaatgctcatacaaacgcaatttgtatttgcattaaataagcatagaatgggtcttaagtgtatagagaagtcgccatcgcacatcgcgaagacagaccagaacagttttgtggtactgctgtagtaatgtatggtaaatacctcaatgtcgatttccggttccaggcattgttcgaacaaatggtgttcatgctctatgaagttgtcggtaattgtgttaaccaaatcgttatcctttaaaacgtccgtaccaacgacagattgggtttgagtttccttcgatgcggcttgtagacttcccaaacgatcctcatgacttctagcccgaagagttaaaaccacaggagttttcgtctcgatttctttcaacgatgttgaagatgggcaatttatttgttgagaggcactggcagctgtgatcgtcccttctgctgacttgtcagttaggacagaaagttctccgggattgtccacttttgatattttggcattggagccatgttttaattctaaatctaatgcattgtgtttctgtctgcgtatttctacgacaagggtttctttagattgaaggaacttttgaaccgcttcatacctcgacaaatgactaatatcgtaaccgtttatctgaaacagaatatgtgcattttgaaacgctaaaaaacagatttcacacgaatggaactatttatggtaaaacgagaactcggttcttagtcctactttatattgaacttacttttaacacaacatattcgtactccacgtcggcaatactcatagtgatgcttaaaatccaaaactcatatttattttcatttaattgtatacatattttttcgaaagtgtggccaaaccttttgttttcatttatatcatttacgtattctttttgataaaaattgtaatcgattctcttaagtaatcgtttaataactcgcaacggaatggaaaccgttaacggattgagaaatcatagcaattaaaattatccgctcgtataaacgcatattttcagactgtaccaattttcaattcatattgttgaatataaagttgaagttgatgtaatgaaattgataatataatataatatttcaatggcttaggcattgataaccacgaaaagcggaggtgccccttgactaaaaagagttgctatagaatggtttttgtaaccactattgtttgatacgcacctgtcattgaagttcttgtcgtttcgtatcaattttgtgctatgtaaatgaaatggaaatggccttagtgacttaactgtgtgaacacaatataataatttatttccgatacttttatcttgatctatcgatggatgcgtatttcttaaagcatacacatatacaattatatagagcttaaatagccggatcaattcgtatttaaggttgtatgatggttaaaacgggaaatcgcagtaatttttattatttaaatagtaaatttaaacttcagtaaaaatatcctaaataatgtgaagtgtcaagagccaggtggacatagccatatccgtacgcccgtttctcactaaatctttctaaaagcctttctgttgccgatactatgcatactacatgtatggcagaaagacctcgacaaaggggaacatacatacatatcttcttttttgttagaaagtgttttatctcggtattgaacagttttcgaccatatgccttggaaaagtcaaattttttctgttcgtgatcataaatagatattattcagtataagcatataaaaatcggcttgccgatttttgtttatttcctatattatacccattacttgtaaagtaaaat

SEQ ID NO: 2201 - DNA, 2532 bp, DROSOPHILA
aatgaaaataaatatgagttttggattttaagcatcactatgagtattgccgacgtggagtacgaatatgttgtgttaaaaataaacggttacgatattagtcatttgtcgaggtatgaagcggttcaaaagttccttcaatctaaagaaacccttgtcgtagaaatacgcagacagaaacacaatgcattagatttagaattaaaacatggctccaatgccaaaatatcaaaagtggacaatcccggagaactttctgtcctaactgacaagtcagcagaagggacgatcacagctgccagtgcctctcaacaaataaattgcccatcttcaacatcgttgaaagaaatcgagacgaaaactcctgtggttttaactcttcgggctagaagtcatgaggatcgtttgggaagtctacaagccgcatcgaaggaaactcaaacccaatctgtcgttggtacggacgttttaaaggataacgatttggttaacacaattaccgacaacttcatagagcatgaacaccatttgttcgaacaatgcctggaaccggaaatcgacattgaggaagtaacgcttgttaaaggtgttgaacagtcaagcagcaatcaaatcgggctcattgttacctcctccggaattcagcaatcaagtaccgacacgaataaaggtgacatactaggtaacgttttagaacatagtgaggatgtgttcatcagtggtgtacaaccggaaagtatagcctatcgtgatgggcgcctgcgacagggggatcagattcttcgtattaacggcttggatgttaaaaaccaggaggagttagaaactcagatagccaggagtagtacatcagtaacgctactagttagtcgaattctataccctgaagacgatgatgacgaagatatacattttgagtatgctaatacatttctgccagatgactatacaaatgtagtggataaattggataaggttttgttaactcacgtcaagtctttggaagaactatccaataaatccgccatgcaatctgacgaatgctatcacataccagaaaagaactcatctgattcaaacgttaaaatatcttctttggcgaaaaatatcattgagcaatctaccaagtcctgtagtaaaataaagcttcgaccgaatgcaaacttggattataaaaaaaaattcaatctacctttaagccaagaagaagttcatctgcaatatgagtacgatgaaagcgagcacatttacgaaaccattccagaagattctgaaagtgaaccagtgtattgttcaccgtaccaacgttcaaacgacaagacgtcaataggttgttcatctccaatagcatcgagaccggccgaatcattagaaagaacaatgcaacaacaaactcaaagagtcgcccagtggttgggcttgaagccacaataccagaaaactagacaaactctagttggtcgacccccgccgttgaaattagtacagcaacctacttgtagtcgtgtttttacattgcgtagcaccttaaccaacacaagcgcatccagcagtagtggagtggcatacagctcttatggacaaaataatgttgttacagggaacgccgcggctcctggcgaagaggtcgataactcctcaagtgcctacaacactggtgattctaataatagcgcctccccccatcaaaatactacaaatcctgatgaagccatcgccactggtcgcaagctagatagtactgttattgatagccccaatgatcatttggatgccacaggtgtaagcactatgttgctattaccattcggcaagtctggccgtattggtctctgctcttccaatctgcctacagcgtatgtcagcgagcggtataccaacgttgggtctgaaaatgaaattcatccacttaaaagcgacattgaaatactaagagttaaaccaactgatgattcctatagtcattgtccacagtttaacgccccaaatttgagtagttaccactttgttagtagtcaagaggttgcaaacagatgtcatatttcaacaagcttacaaaaaaatgctactttgcttaacggtgaaagtgctgaggaaatacccatggtatggaaggttaaaaggcgaccagatggaacgcggtacatagtaaaacggccagtacgtaatcgaccccaagttgcattgcggaaaaatatgcgttacaacgaggttaccacgacggaagacgatacaatatctgaagtaaaaataggtcgttattggacaaaagaagaacgaaagcggcatatcgaacgagctcgagagaagagacatcatcagacgcagcaacagcaacaatagccacagtaacattttccttttgtaccatttaaaacttacatagctttaacaacagtcttaagaacactaattggatttactgtcgaacaattttatttgattgttatggtcgtcatcaaaacttaaagagattatcaaggtgcaaaaacaagatttgtcataattccactttaaaattttataatctaa

SEQ ID NO: 2202 - protein, 767 aa, DROSOPHILA
MSIADVEYEYVVLKINGYDISHLSRYEAVQKFLQSKETLVVEIRRQKHNALDLELKHGSNAKISKVDNPGELSVLTDKSAEGTITAASASQQINCPSSTSLKEIETKTPVVLTLRARSHEDRLGSLQAASKETQTQSVVGTDVLKDNDLVNTITDNFIEHEHHLFEQCLEPEIDIEEVTLVKGVEQSSSNQIGLIVTSSGIQQSSTDTNKGDILGNVLEHSEDVFISGVQPESIAYRDGRLRQGDQILRINGLDVKNQEELETQIARSSTSVTLLVSRILYPEDDDDEDIHFEYANTFLPDDYTNVVDKLDKVLLTHVKSLEELSNKSAMQSDECYHIPEKNSSDSNVKISSLAKNIIEQSTKSCSKIKLRPNANLDYKKKFNLPLSQEEVHLQYEYDESEHIYETIPEDSESEPVYCSPYQRSNDKTSIGCSSPIASRPAESLERTMQQQTQRVAQWLGLKPQYQKTRQTLVGRPPPLKLVQQPTCSRVFTLRSTLTNTSASSSSGVAYSSYGQNNVVTGNAAAPGEEVDNSSSAYNTGDSNNSASPHQNTTNPDEAIATGRKLDSTVIDSPNDHLDATGVSTMLLLPFGKSGRIGLCSSNLPTAYVSERYTNVGSENEIHPLKSDIEILRVKPTDDSYSHCPQFNAPNLSSYHFVSSQEVANRCHISTSLQKNATLLNGESAEEIPMVWKVKRRPDGTRYIVKRPVRNRPQVALRKNMRYNEVTTTEDDTISEVKIGRYWTKEERKRHIERAREKRHHQTQQQQQ

SEQ ID NO: 2203 - DNA, 3181 bp, DROSOPHILA
aggcagccggctaaaacgtagcactagaagtgtgcaacgtaaggcgacaaagtctgcaaccttaaaacggtagttatttacggatgctgacattattttaaaagtagttacaccatttttattgctcttttttgaattaacatttttacatctattttgtgccttacttacgtttttctataaacatatcgatagcacagctgtttcctcttgcgcatctctaatcacgtttacgtaaatttcagaagagcagcaacaagatgtctagaaatttgtttttatcaattacaaactttattaggaacttagagagcttgttcctgccacatggaggacaccctcctggtgagaagcaccagcccaagataaagttaccctgacttacccactttttacacagctttagcgttggccggttttcagcatgatcacagccctaaatcctcccaggaattcagtttgaagcagcttattggcgacggattgctgtgggctgttccgaagcacagaagatccgtggagaaacgcctgaagcggaagttcggatatccggaatacaactggaagcctttgagggagaagagaaacctccgctcctgtctgcaatgtggccatgaccacgagatgggagttctttgtcgtaagtagccttaaaagtatacaaagaggtagccacctttaatgttgctcttccagccttctgctaccaaaaggtcctgaaggagactgagctcatgcagtcgaaaatccaggagacactcggtctagatcccgtggacaaggaagtaatcgttctttatgaaggcgagaaggccgaacagtccacagatgatctgaaaaacaagcgcatcgtggagatgaagaagcctcgtcccatgtggttcaccaagaatctgctccaaaaatccacgcagcagctgtccgaaaccaaggaagtcaagccctccgacttggcctagatactaagcatccattgtgcattaaatccacacgttcgttatcaaatcgatgctattttattctctgtgaaggataaggaccttgcttgcttcaggaatccgttgttaaagtcctgggcactcataggttttctaccttccacgcgtaactgaagcacttccaactgactctgctgagcacatccgattatgagggatctcgacttccttaggtagctgatggcaccaggttcttggacgggaactctcttctccggtaatcgcaactccagcaactgcacttgcttgcccaaaaagttggttgtaaggtttttgtagccatacaaagctcgatgacgagtgtatatttcaatggcactcagctcggaccagataatttctgtgattttactggtaatcttgggagctgaaggcaaaaatatagtttatataggttctcgaagtgcttagatatgctttaccatagctgacccttgaactatcttggggtttggcttccttaagtcttactgataggttgttaatagtatccacaagtaactcggctcctagcgacgccaaagatgcatgcagatccggcatgaagacatcgggattaatagccacttctcgctgagctaaaatctaaagcataagtcgtcaatactactgcatacaatggtaagataagaatgaacttacatcaccgatatcgaaccggtgaggttcgattttcatgatggaaactccagtgctggcatctcccttcatgatggcgtatatgatgggagcagctccccgccatttgggtaacaaactagcgtgaacattgatcatcccataaggaaatccattgatgatactaccaggaatcaggtggccaaaggagaccaccacacccagatcaaattgcggacacacagaaggatctatgggccacttttgcaggggaagcttctccttttccgcgtaggtcctcacacagttggcgggacttttgaaggaggtaacaactcccaaacgatcactaagaaaaatattcttattaatccaatttaacattattgtttaaaacattttacccgcagtttttgtgtagcgcctgtaagctgggcaaggaaaaattgtcggtaccgaaaaagagaatttttggagggtggtaagttcccttgcagcgctgtgcaattgggattacattctgccacacttttctcttatatttgtaaaaattattgactaaactcttgccgcaaaacatcggaaaatttgttggataataatgcagcgtaaacaaaaacagctgttcgcgataccagctggtcactctaccaaataacgtaataggaatgctgagatagagtgaaacctgttgaacctatcgtcttcaaccatgtaaatggtggtctaactttataagatcaagagtcgttatttttgtttaagtaattaaacttagctcaatacattactttacttttatttatctgtcttcagtgactatagactatcggtatagtgtatattatttttttaagttcatcgcacggtcatactaatgagaacgcaataaaaatttggaaaatcaaacatctacaggaaaacgtatatttttgggatcaagtgccaaggaactccaatactgcagaatggaggcatctgctgccaaaatcacgcctatggccagttccatgtccgcttccggatccacaaactccccctccagtgaaaaaatgaactacgcactgcaagtggcgctgcagacgatcaaggagcggtgcatccagctgcagcgccgcgtggccagcatggaggaggagaaccagcagctaagggaggcctccagcaggtcggaaggtgctccaagggcaaacgaaatcggggtcactggggacgtcctctctctgaaagcacaggtctctgagctgcagcgccaaaaggagcagctggaggagcacattggcatggtatccaacgagaacagacggctctggtcccgcctatcgcagatctccaaggatcagcagctgaacgcactgcccagctcaacagactcgcgagcccagcaaaaccagaacctggtgcgctccaagacctttacgcagcactcccccaatcctcaccttcgccaaaagatgctctccgacggcattaaggatctcagtctggaggaaatagccctggatgacttcggtgccagcagtgaggaactaggttacccctacaacctgcaaaaggtggaggaa

SEQ ID NO: 2204 - DNA, 1014 bp, DROSOPHILA
agtttagtcaataatttttacaaatataagagaaaagtgtggcagaatgtaatcccaattgcacagcgctgcaagggaacttaccaccctccaaaaattctctttttcggtaccgacaatttttccttgcccagcttacaggcgctacacaaaaactgcggtgatcgtttgggagttgttacctccttcaaaagtcccgccaactgtgtgaggacctacgcggaaaaggagaagcttcccctgcaaaagtggcccatagatccttctgtgtgtccgcaatttgatctgggtgtggtggtctcctttggccacctgattcctggtagtatcatcaatggatttccttatgggatgatcaatgttcacgctagtttgttacccaaatggcggggagctgctcccatcatatacgccatcatgaagggagatgccagcactggagtttccatcatgaaaatcgaacctcaccggttcgatatcggtgatattttagctcagcgagaagtggctattaatcccgatgtcttcatgccggatctgcatgcatctttggcgtcgctaggagccgagttacttgtggatactattaacaacctatcagtaagacttaaggaagccaaaccccaagatagttcaagggtcagctatgctcccaagattaccagtaaaatcacagaaattatctggtccgagctgagtgccattgaaatatacactcgtcatcgagctttgtatggctacaaaaaccttacaaccaactttttgggcaagcaagtgcagttgctggagttgcgattaccggagaagagagttcccgtccaagaacctggtgccatcagctacctaaggaagtcgagatccctcataatcggatgtgctcagcagagtcagttggaagtgcttcagttacgcgtggaaggtagaaaacctatgagtgcccaggactttaacaacggattcctgaagcaagcaaggtccttatccttcacagagaataaaatagcatcgatttga

SEQ ID NO: 2205 - protein, 220 aa, DROSOPHILA
MINVHASLLPKWRGAAPIIYAIMKGDASTGVSIMKIEPHRFDIGDILAQREVAINPDVFMPDLHASLASLGAELLVDTINNLSVRLKEAKPQDSSRVSYAPKITSKITEIIWSELSAIEIYTRHRALYGYKNLTTNFLGKQVQLLELRLPEKRVPVQEPGAISYLRKSRSLIIGCAQQSQLEVLQLRVEGRKPMSAQDFNNGFLKQARSLSFTENKIASI

SEQ ID NO: 2206 - DNA, 3116 bp, DROSOPHILA
tcagatttgatcgatgcgacaacgcagagtaaaataataataatttttcactaaaaaaatttattatttttaagtttttcttcagtgtgtgcttaaaatgatgaagctttcatattttgtgttattgatcgtcctggttttgcgaggatccttgggcaagccactgcataaaaaagaaacctgtctagccaatcagctttctatgattgatttaatgagtgaaatcaattccaaattggacagaatcttatcgatttcacacaaagaaacggatttatccagccagcaaatgaaattgcacagcaaaaaaaatgcccaacaggaagcgtttcgcaatagaacgcaatcccgttttcaaatatccagcaacaaaatcgaaagtctgttagaaatgtattccagtactacagtggagcctctgccacagaagtttgcgttaattggcaagcgatcattctatatagaaaataatgtggaaatttcctgggctgatgcggcagctgcatgtcgcgaattcggcggttttttggcagcttttaagaacgaagaggaacttaagaccattcaggcaagattgaagttctggtggtactggacgggtataaatgatttgaaaaccaagaagttcgtatccctggcttctggaaagcaatcaacgatattccaaagacatagttataaaaccaatcacagcaaatcctgcgttgcggtggatccccaatatatgtccgaatttaattgtgataccaaattgtatttcatttgccagatggatgaagacacgtaatacattactgctaataaagaacttgctctaattttataagctattaacacacaaaagtgcgttttttttttctttctcaatataaattgggaattggaatataagaaatttgaattcattgccatctggccacgctggcgattgcaactgtcatcggtgctatcgataatgccaaccggcggcacacggctatcgatagcgcaatattgtgtgttgaatttgcacgtgtttcaaagtaagttggttgttttttatcattgaaggcatttcgttaataacaaaacggcgccatgcagcacgacgatgtgagtagcaggtgtatgaatatgcacatttgttggtgtcctaatcagattattatcaatttgccaggtggtctggagcatcatcaacaagtccttctgttcgcacaaagtgaagtgagttgaaatgcagttaattataattatgtagaaaatttatgtattcaatggcaatctaaatcacacagaaccgacacacgcaccttctgccgccatgagtacaatctcacgggtctgtgcacacgcagaacgtgtccgctggccaattcacaatatgccaccgttcgcgaggagaagggcatcatctatttgttcatcaagacggcggagagagcgcatatgccgagcaaattgtgggagaggatcaagttgtccagaaacttcgagaaggccatcgaacagatcaacgagaatttggttttctggcccaaatacatgatcgccaagaataagcagcgtttcctcaagatcacccaatatctgatacgaatgcgtcgtctgaagttgcgccgccagaagctcattgtgccgctatcgacgaagatcgaacggcgggaggcgcggcgcgaggagaaggccttggtggccgccaagatcgacaatcacatcgagaaggcgctgatggatcgtctgaagaatggcacctatcgcgacatctacaacttttcgcagaccgctttcaacaaggctctggaggcggaacgcgtggacgaggatgatgaggaggagctagacgacgaagacgagaatgaggagcagctggagcgcgaaatggaggtggacggcgacgattcacgcgaagctgaggaagtacagagatccctgctcgacgaggagttcgtcgaggcagatacggacgatgaggaggaggatgatgatgatgatgatgatgatgacgaggacgactacgacagcgattccggcaagcgggaagaggtcgaggtgggcagcgatttcgaggagtccgacgaggatgacgatgcggatgcagatgatattgaggtagtgtttctggtcatgtatcaggcttttcttttttattttgttggcagttttctggagcatttaacgatttccaaatcctttttcaatgaatttcttttaatattgaaaattctgagtatgtaaatagttggcaattgcttaaatcctgccaccttcttccgaaattaccataattagaaatagcaaacgagttctgcccgcttggagcttggagaataaagctttccgagcgccgttcgccgcttttcattcagttgcgtcggtttccattcagtgcgcgctaactaacagctccagaaaattgccaaaaaaaagaaaactaaaacgaaacaaaactaaattccaattgccaaaccgaacttaaaacgaacaattgcattctaacaggagaccaaagtgccagccaagaaaaccgccagcaaagcgaagaaggacaagaaatcgccggcgggcaacagtcgacgcagccgctcgaagcccaaactgcagctggagtacgagtatgaggtggagaaggaggcacagcggcagatgcgccattagccaggtccacaatatatatttctcccccccccccatgctcaatccacttagctgttaacgcttattgtttagccggttaagaatagtattttacataaaaaagaaagaaaaaaaaacaaaactagacaagtgcaacactatatgaccgaaaaatgcatctcatgcaggatgcacttcatctgcatcccattcgctttgctttctggccaaaaagcgaggctggctaactgacattgaaagtgggcggtgcggggcggtgtggcgacaatgcagtgtttaaaaccagttttgaaaaatattctaaaaaaaaaaactatgcaccatattcgacgcagctgtagcgctattgcataccctgtaaaaagcgcggagttgcgtggcaagcaaactactttaaataggagaaattcttttttttttttttttgaaaatatatatacatatttttgtaataaactgtacagtttgctgtagcaaat

SEQ ID NO: 2207 - DNA, 1109 bp, DROSOPHILA
ttgaatttgcacgtgtttcaaagtaagttggttgttttttatcattgaaggcatttcgttaataacaaaacggcgccatgcagcacgacgatgtggtctggagcatcatcaacaagtccttctgttcgcacaaagtgaaaaccgacacacgcaccttctgccgccatgagtacaatctcacgggtctgtgcacacgcagaacgtgtccgctggccaattcacaatatgccaccgttcgcgaggagaagggcatcatctatttgttcatcaagacggcggagagagcgcatatgccgagcaaattgtgggagaggatcaagttgtccagaaacttcgagaaggccatcgaacagatcaacgagaatttggttttctggcccaaatacatgatcgccaagaataagcagcgtttcctcaagatcacccaatatctgatacgaatgcgtcgtctgaagttgcgccgccagaagctcattgtgccgctatcgacgaagatcgaacggcgggaggcgcggcgcgaggagaaggccttggtggccgccaagatcgacaatcacatcgagaaggcgctgatggatcgtctgaagaatggcacctatcgcgacatctacaacttttcgcagaccgctttcaacaaggctctggaggcggaacgcgtggacgaggatgatgaggaggagctagacgacgaagacgagaatgaggagcagctggagcgcgaaatggaggtggacggcgacgattcacgcgaagctgaggaagtacagagatccctgctcgacgaggagttcgtcgaggcagatacggacgatgaggaggaggatgatgatgatgatgatgatgatgacgaggacgactacgacagcgattccggcaagcgggaagaggtcgaggtgggcagcgatttcgaggagtccgacgaggatgacgatgcggatgcagatgatattgaggagaccaaagtgccagccaagaaaaccgccagcaaagcgaagaaggacaagaaatcgccggcgggcaacagtcgacgcagccgctcgaagcccaaactgcagctggagtacgagtatgaggtggagaaggaggcacagcggcagatgcgccattag

SEQ ID NO: 2208 - protein, 343 aa, DROSOPHILA
MQHDDVVWSIINKSFCSHKVKTDTRTFCRHEYNLTGLCTRRTCPLANSQYATVREEKGIIYLFIKTAERAHMPSKLWERIKLSRNFEKAIEQINENLVFWPKYMIAKNKQRFLKITQYLIRMRRLKLRRQKLIVPLSTKIERREARREEKALVAAKIDNHIEKALMDRLKNGTYRDIYNFSQTAFNKALEAERVDEDDEEELDDEDENEEQLEREMEVDGDDSREAEEVQRSLLDEEFVEADTDDEEEDDDDDDDDDEDDYDSDSGKREEVEVGSDFEESDEDDDADADDIEETKVPAKKTASKAKKDKKSPAGNSRRSRSKPKLQLEYEYEVEKEAQRQMRH

SEQ ID NO: 2209 - DNA, 2837 bp, DROSOPHILA
cggtggatctggtgctcagctgtgtggacaattttgaggcacgaatggcaatcaatgcagcgtgcaatgaacgcaatctcaactggtttgagtcgggagtttcggaaaatgccgtctcggggcacattcagtttatccgtcctggcgataccgcctgtttcgcttgtgcaccacccttggtggtggccgagaacatcgacgagaagacgctgaagagagagggcgtgtgcgccgcttcattgcccacaactatgggcattacggctggcttccttgtccagaacgcattaaagtatctgctgaatttcggcgaggtctctgactatctgggctacaatgcccttagcgacttctttcccaagatgacgctcaaaccgaatccgcagtgcgatgacagaaactgtttagttcggcaaaaagagttccaagccaggcccaaacctgtgctgatcgaagagaaggcagtcagcgaagagccgctgcatgccaccaacgaatggggcatcgaactggtcgccgaggatgcgccagaaagtaatacaacgcccgccgaaaccccagtgatgggtgaagggctgaggctcgcctacgaggctcctgagaagtccagcgaaacgtcagaggaaactgtatctgcagctaccgcggacgaaaccagtctggaagacctgatggcgcaaatgaagtccatgtaaattgattccgtactccgtatttatagacactttttgtaaaacacacactttttttttgataaactcagcttcgatttgtgtaaaacttgggccgagccattttttatttatttatatatagtaacttttagtcacttgattaaatgctttatgctcaaaattatttgaattacgcgggaaatttcaattcttgcagtttctagtatttcagtattttaagcttcccctatctggcagcacggtcaactagtccgttatcgattggcagcgataacgattgacaattttgttgtcgcgttgtcacacaaaaacgaagaaaactcctgaaaaaagaaaaaagagtttttctgagcatttcgcaaacttctcttggaaatcaagggcatcaaaacacaatagagagcagatagaagatgggcaagaaggatgaaaagtcacagcaaggcgaggaggtgagtaaaccggttgccggcttggcatttggtccattaagatgtgttccacgtcattgtagaatgtaaatgtaaactaagtgaatatgtgcataaactaactccatcctgtttcatgtgccctgccagctggtgaaggtcaacaagtgggatggatccgcagtgaagcacgccctcgatgatgcagtgaaaacctgcctccttggcgatcgtccccagctgaaggagcaattcggcctggtcaacacccgtttggccctctgcgccctcgccgtttccgtggctataatggcccatgcttgggacttcacccaccccttcccggaatcccgtccagtgctcctcttcagtgttttggcctactttgcactcctcggcattctgaccctgcactccagtttccgcgagaagggcacctttgcggtggccctgcagaaggacaaggagcgggagcgcctgtgggaggccagctccgatatgcgcaagtacgacgacaagtacctgctgaccctcagtgttcgcgacacgaaaaatggcaagcggcgcgagcagagcagcaacaagtcgtgcgccgccttcatcgatcagaatggcatcgtcctggacaacctggtggccaacgaggtcaaccgtctgttcaacgccttagctgccgacaagaagaacgctagcagcctttcttctaattaaaccaaattccccacttttgtctcattaaattgtacacttttgtggtaagccgactgtttgtcttttgtaataagcggaaaaactataatataaaatgaattctttgatttacagcttaacataaattgtctgaatctgatagaaacttaaccaatgatttgtggactattttattataatttcatgggttcagctgcaaaaatctaaaagttaagagggcggggattccggtggcggcagaggaagaggagagggtgcccaaactggaactggcggcgatggggaaacccatattgcgctgataaggccattgatattaattccatatttaacctggctgccttcccagaagttaaacatcaaaattgggagttgtcgatgtcaaaacgtttatatatatatatcaatgtttttatattccaaaagctcatatttgtgacatactaaagattttggctacaagagagtaatgtacgtaatgtaaagtctatatgtacgactaactcatgtgtttttaaaagattattctatttgttattatatttattcacaatgtggagatgtcccaatccaagtgtacccagaaatccgagtgtttttgaccttcttcctgcggcgctccggcttcctttgtcatcatcatctttttattttttcagatatctgtatggggcactacggttccttttcccatttcccattaccatcttctctttaatttctacatatttcttatgtctttccaaagcctcaatttctgacatcttctgggccattttctttttcataatcatctgcttttctaacacctttgctgccattgtatccttggccgtctttagagcctccaattttcccttagcaatctttagtgtcttcccgcattgccggtccttcgacttctttttttgcactttccccttggccatcttcggcttttgcaagtttagcttttcctctttcttatttttctcaaggacttgctttgatgtctttcgcc

SEQ ID NO: 2210 - DNA, 708 bp, DROSOPHILA
caaaaacgaagaaaactcctgaaaaaagaaaaaagagtttttctgagcatttcgcaaacttctcttggaaatcaagggcatcaaaacacaatagagagcagatagaagatgggcaagaaggatgaaaagtcacagcaaggcgaggagctggtgaaggtcaacaagtgggatggatccgcagtgaagcacgccctcgatgatgcagtgaaaacctgcctccttggcgatcgtccccagctgaaggagcaattcggcctggtcaacacccgtttggccctctgcgccctcgccgtttccgtggctataatggcccatgcttgggacttcacccaccccttcccggaatcccgtccagtgctcctcttcagtgttttggcctactttgcactcctcggcattctgaccctgcactccagtttccgcgagaagggcacctttgcggtggccctgcagaaggacaaggagcgggagcgcctgtgggaggccagctccgatatgcgcaagtacgacgacaagtacctgctgaccctcagtgttcgcgacacgaaaaatggcaagcggcgcgagcagagcagcaacaagtcgtgcgccgccttcatcgatcagaatggcatcgtcctggacaacctggtggccaacgaggtcaaccgtctgttcaacgccttagctgccgacaagaagaacgctagcagcctttcttctaattaa

SEQ ID NO: 2211 - protein, 199 aa, DROSOPHILA
MGKKDEKSQQGEELVKVNKWDGSAVKHALDDAVKTCLLGDRPQLKEQFGLVNTRLALCALAVSVAIMAHAWDFTHPFPESRPVLLFSVLAYFALLGILTLHSSFREKGTFAVALQKDKERERLWEASSDMRKYDDKYLLTLSVRDTKNGKRREQSSNKSCAAFIDQNGIVLDNLVANEVNRLFNALAADKKNASSLSSN

SEQ ID NO: 2212 - DNA, 5827 bp, DROSOPHILA
cacaaaaaccaagtattttttttgtttttatatttttacaaatgtctcaagtgtaccagatgcgtctggcttcttaagcaagaaaggagcatgtaagcgaatcgaacgaaatatatatatgtggagaaaaactatcataatcattgaagttttattggcgttgcaagtggggagcacagttcacgtagtaacgaattcacatagtatctactcgtacaaaactaaataaaaataaatgcgataaaagtaattatataaacgaattgtaactttttgttaaaagagaattaaaagaaattaagagaattaaagaaattaaaagaaacttattgcattgccactggcttgaaggaatcatctcgagagctataagagctggtgatttggaatattagttaatttcaaactgttctgacatttttatgttaaatttctacttattgaagttgcaaatacttaccatagtacatgtagaattgtatacttacttgcatttataaactaatacaaaattctttcaaaagatgtctcctaaggataaccgaataatatattagtattttcgggaaagctaacaataaaatcttcagtggatagatattttccttgaacagcttataagaaagttaatatcttacacagatataaagattgtatatacagtataaaattcttttgcgtaataatgggttggttaatctataagtttttacaaataagctttttatggccaggagagaatgcgtcaggtagcaaattagataaattaaatacgaattaaaacgaaaatcccagagacctttagccctttaagcattttttaacttcgacgtttacagactatatgtatttataattaatttaattataaatatcaaaagtttaaaatacttttaatacaatcgttcagcaacgtaggatgtttcttcagttcagttctagccatatcataccattttggacatataaatacatatgtataacaaagcgtgaaatcgatactttgatactttaggataaaactttatttgatataatcaaaatgcatgcgggtataagttaaaaatgcgtaacatagtctgtaggtggttggatttttaggacacagatcaggaactggagaacgctccagtttagtggctgccgccgttggtggtgccattggccttgggcttctgcttgccggcggcaatgaaagtggtcacgtccagcttggtggccagagctttgagctccaccttgccggccgggttcttgcccaggatgagcacgctggggtccacttcgaggacgcgggccaacttgcccagaatctcggattcgttcagtcggattactcgtttgttgagcgccttgattgcgggatcggactgctggcggttcatgctcacgatctgcgtgatcagcgtctcctgacccacgacgcccaggacagaactaagtgggaaaaaaacaagaggttataaacggtggagcgaaaggaaggaattgcggtgatcatacccatcatcctgatccacgacgggcagctggtccacgcggtgtttcttcatcagggcaatagcctcaccaacagttgcatccgacttgagaatgaccgggggagcgggtagctccaactccgcgatggccaggctccaccaccagtgaccgtgctcgtttaccggctccttgaagttgcgcgcctccatccagttgtccgacacgaacttggtcatgtagttgcgtatgccatcgggcagaatgaccacgcaccgctggcctttcttcaatttgcgggcatgctcgagggcagcgtgcatcgctccgccactggacccgccgcacaacagaccctcctccgcgttcaggcgtctgctcatggggaaacagtctgagtcgccgattttcgtccacacatccacgacggtgtcatcgaatacggtgggcggaaagtcgtagccgatgccctccacctcgtagaattgcacatcggtcttgttgagctcagcagggcgggcaaggatcgagccatagggatccacgccgactatctggcaactgggaacctgctccttgatcttacgcccaataccactgatagttcccgccgttcccgccgagaccactatcatatcgaccttgttgtccagctgccacagaatctcggcggcagtgccatcgtagtgagccagcggattgccagcgttgcgatactgatccaagacaatcgagttgggcgtttcccgctgcagctgctgagcaacgtagatcagtccctccggcgaatcgtaggctgcctccgttggagtacgtatgatcttggccccgagggttcgcagcgcggacaccttctcgttggacatcttctccggcatcacgataatgcacttgtatcccttaacggcacaggccattgccagtccaatgcccgtgtttccagacgttggttcgatgatggtgtagcctggcttgagcaggccctgctcctcggcgtcctgcaccatgcggtacccaatgcggtccttcactgatccacccggattaaggaactcgcacttggcatctgtagaggggaaagaggcaattaaatgatcttagattagatctgttcgtattgttactctgaggccacattgtgggttaggaaatgagattgtatgactaagtcagtgaaactcttcggtggatttttaggctatagacttacacatctcgcattcgatgccgtcgctggcgggaatgttgttcaacttgaccagtggcgtgcatccgatcacctcgaggatgttgggcgtaatctgctggcggtgggcgatgccccgatggatgtggggcgacttctcggctgtacccagatgccatttgcacttggacggcttgccgggatcgatgaagtccgcgggcctctcgtatggcttcggttgtggcatctctgaaagaaggaatttatatgaaaaagtgtttgggaatctctgtagcgaatataacatattgttgcttattttaatatatttgtagaagcaatataaaagtgtatccttcttcttcttcttctatagaagaagaatttccggaacttgggaatacttttgtaggggcgtaccaagatactttcttacaatatcagaccccaactaagatacgatttattaaattattaacatatagtgataatagtatgacttgaaaaagcttatctgctcctgaattcgaaaagattcgattgatttgcgatctaacaaacgccagatggtgccggtgttacctccgatgacccgtatcttatcactccagattccggtgtgcaaatgggggaaaaatctcaatcaaaatatactttctgttgtctcattgcgacgaggttgcgaaattgcgtgagattactattcaatcgaaagcgaaaagatcgggcccaaaagcgatgacgtgacaaaactcaaaaatatgcaaatcagatggaaacaggaagggcagcttgtttatttcaatttgcacagatcccgaagtcggattatcttaagaagatatatgaaaatacgcattttttctagctgtaattatttaaaggatacaaaactaagattcttaggctcaaggctttccttatcacaacgaaattttaaaatacgcgaggtattccattaaaattcgattctttgtggaatttagtctatctttagtctattctagacgttcagttcccagttcgaagccctttctttaactggttattaaatagggactaccgtcgtttaagtgggtttccattttgtagataaggttttcaggtggcactgattgcttgcgctgtatacgacacgccactcgaaacctatctatcacctacaaagtaaactcaaataagggaacatttattatatgaaaagctttgccaacgttgtgagggtatcttgtgaactcaggactaatgatagggtaggtcggaatctgtagtatcggcatgtattaaattaacttaataattgaatggagcgcaaagtctttctaaaatgctaccttagtgtttatataaattttctaatataaataattaacgaattgcatttaaaaggaattaaaaaaacagctacgtactatttattaagcgtcccgttgaatctatttataaaattatacgttatgtttttaatttgaacgtaagctgaataaagtggtattgagatacttgatgtataaaactatccttttataatatgaatataacatataaatccaaatatttcaatgtaaggtgagcattaaagtaaagaaacattatcagacgactaaaatattatttatgtaaatttcgaatcaaaatatcgttttactattttaaatttacgcaaaatttacgcatttgaaaattatataattttaatattaatgtgtttcttttttttctgtgtaaactctaaactttcccggttttcctttttattgctctttcttgtttatctcccccgccgatgacatgcacacacacgcatttttccatatacatacatatgtctatacatatttgttttacaagcacgcggcttcaaaatagaacaacaaaaacaaaaacgaacggcgaatatgtgagaagaaaaaacaacatacaaaatagcaagcacatgtttctctctcgtattatttgtacttctacatatttatatgtatttcgccggttggaaatgtgcaagaaagaggcagcaaaaggaactttaagggaaaaggatcaggacgaatgcactttggacagttgtcagcttaagttttacttaccagtgctggtgattagtgacccaggagcgactaactagcgcgaactgcgaaaagcgaccgctacgatgctgccaacgaaggcaattgaacggaatcgggaatctaaccaacgcaagcaacttgcggctaacggtcggctgcgatgccggcagagacggcggcagcgcacagtggtgctggtgcatggtggcatgctcaacacaacataaaacaacagcgtggcaaatattcataatatatattttgacatacttacaaaaaatacttgaaatgtcaataatgccattgttttagttttatttccatttaaataaaaatttaatatattaatagaaattttagatttgacattactgctgttttcctctagaggtacatacaactggcccgtttttttccagtcagtctagaaaggcctaagagtaaattttgtataaattttaaacgtgtaaaactgttaaccgtaaatttaattcgcctcatattttaattgtggatttttcattggatttcattggaattgtggatttgttttttatttttaaaaataatatagggtatttatcccattgttatggtgagaatgaaacagatagtgataaccggtttcgctcttcttcatacacagcatggcttgatctgcgatttcctgcactgaaaataaatgcgtaatctaactatcagattccgcagtagtaccagataaacgtaatgctgaaatccgaatcagttgcctacgtttttaaaatagcaacctgtttattaagaaccaattcatcaagaactataaagctttaaattatctccaactgtgcttttacagctatatatgtgtgtatacatatatacatacatgtattgcaaaagctgcatgttaaacattttgtagtcttataatgtatgctacactatttaatcttatagcaagcattatacagcactttttttaagctcttacccacaaaacgaggtaattagtattcaaaagttaacttattttagttatggtaaattgattactgcgatctgtatatacgtacaaagtattattgtatatcataatatattattgtat

SEQ ID NO: 2213 - DNA, 1779 bp, DROSOPHILA
ttggcagcatcgtagcggtcgcttttcgcagttcgcgctagttagtcgctcctgggtcactaatcaccagcactgagatgccacaaccgaagccatacgagaggcccgcggacttcatcgatcccggcaagccgtccaagtgcaaatggcatctgggtacagccgagaagtcgccccacatccatcggggcatcgcccaccgccagcagattacgcccaacatcctcgaggtgatcggatgcacgccactggtcaagttgaacaacattcccgccagcgacggcatcgaatgcgagatgtatgccaagtgcgagttccttaatccgggtggatcagtgaaggaccgcattgggtaccgcatggtgcaggacgccgaggagcagggcctgctcaagccaggctacaccatcatcgaaccaacgtctggaaacacgggcattggactggcaatggcctgtgccgttaagggatacaagtgcattatcgtgatgccggagaagatgtccaacgagaaggtgtccgcgctgcgaaccctcggggccaagatcatacgtactccaacggaggcagcctacgattcgccggagggactgatctacgttgctcagcagctgcagcgggaaacgcccaactcgattgtcttggatcagtatcgcaacgctggcaatccgctggctcactacgatggcactgccgccgagattctgtggcagctggacaacaaggtcgatatgatagtggtctcggcgggaacggcgggaactatcagtggtattgggcgtaagatcaaggagcaggttcccagttgccagatagtcggcgtggatccctatggctcgatccttgcccgccctgctgagctcaacaagaccgatgtgcaattctacgaggtggagggcatcggctacgactttccgcccaccgtattcgatgacaccgtcgtggatgtgtggacgaaaatcggcgactcagactgtttccccatgagcagacgcctgaacgcggaggagggtctgttgtgcggcgggtccagtggcggagcgatgcacgctgccctcgagcatgcccgcaaattgaagaaaggccagcggtgcgtggtcattctgcccgatggcatacgcaactacatgaccaagttcgtgtcggacaactggatggaggcgcgcaacttcaaggagccggtaaacgagcacggtcactggtggtggagcctggccatcgcggagttggagctacccgctcccccggtcattctcaagtcggatgcaactgttggtgaggctattgccctgatgaagaaacaccgcgtggaccagctgcccgtcgtggatcaggatgatggttctgtcctgggcgtcgtgggtcaggagacgctgatcacgcagatcgtgagcatgaaccgccagcagtccgatcccgcaatcaaggcgctcaacaaacgagtaatccgactgaacgaatccgagattctgggcaagttggcccgcgtcctcgaagtggaccccagcgtgctcatcctgggcaagaacccggccggcaaggtggagctcaaagctctggccaccaagctggacgtgaccactttcattgccgccggcaagcagaagcccaaggccaatggcaccaccaacggcggcagccactaaactggagcgttctccagttcctgatctgtgtcctaaaaatccaaccacctacagactatgttacgcatttttaacttatacccgcatgcattttgattatatcaaataaagttttatcctaaagtatcaaagt

SEQ ID NO: 2214 - protein, 522 aa, DROSOPHILA; identical to SEQ ID NO: 2196

SEQ ID NO: 2215 - DNA, 8538 bp, DROSOPHILA
gtcctcgccgctcaagataggcagatgtgcccgagcgtgggacctcgataaggcggggactatttacttaggcctctgcgtaggccatttactttaagatgcgattctcatgtcacctatttaaaccgaagatatttccaaataaaattagtttcttacaaaaactcaacgagtaaagtcttcttatttgggattttacacatcaataaaaatatccaatcaatgtgtaaaatttaaatgattctttttcttgcggctcatatgtacattagatctttaaaaagatgtcaagaagatgaattaatcgagtggattgcctacttctcggctttggaaaaattaaatgtaagcttgagttggatttctggggaaaagaatataaataatatgctttaaaataagcagttatttaaagacgtttactgaggtaactcttcagcatgtccctaagttttcatttgtaattgcaatataaaacaggaatttctaagtcataataattgttttattattattattattattattattagtttacggtatatacatatatccacttaccgcttcgatttcctgctcgaatcgcacaggcctcagccggcatagcaccacgacgagatagatgaagttgacaaaaagtcccatgcccgaccacaggatgacgtccggtgcaaaggccaccaagtagccatgcatgcccatcatcaggcagccaatgagcagcatggcacgcatccacagggcgccgtagggaccgtgtggagccaaaaaggctaggaagagaaaggcccagccgagctgaaagtacaggtgatgtggcccgaggcactgttcgatggaccaatcgccgggattgatcgatcgcagggttccattgttgtcccaggtgatcgttccactgctggcggcgctcgttcccgccgtgctctgggcgattaaagtgccggcggcggaggcatctgctccagatcccgaactgcctggtgctcctgctcccgtagcagctgctctgcccatgccaatgcccatgacactactggcgctgctgccggcactgttgatcagggcgcccataccaacgccagctgcactgcccgccgtgctgggcattccgttgatccaggcgaactgccttcgtttcagtctgtcactctcctctcagcctgatcgttgagctattttttgcagcacgtattttgcctaattaccaaattgattggttgatgtactggttggttgttgtccacgctaggcgaatgccaaaaatctgccttttgtttctatcttccacctttctctccttcgcctaattcgtttgttgttgcttacgcgcggttttcctcaacctttgttggtggtggtttgttttgttattgctgctgcccttttcaaaatgtttgtgctttgcggttggtgtcttgaatgtattttttgcttgcggttcatatcctagctagttgaaatttgaattactttgcattttacagcttagtcagccgtttagttaatggccttagactcttatttccgtatttgtttaatatttagctggggctattggtgagctaacctttgatgaggctactgctgctgccgcctgtcacattttgcatcgcttaggcagctgctgaaagaaattgaaaaaacgttgtcaagaaagtttccagtttcagctaacgaattaggcaaagaaatgttaagtaggggcagttgctgaataaatgcgatagtaattggctttggcaatttattaattaactattaatggatattgcaacaccaacagtaaagccccgctgtgaactcttacagctgctagtgaatgccccagttcttggagtgtagccactccttgaattattactccttgagtagactagggaaaggatatcagatgacggactacttattacaaacagaaatgtacataatgcaattcaaaagaattatatttttacagtttgttatttattctctcaataagtattttgttattgactactgatattgatatttataaaacacattacagacctcaagaggaatttaatacaatactgattagtaacaaaggcgctgagtactcatcggagttaaagtaattgtttataaacatttaatatgattatgaatctcggctgactaatagtacatacagatgtggacatacatacagtatgtagatatgaactttagcgacttcttctcgtaacttcagatcacgacgcacccaaaattccgtataaattctcagaaacccgtaatattgtatatcatgcgaaaatctacaaaaaatctaggtaatcgggtataaatcatagcaaaatccactgaaattcacggaagcaaagactatctgcaatgttatttttttattttattttttttttttttcggccgacagagatccgcacaacctgtttccgactcgaccaggccaacaaaacttggccaaaagcactccagagagtatatacacatatagaacaaagcaaacaacgggtgcgagttttgtttgctgaccccaaaaaagaacgccagccgaacaaaaaaaaaaaaacactaaaaacactgggaaagtggccaaaagtgggcgagggcatggtctatacggtccgtggtccccatatagtttatggtattggggttggtctggtgagtgcgactggaaaacgaaacatttccggcctggacatgaataataaaacaaagccaacgagcaggaaagatagtgtgaaaagaaaagggagaaattgtggatacaagagcgacaaagaagggcatcgaaataatcaatttgatgtcgcaaagttcgtggtcgcccatgcactggaagaaaaagaaaagcccagaagataacatttccaaacttttcgacaatgccaactaaaataatgtgagcattgacccgatcttgatggcgtcttgatgatgtcttgacctgatcacgatggcgatacgatattcaaattctaatttaccataacatatctacgatacaggattttctctcagtgtgattattgacagtggtcaaccaaccgatgacaggcagtcagtctgacgtccacgatgatgatcataatgcgctagtgatgtggactgttactcaacactttgcatattgactgcactgccacaatgtctttggcgtgcgcctaataacgataatgatgatagcggcgcaagtgacacacatcagtcacaaaaacaaacaaggccaacacttcctcgtcattatcatcaactcttcgggggtgtgcagcagcaacacaaaaaaagcaatgtaaatcagttgagtgttaacgaaatgcaaataccctaaaaacggaatgaacatttaccacccagaatagagaaaagagtgcttgttcttggcctcggtcaaagaaatttttaaaaaacgttggcctatctattctattccgaatatctacagcgtagcaaatgaagagttgtccggtcttgaatatcgacgagcgccacctagcggaggatatacgtattactcatatttcctgacgtcgttctaaaaatcttcatttatttaaaacttatttttttaacaaattcttttgttctttttggtgattagctagctagttgaagtataggtagatgtttggaatacatatattagatagaattggtagaatttggccagaaaattaggaaaaagcattaatagggggggcgttcaaaatttaaatttcaatattgcactgcactgtcacttgaatctgtaatctaagtccaaatattccagatcataaagttcacgttcatacggacaatcaataaattgcttatggataatacaagcacaatataattcaattttttatattttatggactttaggtccgtgttgaaataacaattttttaagatatgtgcatacatatttatgtatataaagtaatgtttataatatatggtgattttggtttggtttattggtttaatgctttctcccgagcgcgcccaaactcaaaaactccaaatactttccataaagggtatatccacaccaacgcacgcacacacattgtgtggcaacaacaaaaatgtgggcagagaagatgaagtcatcgctttgttgccttgaaaaaaaaaaacacacacacatacaacacgaaaaacaaaacaaaaaaatacaaaacaacaaatgcaaatacaactaagcgcgacttcgcttaaatttaagtccatagccaaaagtaaaatgggtacaatgcgaacgaagcaagattcaaaaactagaaaaacacaaacaaatatgtagtacaagtgaaagaaaacatgaaactacatttaaaaataataaatagctataggtgcaactatgaaatgacctgcataaaagttacacttactatgttaactaagagctcaaaactaacctaaaacattgaggaattgaataaagacaatgacttaaattaggtttaaataatgcagttaattttcaaagtttttacgttttttaatttcgaagaacgataaaaaagacaacttaaaaggaaagacttttcttgcgaaaatcccaatagtttgcgactgataactgcgagcagaaaggaaaagtcgccgggtgaaaatcatgtgaaatagggtgggttgaatgacatgccagtggccaatgacgatatcggaaaagtgtgggtttaatggccgatatgaagtccctcttgactcccccaaccccattttttcacgacgaagtcatcgattgcctttgtccagcaattgatgtttgctcagtggcaatcatcgtgaaatcgtcgtggggggcatcatctaatgagaaatggcatttggctattacatgtaagcgattttttgtttgaatttccctgcaaatgattataattatggagaaagtcgcgggttttatagatgagtattatcaagcgaaatggaaattaccctttttcagcaaggagaaaactatcataggaggaaatacaatatatatttactaaacgcaaaaattccccttggacttccgattggacttatgtacatatgcatgtacttcgaactaagcactctgaatgtttaaaaacataaatgcattaaaattgactttaaaaataaagggcattcagatatcgataaggagctataaggagctaaggcgcccgcacaattccatatctcgcccgattctaattggtgtttggcccgcagacaaattgtggtcgtaatccaattggaagcggaacttgtatggcaacaattggaaatgaaaccggcgatagaagggaaaatacgaaacgaaaaacaataagagagagagagagagtgagagagagagggcgaaaaagggaagatcagacattaaagtcataagcttcgtaaaggcttaattacgtggaattaattgtgtaaaacacaacgcttgcagcatttcttaagattcctcgactgttcctttgttatttgtaaattttaactactttggtggggcaagtggagactggtgagccgaaagtgaaacggcggcaactttttgctgtcctccgttttttttttgcccctcaccaccaatttccgtttcccacgtgtaaacaaaaataataataacaataaccagacaacaggcaacattgtctcgccctatatgccatattaaattttacatcgtttttatggcccgaaacgggccagccacggcaaaaattgtgtaaattattttgaggcgaaagcagaaatcgaagaaaaaataaacaaaaacacttaatcactcaatggccatttaaatgggttaggaaatggtcgacatcagtatactatacatgcaatattgatggattaccttactctaatggtccactaacattttcagctagctcttagtgataggaaattttcaattgtgaatatcagttatggagtacgaatttcatccagagccgagcactgataagaaaacatttctatagttcagtgtttttgtacataaggtcatttatcttatcggaatgctgccttaggtgcgatatcaaatggctttcagttatccaactgtttggatttagataggtttttaactttacggtttgtttagacttagagaagaatttgcaaagcaaagcaatatgttatttatacatatatgtagttctcagatttttctaccaaagaatattattctcagttcatagcaaaaatacgcaccagttatttttgaaatgcataattattttttgaataattcgttcgttatttttgggctctcatttgaattatgagacttttgaattgcatagcaatgtctttatttatcgcctcagatctttgaagtggaattcgggaattggaaactcatttcagagctattctccccactgataaagtatttttggacccaatatatttttaaatagaaattttaaaaacgaatttcatccccattttccccttcttcatgtagtttagatctttggaaagatcgttaagttggaagttacgaaagcaattcatcccaattgggtctcaaaatcggaaatgagaatgtcacttcattgattttttcctaatagaacacgagtctaacttcttttgttgcaaaatattcgatttttgggagcttggataataataaatagtagttccccgatcttctctctctccctctcgttctctcgcctataggcacacaacttccataaatatacgcacacacaaacacacacacatagaagttgcatgccagaaatgccatgcaaatgcaaacacccacatacacacattgagagagtgggtggggtgtgagtgagtggtgggccgaaggaggagagaacgaagaagcagatgcagaagttggagtttgttgcttttgttttccttttcttcctttcccctaccccccttccacgccctcccatcatacattcgatttccttcttcttcttcttgaatgcgtgctggcaactgcaatcgctgcctctgccggcgtcgctgcccccacccgcacgcacacagtgacgtcccgatatatacacatacataacacatgcatttttaaaagcgtgttgatgttcgatttttcaccattcttgctgcactttacacacaaacaaacactcgccatcgttattatttaattacttttggcgcggcttcaattaaaaaaaaaacagcaacaacaacgctgcaagtaaatacacacacacacaatacatatgcaaatatctatgtatatattgcacataacaaagctgccactaaaaaaaatcaacgatttgaactagcaaatctcatacacgcaaataggaatgggcttgcccatgtattagtgagaacaatttcttaaatatttgacacgtgagtttttcattgttttaggtacaaatttttcttctatttaccagcagaagtcaacttgtatttactccgattcgcgttttttcggggatttggttctcgtttcgattgaaaatacatatatttcggatatgtgataactatcagtagtttttcagtggaaaccgtgattttcctgcccggcgattcatccgatgttttcttgtcatattttgttcgagatttttttaaaaggcaatgaaaacacgaagcagcggtgcttttatatgggaaatatatggcaatttaaacggctgtagctcgctctctctcgccctctctctcactcgctctcccgcaatgaaaacgaatttcgtggtgcacagtggtcgcaattgcatactagctgacaactttttaagattgtttacatttccttgatttatctgaaaattgttacatttttcttttttatttgtgcttacggttgctttggcgtagttgacatctttggtctaaacgtatttagacaacttttggtaactttctaaaaaataataatcgtaccccactgtgtggtggttgaaatgtgtttttcgctctctgctcactactcgtgctcgctcccacggagagtcgaaaacagctgggatataagcccaggaacagccggttatgaattgccgattcgaataccagccgtgcttttgatgactcactaatagtaactaatcataaatcgagaattaactgccgaataaaccgcaaatagcagccaaaagaagtggttaaaagggaaacaataaaacccgccagcggtcagagttgtcacccctattaccgatagaccggcgatagcacgcgataatcgatagcactctccgctctttgccacgaattgcaagtttgcgatcccgtcgcattcaagtttcagccattgttttgtgcaaaaagctaagtaatagtgcttcggtggggcaaaacaagtaatcctggacatccggaattcagtcaacaactcgcaccggtgacttagggactcttgcatcgaattaagcagcgccgaaaaaaagccggcaggcggaagagcaaggaaaatgacgctggacgtgggcggcgtcgccaggggactgctcacctgggacaaacaggagcacctggtcaagctggccattctcatcctggcagcggttttatgtgagtaaacagcgcttattcggcattagc

SEQ ID NO: 2216 - DNA, 1255 bp, DROSOPHILA
acaagaaaacatcggatgaatcgccgggcaggaaaatcacggtttccactgaaaaactactgatagttatcacatatccgaaatatatgtattttcaatcgaaacgagaaccaaatccccgaaaaaacgcgaatcggagtaaatacaagttgacttctgctgcagctgcctaagcgatgcaaaatgtgacaggcggcagcagcagtagcctcatcaaaggttagctcaccaatagccccagctaaatattaaacaaatacggaaataagagtctaaggccattaactaaacggctgactaagctgtaaaatgcaaagtaattcaaatttcaactagctaggatatgaaccgcaagcaaaaaatacattcaagacaccaaccgcaaagcacaaacattttgaaaagggcagcagcaataacaaaacaaaccaccaccaacaaaggttgaggaaaaccgcgcgtaagcaacaacaaacgaattaggcgaaggagagaaaggtggaagatagaaacaaaaggcagatttttggcattcgcctagcgtggacaacaaccaaccagtacatcaaccaatcaatttggtaattaggcaaaatacgtgctgcaaaaaatagctcaacgatcaggctgagaggagagtgacagactgaaacgaaggcagttcgcctggatcaacggaatgcccagcacggcgggcagtgcagctggcgttggtatgggcgccctgatcaacagtgccggcagcagcgccagtagtgtcatgggcattggcatgggcagagcagctgctacgggagcaggagcaccaggcagttcgggatctggagcagatgcctccgccgccggcactttaatcgcccagagcacggcgggaacgagcgccgccagcagtggaacgatcacctgggacaacaatggaaccctgcgatcgatcaatcccggcgattggtccatcgaacagtgcctcgggccacatcacctgtactttcagctcggctgggcctttctcttcctagcctttttggctccacacggtccctacggcgccctgtggatgcgtgccatgctgctcattggctgcctgatgatgggcatgcatggctacttggtggcctttgcaccggacgtcatcctgtggtcgggcatgggactttttgtcaacttcatctatctcgtcgtggtgctatgccggctgaggcctgtgcgattcgagcaggaaatcgaagcggtaagtggatatatgtatataccgtaa

SEQ ID NO: 2217 - protein, 191 aa, DROSOPHILA
MPSTAGSAAGVGMGALINSAGSSASSVMGIGMGRAAATGAGAPGSSGSGADASAAGTLIAQSTAGTSAASSGTITWDNNGTLRSINPGDWSIEQCLGPHHLYFQLGWAFLFLAFLAPHGPYGALWMRAMLLIGCLMMGMHGYLVAFAPDVILWSGMGLFVNFIYLVVVLCRLRPVRFEQEIEAVSGYMYIP

SEQ ID NO: 2218 - DNA, 4296 bp, DROSOPHILA
aaggcgtgcagctcgaacatggcgggcgcctcctccaggtaaagttgtcgagtggcggtgcgcacatttagactagcaatgacatccacaatcacgtcggaacgcagcgtctcgcccgtttgtacttcctcggcgaagacgattgcagtgttcctccgacgatcgtgagtgcggactgtcaccaccgcctggtatgcacattcgctgaagcccttgtaaatgggcatgacagatatcaagtcctggcgtgaggacgacctgcaagttcagcatagtagtagtagtagttctagaagttataaaattatatctgtatgacgccgatttaccatttgtagcagttcggctcgtcgacttccagggtaaagtttattgccttgtcttcgaatattggtagtaacacacgcgggtggttcaacctagctgcctcagaagcatgatttcttaccaaaatcagcaaaatcatgcaaagaatagaatccatcgtgccggcaaacgagccacgcgcggaacgagatgctggatagggatggacaagaatgacaatatcgcaaatatcaactatcgataaattatattatacgggtttcaaaaataccaatatatcacttattatatgtgatgtaaatcataatcagttgtatatctgtacctcaagttaaacgaagacttacatattacgtataacagctttttttataattatatttatttacaaataaaattgggtttttgcttgtaaatatttatcaaataacatcattttcgggataccctgcaactcagtcttaataggaatattattctttttgtattcctaaaataggactcgcttaagcttaattaacatttatttttctgtaatatctaaactaatcctagttaaactggtgacagctttagaaaaatactgttaacacaactcaactctatacagctgcacatgcagttaattgatgtctgtaatcgaaaagcaaaacgtctggcaacatcgggttgacttcaccggcagctgacttctcatgtaaccatttcgttataaacaagcaatttaagtgatccgaaattggggaagtgccatgctagaatttggtcgaacattgctgcgctggagaacgcggcactgcagtcgcagagtctctacgtggacgccgctggctacggcgtttaatgcgccaccggctaggcggatcaacttcacccacgacgatgttgtaagacccaaagtctgtaaaacgcaggacctctgactaggcatacatggcctttttcccgtagggcctctttggcatgcccgaactgcggagttttgagggcttctatctccttcgagacaatgtggaaagccggacgcaggagctgatctccgaggccacctccgatcaacgacgtcgaaagatggtcgacatttttgacgagctttctgactcattgtgcaaggtggcggacctcgcagagtttgttcgtatcgcgcatcctcagagcagatacacccaagcagcagagcaggcctgcataagcatttgcggaatggtcgagagccttaacacgcataagcccatctataaggctttaagccacgtagtggatcatggagataagctgcccaccagcgaagtggacagacatgtgtcgcgtttgttccttttcgactttgagcagtgtggaattcacttgcccgaggaggaacgtatgcgtgttgtgcggctaaatgactatattcttcagctcggccagaagttcatgagtggagctgtgcaacctagtgttcttccacgcagccaagtccctgagtcctttcgtaactagtaagttcacatataacactatctgggctatactaaagatttttttttgtcagctttcctacctctggggaaaatgtaattatcactggactgtgcacaaacgcagagaacgttcagatgcgggaggctgcctaccggttgtacctgcagccgtcaaagagccaggaggatcttctccgagacctactgctttgccggcatgaactggcgcgtagctgtggcttcgatacatatgcacaccgggcactcaaaggtagcacgatggagaaacccgaagtggtacgagagtttatcgacgagctgtcggaaaagctgcgaccgcgcgcagattgcgatttcgccctgatgtcacaaatgaaacgccgtgaaggcgggaaggcggatgcaagagccgaagtttgggatacgccgtattataccaaccagctgaggcggcaattatttgaggagcacgccaacgagttcctgccatatttctctcttggtggttgcatggaaggtctggacaatttgctacacgcgctttacggtatccgtttgcagaacacagatttaaagccaggcgaggcctggcacaacgacatctacaagctcgccgttgtccacgagagggaaggactgctaggctacatttactgtgacttctatgagagagtggggaagccaaatcaggactgtcacttcaccatccagggcggcaaacgtatgccggacggctcctaccagctccccgtggtggtggtcatgctgggtctagcgcaaccgcggtggagtggaccgacgcttctgtcaccagcgcgattggacaacctgtttcacgaaatgggtcacgcaatgcattcgatgctagctcgcaccgagcatcagcatgtgacgggaacgcgctgttccacggacttcgctgaggtccccagtgtgctcatggagtactttgcgggcgatccccgtgtgttgcgaaccttcgcccgccactttcagacccacgaacccatttccgaggacatgctaagacgcctgtgtgcttccaagaatctgttcgccgctagcgagacccaacttcaggttttctactcagcgctggaccaggaatatcacggagcatcggcgcggcatggccaaagcagcacagacaccttgcgctcagtacaggatcattactacggacttccctacgtagataacactgcgtggcaactgcggttttcccacctagttggctacggagccaagtattatgcctatcttgtttcgaaaacaatcgcttcctggatctggcagacgtactttgaagccaacccattcaatcgtcaggctggtgagaaatatcgggccgaaattctggcccacggaggagcagttcccagccgtaagttggtggccaactttctgcagcgcgagatgacacccagtgttttggccgacagtcttatcacagagattgacaccgacgagtcgaaaatcaaagaccttatgataacaagaacttaatacaacaaacaaataacagctctcttctaatattatactaagttatctttaattgccgttttggaatttttaaatgttggtagtactcttaggctggccccagcgacggcatcagttcgacacccacgaactccttggccaaacgcactcccaagaagaaaagtccgtagctcttgaccagcatcctgtgtgggaaatcagaattgtgccgattacataaagtcgcactgatcggagttaagaggaatgtatatatgaatgcacgctcaccattgaaactcgttgttgtaaatgctgcgcacgatgctcaggggatttgaagactttaccattttgatcggattcttcggatatttttattttcagctcgattttgttattttgttttgtgcacgaggaaatgctgacatttgtgagcgacagtttcatccctgacgttagctttccgttcggtattttttttgtgacttttctattcaactgagtggcagcgcttgaaaatggcgcgaattatttgaagttgctgataatcgtaataatactgtcagctggggtcagaactagattcctttcctatgtcattgtcttgggtcttgcaaagcgggaaaactaaaaggcatggcattttagttttattattaataatataaaatcattccgttattctgaacttaattcactgcgacacctctgacgtcatattttttttatgtagttaattttttttgtattttcaggttcgatcaactgaataggcttgccttttttccgattttcaaaagggaactcataggaatttaagcgaaataaggttttggttctgttagtttggtttttgaattatttttattttttcaaaaacaacaaaaatctaaacttttttggctcaactgtttgaccagtaaaactattaaataaaagtatacaataactgggaattttaaataataaaggactttgttaaggcgttatgtagttaccaccattgttattaatactt

SEQ ID NO: 2219 - DNA, 2179 bp, DROSOPHILA
cttcaccggcagctgacttctcatgtaaccatttcgttataaacaagcaatttaagtgatccgaaattggggaagtgccatgctagaatttggtcgaacattgctgcgctggagaacgcggcactgcagtcgcagagtctctacgtggacgccgctggctacggcgtttaatgcgccaccggctaggcggatcaacttcacccacgacgatgttggcctctttggcatgcccgaactgcggagttttgagggcttctatctccttcgagacaatgtggaaagccggacgcaggagctgatctccgaggccacctccgatcaacgacgtcgaaagatggtcgacatttttgacgagctttctgactcattgtgcaaggtggcggacctcgcagagtttgttcgtatcgcgcatcctcagagcagatacacccaagcagcagagcaggcctgcataagcatttgcggaatggtcgagagccttaacacgcataagcccatctataaggctttaagccacgtagtggatcatggagataagctgcccaccagcgaagtggacagacatgtgtcgcgtttgttccttttcgactttgagcagtgtggaattcacttgcccgaggaggaacgtatgcgtgttgtgcggctaaatgactatattcttcagctcggccagaagttcatgagtggagctgtgcaacctagtgttcttccacgcagccaagtccctgagtcctttcgtaactactttcctacctctggggaaaatgtaattatcactggactgtgcacaaacgcagagaacgttcagatgcgggaggctgcctaccggttgtacctgcagccgtcaaagagccaggaggatcttctccgagacctactgctttgccggcatgaactggcgcgtagctgtggcttcgatacatatgcacaccgggcactcaaaggtagcacgatggagaaacccgaagtggtacgagagtttatcgacgagctgtcggaaaagctgcgaccgcgcgcagattgcgatttcgccctgatgtcacaaatgaaacgccgtgaaggcgggaaggcggatgcaagagccgaagtttgggatacgccgtattataccaaccagctgaggcggcaattatttgaggagcacgccaacgagttcctgccatatttctctcttggtggttgcatggaaggtctggacaatttgctacacgcgctttacggtatccgtttgcagaacacagatttaaagccaggcgaggcctggcacaacgacatctacaagctcgccgttgtccacgagagggaaggactgctaggctacatttactgtgacttctatgagagagtggggaagccaaatcaggactgtcacttcaccatccagggcggcaaacgtatgccggacggctcctaccagctccccgtggtggtggtcatgctgggtctagcgcaaccgcggtggagtggaccgacgcttctgtcaccagcgcgattggacaacctgtttcacgaaatgggtcacgcaatgcattcgatgctagctcgcaccgagcatcagcatgtgacgggaacgcgctgttccacggacttcgctgaggtccccagtgtgctcatggagtactttgcgggcgatccccgtgtgttgcgaaccttcgcccgccactttcagacccacgaacccatttccgaggacatgctaagacgcctgtgtgcttccaagaatctgttcgccgctagcgagacccaacttcaggttttctactcagcgctggaccaggaatatcacggagcatcggcgcggcatggccaaagcagcacagacaccttgcgctcagtacaggatcattactacggacttccctacgtagataacactgcgtggcaactgcggttttcccacctagttggctacggagccaagtattatgcctatcttgtttcgaaaacaatcgcttcctggatctggcagacgtactttgaagccaacccattcaatcgtcaggctggtgagaaatatcgggccgaaattctggcccacggaggagcagttcccagccgtaagttggtggccaactttctgcagcgcgagatgacacccagtgttttggccgacagtcttatcacagagattgacaccgacgagtcgaaaatcaaagaccttatgataacaagaacttaa

SEQ ID NO: 2220 - protein, 699 aa, DROSOPHILA
MLEFGRTLLRWRTRHCSRRVSTWTPLATAFNAPPARRINFTHDDVGLFGMPELRSFEGFYLLRDNVESRTQELISEATSDQRRRKMVDIFDELSDSLCKVADLAEFVRIAHPQSRYTQAAEQACISICGMVESLNTHKPIYKALSHVVDHGDKLPTSEVDRHVSRLFLFDFEQCGIHLPEEERMRVVRLNDYILQLGQKFMSGAVQPSVLPRSQVPESFRNYFPTSGENVIITGLCTNAENVQMREAAYRLYLQPSKSQEDLLRDLLLCRHELARSCGFDTYAHRALKGSTMEKPEVVREFIDELSEKLRPRADCDFALMSQMKRREGGKADARAEVWDTPYYTNQLRRQLFEEHANEFLPYFSLGGCMEGLDNLLHALYGIRLQNTDLKPGEAWHNDIYKLAVVHEREGLLGYIYCDFYERVGKPNQDCHFTIQGGKRMPDGSYQLPVVVVMLGLAQPRWSGPTLLSPARLDNLFHEMGHAMHSMLARTEHQHVTGTRCSTDFAEVPSVLMEYFAGDPRVLRTFARHFQTHEPISEDMLRRLCASKNLFAASETQLQVFYSALDQEYHGASARHGQSSTDTLRSVQDHYYGLPYVDNTAWQLRFSHLVGYGAKYYAYLVSKTIASWIWQTYFEANPFNRQAGEKYRAEILAHGGAVPSRKLVANFLQREMTPSVLADSLITEIDTDESKIKDLMITRT

SEQ ID NO: 2221 - DNA, 5116 bp, DROSOPHILA
tttattttggtaggtatctgttgtaaaatttgaattctggcagctgtatatctattccaccttgccttctgcaaactgatacctttccatcactgtacataaataaaacaacctagcaagccatccatatagctccttcctgccatcaatccatccactcaaggctggagcctagttttcgcctagttttgagccccttcgtcctgtcattgtgtggcgcccatttcccagatagaccaggctatactctcgcattgatgaagaggacgagaaggacgaaggacgaaggattcgccggtggcaaacagacataagtaacggcaacttgttcatcaatttgctcaagattgattgacattggcgtaatgcatacaatacatacactaccgctgcattggtagctttctactgggaaagaagcgtcagtacgatgttctgtttcttgaaagttctaaaatagttaactcattccctactattcgttaatttgcagtgtaactaacaagccgtctgtcatgcaaattattacagaaaattgacaggcagttaaatggcaaacaaagcgaaccctgcgaagtgtcaactttcatgtaacaattggcattatcgaattacgctgcaaggagaactaaaaacattattcaacatatacaagtaacgactataaacaagtgtttttggttttattcaatataaaatgatgattgtttacctgggccaaagtaatacgtaatgaatttgccgttctgattatgcttaatgtacaaggattcggttcacggattcggactattaataaatgcttattgggtgtgtgttattggatgtggtcatggccgtgggtagaaaacagcggtgtaacaataagtaaagttaaagaaaactgatggtcaggtgggcgttttcatgtcggcggcaatgaaaggtacttaagattagttattattgggtggctcttatttgaactttgcagcttaaggatcgggttgagtgccgatcctcagacctccgtggacttctgcaccgagggagtgggcgaggtggccaggggaggcgaaggcagaccagtgtcctgcgtcaggggcgtgggcgcagtacggagcggcacggtgttcacgctcgacgggggtctactgtagtactgggtgttgctaggcagcaccggcactcctccgaagcggttctgcgtcgccgcctgtggggtgtagtttatggaactggcgccactggtgcgactgtccaggccactgaaggtggggctgtactgctggcgatgcagctgatccgcctcctccggcgacaggggctggtggtatccgactggatgagtggtgcccgtgtggacatccgcctcgtcgaagtcatcgtcctcgtctggatgatccccgtccaccggggagccatgctgatccaactccgttccggaggcggagtgcaaggagcggcgacccagctgtttcggcttctcacctgtggttacgttcggattaatgtaggaaatgtccctggctaactttgagctgtttctattttgactaccttccgatgaggtcacatcctcgtcgttctcatccagatcccatttcttagctggaaaatcaatttgcggtttgcccggtaatggttcgttcgtgcgatatactttgtcgtaggacctacttttcttcaatgtgctggcatccgtatcgctgtcgtcgtcgtagttaagtgtccttaaattacgagccgaactagccctcgaacggggcagcatgggcatctgccactgcggatcctccttgagctgcttctggcgatagcgatatactccacacacgatgcacagcatcagtgggcagatcaccaggaagataatgccaattgctatgaaagcgacgcgacgcgtgtagtacacctcacctgcacgggtttaaagttggtaaggattggtatctatctggggcatcaggggacatacttctactatatactgggtgactggattagctatgaacttatatttgcatattaattcaatgtatctctttctaatctaattcagtcagtcagtataattgtaggcacgatacgagggtctcttaacaacgatataatattctgtttctggtacttacgtagacattcggtatatccgtattccggaatgttccacagaccgttcgacaagcactcacgacgttgatctccaatcaggataaagccctcgttacactcaaaggatactttcgcaccaggcataaagtcaaagctcagctttcgaccaaaacgaggagtctgcagaactccacaggataccacacgcctgataaaaaataacaagataacagaattaatttctgactttatccatataacaagaatatttaagtgaaaaacttacactgcattttccgcctgcatattgactatagtatcgtagtaatttttggtaaagtgtgccaagtctctattcaaagtcattgcgtaatcgtactggcactgcatacactctccacaaagttcttcagctctttcaagatcgtaagagcgattcgctggcaggaagtccgcaggatctaggacataattcggctggaaggtggcattcgcatagtaaccagacattcgtccaaattctcgtttaaatagagcggctcccactccaggaacctcgcgatccgtgagcatccatttgattccaaagttggtatgaatgctgcgcagatcgttaagattgagttgggccacttgtccattgggcagcataaagtcgtctagtttattaaaactccagttgccaaagagtcccgcggttttgttctgtagttaaataataaaaatgtgaaaatgtaataaactaagatacataatttcctagctacttactataaacttccatggcaggaagacgcgaccggtcatgtatccttcgttctctaccacctccactccgataccagcatcgaattgcaccaccacctgcgactgattgagcaggtaagtcggggtatacacggtaacaccgtcgaagtgctggaacttcagactctcacgatcgaagtaaacccttcgtccatcggccaggacatccaggcgatagcgccatctggcgtgcagagggcgcagacggacctcaatcgtcgtggtggtgtttccccgcatggccaccgctgtcaactgggtggccttcacctcgccataataattaactggcagctgctcgaatcgtccttggacctcaaacttattactctcatccacgctgcgtgccaggacgaattctcccagtccgttgaatgtgtaagccgtgccatcaaaggtcacaaagtggggatcgccgaaaacacctgcgattccaggcgcctgataggccacacaatcctgcgagggacgacgctcgaagcggtaggtttcgcagcccaccgcctgctcctcctgccagtagcagcaggagtagaaggggcgcatgtcgtggaaccacatggacagcgagggcaccttgctggcctcgttccagggcatcttgcccaggttgtggacgcgacggggacgagagccccacatttggtcgtaggtcagcatcaggaagccataacgatcgtagcagcactgctgttcagctccttgggcactggataggaaagagtacgacaaaggtaaatttgcattaaagttattaagaatatatatctacaataagatttagagcaacttacactggcgttccactgaccacgcagtggatggccccgcgatgacgcaggcagctagggttcgagtccttgtcgcactcgcggtcagggcggaagcgtcctttgtccaggacagcctggtccaaggtgcaggggcaaagtggcaggtcggccgcaaagttcctgcaaaatgaggaatatgtactttcagtggggcagtccttttatcgcaatcctcagctaattagctggggaaggatgcccatgcccgaacagcatccatttagccaatccccatcggcgttctagttgcttttaattagcggggcaaatgcaaatgcatatttgttgagccttacctgaggaatcggtcggcgcgaatccaattatcgcagagagcccgcgcccatcgctttccatgctgccgctcccactggggcgccatataccaggccagaggaatcggccgggaccagagaaccctgcaaatgggaaagtgcagtgtgagattatgtatgcccaagattaatttcaagcaagcagcccaaacggatgacactaatcgacctttgacattcgtgcaggttgcacactgccagcttatgaactcccacgcgatttaacttgctccttttgacgagcaacacgattttgccattagccgttgcttagttatccttcaatggccattcgcgccttgcgctaccatggaaatatttttcattaagttccacaattactcggccatcaaatggaaattaaatgttgaaacaatgctaacaatttatttgggcccatccgccactttaggccgtctaacgacaccccaaggtgccgtaaaccaaaaaagaaagaaattgtcttatattgcgtcttgggggaaaaggcacagcgataaaaaagggaatgatagatacctatatattttacaacactatcatgagtatcttgcaaaaatataaactctcttaaacttttcttcttgtgtaggccagagtttctacaataaataagcccttgcaaattcgtaatgttcaaactggccatccaacgaaacacgactcgtatttttgggccacaaatttgatggttcggaagatgattcccgtttaagtgcaaaataattgctggacgtgaggaaaaaggcttagatgcaggagactggcgaacaaacatggcagcgattaccattggccggggccattaaaaacacatttccattattgattagcttcgagaatatctcgcaattactggctgtcataataagcaatctccagccaaccaagccaaagcaaattgattgcagccgaagggaatgggttggatgactgggtatctggtttctggtggctctggtggcagccgaagtacacatagcccgttcgcattgtcattgaaattgtccgacaaattgaataaaaacatggatagaccatgagagc

SEQ ID NO: 2222 - DNA, 2427 bp, DROSOPHILA
atggcgccccagtgggagcggcagcatggaaagcgatgggcgcgggctctctgcgataattggattcgcgccgaccgattcctcaggaactttgcggccgacctgccactttgcccctgcaccttggaccaggctgtcctggacaaaggacgcttccgccctgaccgcgagtgcgacaaggactcgaaccctagctgcctgcgtcatcgcggggccatccactgcgtggtcagtggaacgccagttgcccaaggagctgaacagcagtgctgctacgatcgttatggcttcctgatgctgacctacgaccaaatgtggggctctcgtccccgtcgcgtccacaacctgggcaagatgccctggaacgaggccagcaaggtgccctcgctgtccatgtggttccacgacatgcgccccttctactcctgctgctactggcaggaggagcaggcggtgggctgcgaaacctaccgcttcgagcgtcgtccctcgcaggattgtgtggcctatcaggcgcctggaatcgcaggtgttttcggcgatccccactttgtgacctttgatggcacggcttacacattcaacggactgggagaattcgtcctggcacgcagcgtggatgagagtaataagtttgaggtccaaggacgattcgagcagctgccagttaattattatggcgaggtgaaggccacccagttgacagcggtggccatgcggggaaacaccaccacgacgattgaggtccgtctgcgccctctgcacgccagatggcgctatcgcctggatgtcctggccgatggacgaagggtttacttcgatcgtgagagtctgaagttccagcacttcgacggtgttaccgtgtataccccgacttacctgctcaatcagtcgcaggtggtggtgcaattcgatgctggtatcggagtggaggtggtagagaacgaaggatacatgaccggtcgcgtcttcctgccatggaagtttataaacaaaaccgcgggactctttggcaactggagttttaataaactagacgactttatgctgcccaatggacaagtggcccaactcaatcttaacgatctgcgcagcattcataccaactttggaatcaaatggatgctcacggatcgcgaggttcctggagtgggagccgctctatttaaacgagaatttggacgaatgtctggttactatgcgaatgccaccttccagccgaattatgtcctagatcctgcggacttcctgccagcgaatcgctcttacgatcttgaaagagctgaagaactttgtggagagtgtatgcagtgccagtacgattacgcaatgactttgaatagagacttggcacactttaccaaaaattactacgatactatagtcaatatgcaggcggaaaatgcagtgcgtgtggtatcctgtggagttctgcagactcctcgttttggtcgaaagctgagctttgactttatgcctggtgcgaaagtatcctttgagtgtaacgagggctttatcctgattggagatcaacgtcgtgagtgcttgtcgaacggtctgtggaacattccggaatacggatataccgaatgtctacgtgaggtgtactacacgcgtcgcgtcgctttcatagcaattggcattatcttcctggtgatctgcccactgatgctgtgcatcgtgtgtggagtatatcgctatcgccagaagcagctcaaggaggatccgcagtggcagatgcccatgctgccccgttcgagggctagttcggctcgtaatttaaggacacttaactacgacgacgacagcgatacggatgccagcacattgaagaaaactaagaaatgggatctggatgagaacgacgaggatgtgacctcatcggaaggtagtcaaaatagaaacagctcaaagttagccagggacatttcctacattaatccgaacgtaaccacaggtgagaagccgaaacagctgggtcgccgctccttgcactccgcctccggaacggagttggatcagcatggctccccggtggacggggatcatccagacgaggacgatgacttcgacgaggcggatgtccacacgggcaccactcatccagtcggataccaccagcccctgtcgccggaggaggcggatcagctgcatcgccagcagtacagccccaccttcagtggcctggacagtcgcaccagtggcgccagttccataaactacaccccacaggcggcgacgcagaaccgcttcggaggagtgccggtgctgcctagcaacacccagtactacagtagacccccgtcgagcgtgaacaccgtgccgctccgtactgcgcccacgcccctgacgcaggacactggtctgccttcgcctcccctggccacctcgcccactccctcggtgcagaagtccacggaggtctga

SEQ ID NO: 2223 - protein, 808 aa, DROSOPHILA
MAPQWERQHGKRWARALCDNWIRADRFLRNFAADLPLCPCTLDQAVLDKGRFRPDRECDKDSNPSCLRHRGAIHCVVSGTPVAQGAEQQCCYDRYGFLMLTYDQMWGSRPRRVHNLGKMPWNEASKVPSLSMWFHDMRPFYSCCYWQEEQAVGCETYRFERRPSQDCVAYQAPGIAGVFGDPHFVTFDGTAYTFNGLGEFVLARSVDESNKFEVQGRFEQLPVNYYGEVKATQLTAVAMRGNTTTTIEVRLRPLHARWRYRLDVLADGRRVYFDRESLKFQHFDGVTVYTPTYLLNQSQVVVQFDAGIGVEVVENEGYMTGRVFLPWKFINKTAGLFGNWSFNKLDDFMLPNGQVAQLNLNDLRSIHTNFGIKWMLTDREVPGVGAALFKREFGRMSGYYANATFQPNYVLDPADFLPANRSYDLERAEELCGECMQCQYDYAMTLNRDLAHFTKNYYDTIVNMQAENAVRVVSCGVLQTPRFGRKLSFDFMPGAKVSFECNEGFILIGDQRRECLSNGLWNIPEYGYTECLREVYYTRRVAFIAIGIIFLVICPLMLCIVCGVYRYRQKQLKEDPQWQMPMLPRSRASSARNLRTLNYDDDSDTDASTLKKTKKWDLDENDEDVTSSEGSQNRNSSKLARDISYINPNVTTGEKPKQLGRRSLHSASGTELDQHGSPVDGDHPDEDDDFDEADVHTGTTHPVGYHQPLSPEEADQLHRQQYSPTFSGLDSRTSGASSINYTPQAATQNRFGGVPVLPSNTQYYSRPPSSVNTVPLRTAPTPLTQDTGLPSPPLATSPTPSVQKSTEV

SEQ ID NO: 2224 - DNA, 6476 bp, DROSOPHILA
aacatttcttccagtgcatttgaatggcatccaacaccacctgtgtgacgggttaataccgtttgctcgtttggccggttcgattttggttttttttttttttttggccccagttttgatgttcctccacggatgactttctggttttcttgatttcacagaattatgacacatgacgagattgcatttgaatccatctggtttgccgttaccagcatcttcaacgctgacttttcaaaaaacagttgcctcggcaaacgatttgcattccagtcgatcaaatcgaaattccacgcgctgaaaagtttcctctttgacattaagaactaagatttgtgatgccattaatcatcacgcgattttcgagatatatatacgttttatatacgatacgattatcgagaacattatgtttttcgattttggtttgcttctttggaggaaataactgttttgttatgttgacgaatcaaatggttttatgtcttctttttgtttattcaaggaaacctgttctactttagatgaattcggcacacttttatcgaatgttagttatatcataatagtatccaaaacattaaaaaaaactctagtttttttaagtaaatgacctgtattttacaaattgccgtgcctgtcagcgctttatgtaaccatccattaggaattccaacacaacacaatttttcagacaaacccgttttgtgaattacacatttttattgccattcggatttgattactaaaaacgtctaatccgattttcaggcgtatgcaaatattgcgatttcgataagcgatttgtcattaatgttttttgtgccttgacttcgtttttaattatacagaaaagttgtcaatattcctaacttgtcaatgtgttctttatatggaattcagaacttccaactttaaatattattatattttattatgcataaaagttgttatgcaatatgcaataaatataaatataaattaccttaccttatttcagattatctaaatgccagtttgcatttacacccaaacgttgacaatagccaaaagtttttcgaaatagttgccacattttcttagagtgtgcctgagttgcacattccgacctgaagatggcgctgcgcctgcgtcgcgacgtgcagaaggcctcctactatgtgtggttcctgggcgccgaggaggcgaaggggctgcgaggcgcccgcgtcataaactcggtcctgccctatttggtggacaggtcccgcggccaggagccgctcaaggtcacgctccaggtctcccacaagggcatcaaaatcgtccaggtgagttgattatatttcttgttaataaatgtagttattcaatgaactctttgttggttttatttgaacgccatttatcctgactgagaatccccgctgtgcggctcaagcattaattcctgttctcgttcatccgcagggtgcctcgaagcatctgattccacacagtgccataaccagctcggtgcagactgacgacatcgtcgcctgcgtcctgctgctctacaatccggccaccaagtgcccgctccacgtccatgcctaccgctgcgactcggagacgacggcggaggcactgcatctccagctgcagatcctcatcaaccggcccgacaatcagaagcgtttcgaggagctggagaccaggtgggccataaatttaattaccttttttcaaaaaaaaagggttctttagtacttggaaaagaaaagcagggagcatggaggcaggcttcattaaatgaataggaaaatgtactttgctaagcatgatatatagttacccattactggcagctgccatgtttatgtgtttctaacactgttctacaaagttgcaagcaatttttgttattacatttcatataattgaaaaaataatatacatatattttttaaaatagttaatttttcatcaggaaaacacctctataactttaagcacagttgcacattataatgctaattgggcattcgtttttccaattttttttcgtattttttttttttttttcttttttgcgactgctgggagagttttgttatgcaacatttaattaattgtgccaccaactttggcagcgagcaggaagcagaagcagtggcagccgggccacttagtcactccattagacacacattcaaccgaaacacatgacgagcgatcgcgataatcgcaccgctggggatgtggatgtggatgtggatgtggatgcgaatgatgatgatgatgatagtgggggactcgctgttggactcccagcatggtcccagttcccaaagtaattgcatgggcaatcttcaccgactgccgcattcccatcacacgacagcccagcgattcgccatcgcccacactgaacccacacatccacatccacatccacagccaagatcacatccacaaccacgagtttaaatatcttaaatgcctcgagaagctcactcgatggcttcgcggaaattctgctttgaaaagtgccgcctagccaggctgtcaccatcgataaagttggaaaagctgcctggcgaagtggaaaaatattgtgaaaattctagtagctaacggttgcgcctcttacaaaatatgaattcctcgtacaaaaaaaactgactacaactaacctttttggcagattgggcatcctgccgccgattcccatgaacggtagcaacgagaagcgccacgaatcgaatggcaagtcctcgtcgtccggcggaacaggtccgggatcgcaccatcatcaccaactgcagtcacaaacatcgggtggttatcgtgagggtcgccgccacgagacctcatctccgaagagattcagcagctcgttgggcagcgatacgggcaacagcacccgggaatcggagtgcagcgaagagcacggcctggttgctggtggctcctcgcccgtttcccgatcgccgccgcacggcaattccaagtcccatccgcatgcccatccacatcatccgccacattcgctgcaccatccgccgttgacgccgcagcagaatagcgacctcttcgattccctggccgccgagctgagggccaagttgaatggtaatgggccgccattgctgctaccgccaagggattacgatacggtgcaccgatccaagggcaacctgacggccatcgagttgcgacgctgtcggaacgcactaattgtgggcggatcgccgaagagtcaggtgccgggtgtcgccaatgtggccggcggagcggcggccaacgccaatggcaagcaggtttcctcgcgcggatcatcgggcattggatccgatctggcaccaagtcccgagcgtcaggagctcaacagttccagtggtaagtggctattaactaacaatatgatatatagtattctatagaagttccaactaacttaactccagatgacgagcactggtcgaacgaggcggacaactcggttattgctctgaagccgtcacaaatcgcattgccccatcacgcgcaactcaagcgaaagagcgccgtccagccgccggaggatagctatctgcgggatctgccagccaaaccatatcagccgcgtcccagcgaaagggaattggagcgagagcgggagctggagaggaacagggagcgtgaacgggagagggagcgagatcgagatcgagagcgagagcgagagctcgagaggaacagagaacgggagcgggaacgtgaccgtgagcgcgaccgggatcgagaacgagaacgagatcgcgaacgtaccaagactccggcatccatttcgaacaagtcgtggagccgcgaggatgagatcaagccgatcataatgcgtccggccgactacgatgccaagttcaatcgggtgatgcagcaggagcagcagcaagccgccgtcaatcatcagccggccaaattgagggacacggataagtacaacgagatcaatcgtctgctgaacaaaaagttggcccacgagccaacgagggatcgaaagtcacgctctcgtctggatgacaaccacgatgatttcgatgactcggatccgggcagtgagtcactgccattgcatcaccaacagacgcagggcccaccagtgcatcaccatcaacgcaaggagaatctcaccgacaagcaaaagttcatggagtataccagcaagaagcagcagctgctcaaaaattacggtgctggcgaggatcagcgctatcgccagcgctatgtggagtcaacgacggagcatctgccccccttcgatcatcccaccggtggtggagtgaccacatccacgggtggctcggcgggtcacaacaaatacgctgccgtgcacaggggcacggatctgggacaaaggaccacggaacgtcgacatgacagggatcgaggtgacagagatcatcccagggatgcggaacgcgagcggcgaagggatcacgaacgcgacagggagcattcccgtgatcgcaatccatacagggaggccgagagtctgccctatatacagagcatggagaagatgatgaagtcgacgggcatgcgttacgcagaagctactcccaagaccagggaacgggaacgggagagggagcgagatcgtgaccgggactacagggagccaccggtcacgcagagttcacagcgtgatcgcttccacgatgccaaggacaagtttcgggccatggaacagcgtccggcggtaaatcgctatccggacgtggatgagcgcgacacaccgcaccgggatccgtatcggtcgtcatcgcgccggcgtcgcggttccgtcgagccacccagcacgtacgagcagtggagcgaggaggaggaaccgccggtggtgatcagcgaaaagtccaatccacgtgacctaaaccgatcccgagccagatcgcgcggcgaatgggaaccggagccacccaggcacttggagcgcagcgtgcgtgacagagagcgggatagagatcgggactacaatcgagatcagtcccgagatccctatcggcatgagagggagcgtgaaagacccggtggacgcgcccactcacgcgaattcctgcagagcgtggaaaccaagaatccatcgacaacgggttcgggtcgcggccacatggagcgatatccctcaccagcagccacgcccatacaatctgttgatgtaggcggaagtggtggtggtggtggtggtggtggtggcagcggtgcttcttccggtggcaattcgggcaagccactaacccaaatggccaagggctataggcacagctatgcggagcccgttttcgcccggaccggcggaagagttggtctggcggcagttaatccctattgagtaggatccggaacttagccattaagtgtggttcttgctcttggaatcagagcagccctgaccaaaagtgaaaaccgtgcaacgaagtccaaactaatcgaatgggtggagaacaaatgtcgcaaaaaatctccagggatttgaaaagaaaatttattttgttttttgtttagaatccaaatgcatacttttgagatttacaaaaaatataaaatacacagagatttctgcgacactcgactaacgaaaagaaaagaaaacaaatatccatgtaaacatttaagtctaagaagaaacaacagtggctactgcttacgacgactccaaaaggattgtaagcactttgctagcaatcacgtataatccatatatatactcaattgttatagcaaagtatggcctctcaatcgagatatacaactatatatacatatatatatccattcattcctgccccgacttgagaacgcgcctaaaatggggggccattggaggggagaattggagatcggagattgtagagaaaggcgccacagcccctgtaattatgtgccttcagaaagtgagaaatcgtgtttttattatatgcataataactgaattagcctacgattatacatatgtatatatgcatgtgtatctaatgttatctaaaagccaacgaaacaagaatcggtttggatttcttaccattttttttttgtttttttgctaccttaagttgcgcggttggttggttattcacctttttttttttgctatacagtccacatatgtcatgatatctgatatctgtaagcatataatatagttaattatatactacataaaatatacgcatagctgatgtatctattgttatcaacttgatatttgcattaataaagcgctagtaaaaatatattatcttcttatttgcctgggaaatgtgttaatatgtaaacaaagtacgattttcaaagaggaaattactttttcatgtagaaagtaaaacaattttgacatttcgagtttcatgtaaatgtatatgtaaaataaattaaaacaaattcgacatgtaagtatagtattttttatacatgtcgaaagtttccagtatattacataggtaaaataaaaacgtggcattttgttgttttacatt

SEQ ID NO: 2225 - DNA, 3112 bp, DROSOPHILA
attatctaaatgccagtttgcatttacacccaaacgttgacaatagccaaaagtttttcgaaatagttgccacattttcttagagtgtgcctgagttgcacattccgacctgaagatggcgctgcgcctgcgtcgcgacgtgcagaaggcctcctactatgtgtggttcctgggcgccgaggaggcgaaggggctgcgaggcgcccgcgtcataaactcggtcctgccctatttggtggacaggtcccgcggccaggagccgctcaaggtcacgctccaggtctcccacaagggcatcaaaatcgtccagggtgcctcgaagcatctgattccacacagtgccataaccagctcggtgcagactgacgacatcgtcgcctgcgtcctgctgctctacaatccggccaccaagtgcccgctccacgtccatgcctaccgctgcgactcggagacgacggcggaggcactgcatctccagctgcagatcctcatcaaccggcccgacaatcagaagcgtttcgaggagctggagaccagattgggcatcctgccgccgattcccatgaacggtagcaacgagaagcgccacgaatcgaatggcaagtcctcgtcgtccggcggaacaggtccgggatcgcaccatcatcaccaactgcagtcacaaacatcgggtggttatcgtgagggtcgccgccacgagacctcatctccgaagagattcagcagctcgttgggcagcgatacgggcaacagcacccgggaatcggagtgcagcgaagagcacggcctggttgctggtggctcctcgcccgtttcccgatcgccgccgcacggcaattccaagtcccatccgcatgcccatccacatcatccgccacattcgctgcaccatccgccgttgacgccgcagcagaatagcgacctcttcgattccctggccgccgagctgagggccaagttgaatggtaatgggccgccattgctgctaccgccaagggattacgatacggtgcaccgatccaagggcaacctgacggccatcgagttgcgacgctgtcggaacgcactaattgtgggcggatcgccgaagagtcaggtgccgggtgtcgccaatgtggccggcggagcggcggccaacgccaatggcaagcaggtttcctcgcgcggatcatcgggcattggatccgatctggcaccaagtcccgagcgtcaggagctcaacagttccagtgaagttccaactaacttaactccagatgacgagcactggtcgaacgaggcggacaactcggttattgctctgaagccgtcacaaatcgcattgccccatcacgcgcaactcaagcgaaagagcgccgtccagccgccggaggatagctatctgcgggatctgccagccaaaccatatcagccgcgtcccagcgaaagggaattggagcgagagcgggagctggagaggaacagggagcgtgaacgggagagggagcgagatcgagatcgagagcgagagcgagagctcgagaggaacagagaacgggagcgggaacgtgaccgtgagcgcgaccgggatcgagaacgagaacgagatcgcgaacgtaccaagactccggcatccatttcgaacaagtcgtggagccgcgaggatgagatcaagccgatcataatgcgtccggccgactacgatgccaagttcaatcgggtgatgcagcaggagcagcagcaagccgccgtcaatcatcagccggccaaattgagggacacggataagtacaacgagatcaatcgtctgctgaacaaaaagttggcccacgagccaacgagggatcgaaagtcacgctctcgtctggatgacaaccacgatgatttcgatgactcggatccgggcagtgagtcactgccattgcatcaccaacagacgcagggcccaccagtgcatcaccatcaacgcaaggagaatctcaccgacaagcaaaagttcatggagtataccagcaagaagcagcagctgctcaaaaattacggtgctggcgaggatcagcgctatcgccagcgctatgtggagtcaacgacggagcatctgccccccttcgatcatcccaccggtggtggagtgaccacatccacgggtggctcggcgggtcacaacaaatacgctgccgtgcacaggggcacggatctgggacaaaggaccacggaacgtcgacatgacagggatcgaggtgacagagatcatcccagggatgcggaacgcgagcggcgaagggatcacgaacgcgacagggagcattcccgtgatcgcaatccatacagggaggccgagagtctgccctatatacagagcatggagaagatgatgaagtcgacgggcatgcgttacgcagaagctactcccaagaccagggaacgggaacgggagagggagcgagatcgtgaccgggactacagggagccaccggtcacgcagagttcacagcgtgatcgcttccacgatgccaaggacaagtttcgggccatggaacagcgtccggcggtaaatcgctatccggacgtggatgagcgcgacacaccgcaccgggatccgtatcggtcgtcatcgcgccggcgtcgcggttccgtcgagccacccagcacgtacgagcagtggagcgaggaggaggaaccgccggtggtgatcagcgaaaagtccaatccacgtgacctaaaccgatcccgagccagatcgcgcggcgaatgggaaccggagccacccaggcacttggagcgcagcgtgcgtgacagagagcgggatagagatcgggactacaatcgagatcagtcccgagatccctatcggcatgagagggagcgtgaaagacccggtggacgcgcccactcacgcgaattcctgcagagcgtggaaaccaagaatccatcgacaacgggttcgggtcgcggccacatggagcgatatccctcaccagcagccacgcccatacaatctgttgatccattaagtgtggttcttgctcttggaatcagagcagccctgaccaaaagtgaaaaccgtgcaacgaagtccaaactaatcgaatgggtggagaacaaatgtcgcaaaaaatctccagggatttga

SEQ ID NO: 2226 - protein, 998 aa, DROSOPHILA
MALRLRRDVQKASYYVWFLGAEEAKGLRGARVINSVLPYLVDRSRGQEPLKVTLQVSHKGIKIVQGASKHLIPHSAITSSVQTDDIVACVLLLYNPATKCPLHVHAYRCDSETTAEALHLQLQILINRPDNQKRFEELETRLGILPPIPMNGSNEKRHESNGKSSSSGGTGPGSHHHHQLQSQTSGGYREGRRHETSSPKRFSSSLGSDTGNSTRESECSEEHGLVAGGSSPVSRSPPHGNSKSHPHAHPHHPPHSLHHPPLTPQQNSDLFDSLAAELRAKLNGNGPPLLLPPRDYDTVHRSKGNLTAIELRRCRNALIVGGSPKSQVPGVANVAGGAAANANGKQVSSRGSSGIGSDLAPSPERQELNSSSEVPTNLTPDDEHWSNEADNSVIALKPSQIALPHHAQLKRKSAVQPPEDSYLRDLPAKPYQPRPSERELERERELERNRERERERERDRDRERERELERNRERERERDRERDRDRERERDRERTKTPASISNKSWSREDEIKPIIMRPADYDAKFNRVMQQEQQQAAVNHQPAKLRDTDKYNEINRLLNKKLAHEPTRDRKSRSRLDDNHDDFDDSDPGSESLPLHHQQTQGPPVHHHQRKENLTDKQKFMEYTSKKQQLLKNYGAGEDQRYRQRYVESTTEHLPPFDHPTGGGVTTSTGGSAGHNKYAAVHRGTDLGQRTTERRHDRDRGDRDHPRDAERERRRDHERDREHSRDRNPYREAESLPYIQSMEKMMKSTGMRYAEATPKTRERERERERDRDRDYREPPVTQSSQRDRFHDAKDKFRAMEQRPAVNRYPDVDERDTPHRDPYRSSSRRRRGSVEPPSTYEQWSEEEEPPVVISEKSNPRDLNRSRARSRGEWEPEPPRHLERSVRDRERDRDRDYNRDQSRDPYRHERERERPGGRAHSREFLQSVETKNPSTTGSGRGHMERYPSPAATPIQSVDPLSVVLALGIRAALTKSENRATKSKLIEWVENKCRKKSPGI

SEQ ID NO: 2227 - DNA, 7492 bp, DROSOPHILA
ttctttttttttttaactctgcccatatttctgtgctgctcggccttggccataataattacgcataaatatgtcaagtgggcccagggtgcgaatggtgcatgaagtgggccaaacggcgggtggtcctcgtcgggctgctgtgccgttggcaataaaaagccataaacgtttatacatttaccattataattgggccttcttccgttgtgtgtgtcaacgctacgatacggatgggaatttcacttgaagtggaacttttgcgtggaactctctcgcccgatgaatccaactgttacaagtgcccacgtgctgtgattgtagtgctcagctaagaatttattacgcttcagttgaggattacgattatgattattattgtaaataaatagtcacacaatgcagaatgatttattaaagtgcgtgaagtggacctatcatagcaaaacatactcgcttctatacagttttagttagtttaaagagtatgcaaggattcacatacctaagatgcatagatccgaagatttttctctaattaatcatcttattactacttcaatttatattatatacacccttttaattctttcacttggttactatccgaaagtgtagatgcccagattttcggcactgccatcaaatcacttaacaagttcgatcgttatatatcatacaatagatcttcgggttaagagccctcaggccattcggttttattgcgacgagcgcggcgcactcaataaataatcaaaacttaatggactgacagcgatttatgcgtgcaacaacaagttttgtggaaattatgtctaatttggtatcaaatcataagctcataaaatcaacaagccgcccgcggttttaaacgcgaacgacagcagcggtgcggcgatacggaaaaatgtgggaaaatgtttttcccttttccttgcgccttcgcatagtcataaacaaagaagtctctctcttttttttaacactatttaaaaagaagatgctcaaaaagggcgcccaacggacgccgctgtccatttttcgcattttccacatttttcgcattttccgtatttttcgcattttccacattttccgcattttccacattttccacaacgcttccgttttggcaggtcccggccgagagactttcgtcgtttgggtcagggtcctgaaacaactggcggtcattgccgcccatagaactaattttcaataaataataccaatttatatttattatgcattcgctcgtaataatgtgcgcttctaaataaataataaataatcataaatacgcaaggttaagatttattgttatttttgcgtagtgcgttgagtgaaccctgtctgcatttcgtttatttgggcatttcacacattgttgctgttgattttgaatcataaatcttgtggcattataatattgggcttttaaacaaagggtatgtaagtaggtatagtcatactaactgaatgatatcatttaagaactgaaatatatgggtaaacaattctgataatacatatgaaccacttcttgctctacttcgtcagattcaactcagtatgcctacaaatatgtatgatatacttatgacttttataactcaaaaaaagtctaaattattggttcctacatctatctattatatatatgtacatatataaagatctatcttttgcctgcttatctaagccctctaactcattcgaatgcttagccatgatagatccccgtatgccatagttgcttatagtcagttctgcgacccgtcagttctgaatccttcagaggatggtgtgttgaatcaatccctgaccttgtgccgaactggagctgccgtccagtctacggattgtttactgaccgtagcccacttttcggggcgctcgcggcggaaatgaattatcgcccgctaaatgggcgcgcacatcattattgccatacttatttgctcatggaggcagccgagcaacattttagatggctttttttctccctaaattttgttcttttttttttgccatttttgttattctcccccccccccccccccgggctccatttgtaaatgaagagaaatcacagtggacattaaaaaaaagcaaaagaggaggagctgtaaaagcgggaattacgaaactggttccggtctctgggcttttgtttgtcaatctggattagctgggctgccagctttacttctatattaaatgccactcctgaaatgttcagaataacgctgaaagaaaatgggtgcttagtaatagttacataaatattaaacaaataaataaaaaatctttgggtctttagatctttacagatagcttaaatagtatctgtatagtttatatgatatatacatggattaactatctgtaagctatagatttctttataccacaagtaaatatagccaagaatatacaatgcaatgtatttattaactatttaatctacgaatttttctgttgtgtatactataaagtccagttcaggtggtcattttggagcactccattatttccatatgtcgtgcgttaattgcggcacatgtatgatgatggctgaatggtcaggggtttcaggagttctggagtgcttggttcccggtaattggggtatggggcatggggcatgaggcttggggcttggggattccccactctggctccgcttcgtgtgatttatggtgtgcaaagtggggtgacaaagtgacaagtgccataagccggtcacggcgaagagttgtgggcaggaagtcactttgcgaaacagtgatttttacgagcaaaacgggtggaacgagtcactagtcgtaaattttggattgaggcttaacccaattgtatagtttgtacagcacttttctagttagaactaccacgcgcatatttacaaagtataatgtaatagcataatgaaatgacaatagttaaataaatgaaagctatagttaaaacaaatacttatatacgcatatctcaatctgtaggtacattttaaagtaagagcatagatacattttaagctatccgaatatctcaatctgtagatacattttaatgtatcccaacctgcagatacatcttgaagtaccaacaccagtcaccgtttttgctgcccagagtgtagctcaccctgccacaaaccttcacttatcataactcaggggaaccccctgtttttccgagtggtcaggtcaggcagatgggggccagggcccaggataaccccatgtccaataataattataatttatgcgccggcacagaaataaacacagacgcaaactttcagctgttcgtctgtctgcggatgtagcgaactaaaattacagatctgtatccctgctcctgccgcaaatatatatatctatatatctatatgtatatgtatctatatgtatatgtacatgtatatgtatgaaatggctccattagaggttggacaacttgtcgcctttaaattggtcagggagctgggcgagggattgatttcggtggacgggaattaattaaccaagtgcagaaatgtgcaactgggtaaccaagcaaggacaaccaattcaattaatcaaaatggagacgtgcgaggaatgcaaagcatttgcaactctgtcaaagtcatggaaagtgatggaaacactttgagtcactcaaggctgcacatatatctttcttaccccattttcttttcagtgtgtgtgtgtgtgtgggtgtgtgagccgaagaaaaattgtctgacacatttaaattgaatttccaaatttatttggtttctctttcggctttttttttttttgcaaacatttcgctggctggctggttcgcctttcgatttgctgttaaaaataaaactcgaaatcaatttgtacaaactatttttatatcgaaaacaacatactacaagttaaacaaatttccagcgatgatgtgcgagaaattgaatgaagattggattctgttgtatttacgttttctttccatcacttaagaacatcaaacaatagcatttcgaattccactgaatgggcattttttcttcttcctctttggctcatttaaaaataatcgttaagttattgttcatcattattattagttgtcggggcgaaggtaacgggggaaagttcaacattaatcggaatttgaatgagtttgtatgaatgctgggaaaatacctattctgcattccacaaataaatcttatttatttagtgtaaacttactagttgaagattaaaagtattaagtaactttttacacatttccatcagatatttcgccatttagaacgtcctgcggaagtggagcgcctttcgcatctgaaggatattgtgaaaacgcacagggagcgctttttgcacaccatattgaacaacaccgaagtgcacaatctcgacgagctgttgtccttcgaactggccaaatacgaagcggttggcattccctttaaaaaaccccaagctaaccaccactgataacaaaaccaatcttgcaggccgttcaacaggcggctgagggagggctactcattgtggccgacaaagactttccagagccctacgagcgatggagcatcctgcaagctgtgttcttctcatcgactgtgttaaccaccataggtgagcgatgcaccttaagttattcattaattaagtcaaataacgaaaaagatactcaagggatggaagacaccataacaacataacatatcaataagaatataaagagtgtttttctcataacttatcttaaaatggtcatataagagcaggaattactgttttgtgcagataattaccactactaactatccctaagactttttgacggtttttgaaaaattaatttttgggtcgattttcgcattttcggtaaggggtaacatcatcaaaatttgcgaaaaatggcgaaaaattaaaattccaaattttaaacacagtttgtttagaattttaaatacgaactcaacgaggtataacaatccatatttggaccattatttccaatgttgtggccaaaaatgtgaatattttctgtaagcctgattaaagtaatgaatttctattgttattcaactatttcaggctatggcaatattgtgccagtgacgaccggtggtcgggtgttttgcatttgcttcgccctcatcggcatcccgttcaccctcaccgtgattgccgattggggtcgactgtttgctaccgcagtctctgtttttggcaaacatatgcccagtaagtaactaaaacatattaaaaaccaactgaaaatatgtatgtagagtgcttagccaaaaacaattcccaattaatgtgataattaaatggtaatatacaataataacataggcataaaaacacaatcgtacacagtgcgtatgagcgttaataatgcgactgcattgaaaagcattgcgcatacgcaccgttggttttgtgagcatatttcatttgtgtaattattgcaatgatgcgtgaagacgctgcagctgaatgaatactttattaataatattaatgcatatgttattatttaaacaccctagcgaaaccaaagtttaccaactttattggcaaaacctggttctatgccattttggccgtcggctttctgggcgtttacttggccgctggagctggtctactcctgctttgggaagatgattggacattcttcgatggcttctacttttgtttcatcaccatgacaaccatcggattcggtgatttggtgccaagtaggttgttggagcacccaagtgtgtatttacttcattttgccatactcttcagagaaacccaactacatgctactgtgcacattgtatattcttattggcctggccctgacatcgaccatcattgagctggtgcgaaggcaatatgccaccagttgggccaagctgcaggtgggttctacaagtatacactatttttattgtattatttaccaaatttaactattttccaggagctatctggtcccatggcggagactctgcgtcgcttgggcgaaacagccggcacgggcctcgattatacagccctgcagaaggtgcttacggtatgatgattctcacaaaataaacacaaacatacgatactaaatgaaggtttaccaccaggtgtccatgcccaaatggaatagtaagaagaatgagcacagtcccgatattgcggccctggaagccatcacgaatgccattttgaaggaggtgaaggaggcgcagaacaacaagccgaaggtcctgcagatcgtcatatacgagtcgtccgtttagacggaaaggagggatagaaaccagacagcgagattgagcttccatcgatgaaaaaagtgctgcatagttttgggcgagcaggcagaaaagcaaaaaaaaaatatatatatacatatatcaagcgaaatatcaattgtagttaggctgccgatcgtaaaccacatgttacagtggacactggctactgtagcactgccagacttccataagttagtgtccgtacttatagctattatatagtcaaatgtctaggcaataatattgctcatacgtactgaggtcactcttacacacacacacacacacacacacacacagacacacacacatgcaaagcacggcaggtgatttaatatctatagtaatagaaaatctttttttttttgagtaattctaaccgtatgaggtagcttaggttattcgtaatcttaatcgtaactcttgtccataccatgcataaatgtcatcttaaaaataaaccaagaaaaagacttcaacaatctgcaagcgtttttaacccaagagatacatatcgaaatgatttttcactttgatcattcgtttttctgctcaaaagctttggctaatttcgtcactcggttttgaagctcaattctcgtgacgaatggaactttcaccgggatgagcttagagaagacctgagttccgattcacatgatccaattctacagagaaccaccccaattccataccgcagttatttactcgagcactgtgagaaaagttgccaccattcgtgctcagatcatgaaaaattcgaagggtatgccacatggaaatatatgcatatgaattgaacaacaaaaggattctagaatatttttgttaaatatttaagttagtaattgcgcaacttttaacaagccgtcgcatttgcttgcgagctgagtgcacaatttttgttcgcagtgcacatatgctgcacattgttggctataaaagtcgttcgcaccgtcgccgctgtctagtcgctggaaaagaggcgcgaggagtgcgagtgcgggtccaacgtatctaatttatacacatatccagccgattccgagtccgtaactccgccatccgatccggtccgatcctcttcgcatcgctccgttcccatcccattccatcgcatcgcatcccctgtgtgtgggttgatatacgcgatcatttcgcgctggttgcctcggc

SEQ ID NO: 2228 - DNA, 1352 bp, DROSOPHILA
atgctcaaaaagggcgcccaacggacgccgctgtccatttttcgcattttccacatttttcgcattttccgtatttttcgcattttccacattttccgcattttccacattttccacaacgcttccgttttggcaggtcccggccgagagactttcgtcgtttggatatttcgccatttagaacgtcctgcggaagtggagcgcctttcgcatctgaaggatattgtgaaaacgcacagggagcgctttttgcacaccatattgaacaacaccgaagtgcacaatctcgacgagctgttgtccttcgaactggccaaatacgaagcggccgttcaacaggcggctgagggagggctactcattgtggccgacaaagactttccagagccctacgagcgatggagcatcctgcaagctgtgttcttctcatcgactgtgttaaccaccataggctatggcaatattgtgccagtgacgaccggtggtcgggtgttttgcatttgcttcgccctcatcggcatcccgttcaccctcaccgtgattgccgattggggtcgactgtttgctaccgcagtctctgtttttggcaaacatatgcccacgaaaccaaagtttaccaactttattggcaaaacctggttctatgccattttggccgtcggctttctgggcgtttacttggccgctggagctggtctactcctgctttgggaagatgattggacattcttcgatggcttctacttttgtttcatcaccatgacaaccatcggattcggtgatttggtgccaaagaaacccaactacatgctactgtgcacattgtatattcttattggcctggccctgacatcgaccatcattgagctggtgcgaaggcaatatgccaccagttgggccaagctgcaggagctatctggtcccatggcggagactctgcgtcgcttgggcgaaacagccggcacgggcctcgattatacagccctgcagaaggtgcttacggtgtccatgcccaaatggaatagtaagaagaatgagcacagtcccgatattgcggccctggaagccatcacgaatgccattttgaaggaggtgaaggaggcgcagaacaacaagccgaaggtcctgcagatcgtcatatacgagtcgtccgtttagacggaaaggagggatagaaaccagacagcgagattgagcttccatcgatgaaaaaagtgctgcatagttttgggcgagcaggcagaaaagcaaaaaaaaaatatatatatacatatatcaagcgaaatatcaattgtagttaggctgccgatcgtaaaccacatgttacagtggacactggctactgtagcact

SEQ ID NO: 2229 - protein, 385 aa, DROSOPHILA
MLKKGAQRTPLSIFRIFHIFRIFRIFRIFHIFRIFHIFHNASVLAGPGRETFVVWIFRHLERPAEVERLSHLKDIVKTHRERFLHTILNNTEVHNLDELLSFELAKYEAAVQQAAEGGLLIVADKDFPEPYERWSILQAVFFSSTVLTTIGYGNIVPVTTGGRVFCICFALIGIPFTLTVIADWGRLFATAVSVFGKHMPTKPKFTNFIGKTWFYAILAVGFLGVYLAAGAGLLLLWEDDWTFFDGFYFCFITMTTIGFGDLVPKKPNYMLLCTLYILIGLALTSTIIELVRRQYATSWAKLQELSGPMAETLRRLGETAGTGLDYTALQKVLTVSMPKWNSKKNEHSPDIAALEAITNAILKEVKEAQNNKPKVLQIVIYESSV

SEQ ID NO: 2230 - DNA, 2819 bp, DROSOPHILA
atagacggatgctaaaggtttttgcacttggtttatttctggtgctccgcattcctgagatgccgtcgtggtgacaaaaatatatgcaacgcacacgagaaatgcaaacataacgcatatccactgcatatcccatccaatccaattacactgaaagaaattagcaaagttatgatttttaaacaaagtagaaatggcgtggtgtaaaataggtctattccagagagagggattgaaatgtagaaaaaaagttttctatatttaactatacttaactatatatacttaaactttatttaagatcttagtaatgattcagagtgcacgagaaatgtgcactggcttgcaagtggagcacacacacctacacacaaacggtgggaaaacaaggcgggaaaatttgcagggcgagaaaaagccagggaactgcaagcaagcataaatataaatatacatttaaaattgagaatccaatgaagacgcgaggtgccaactatttgcgggctgtgttatgcccacacgccccgataacaggcgccacccaaaacgcacattgcatcccaaaaataatatctttattacgtttccaccaaataacaataattggtaaattgaaaacacgctttgaatcggccgcagtgtgaccatgtgctttccaccaaacttaacattggaaacgtcatataactacttttgtaagatggtgttcatataactgtctacttagtttcacattagttattattactgaaacgaaatttaatttttactttttctgccttttctcagcttaaattataaacaaaactgcactgttataaacctagtgctgttaacagactttcggtattttctggtatttttcacagtgcctagcgttaaacgtccggcaacagagtgaccagagacactggcaagaaataccaggccccagcagcagagttattttcatggtgtgcgttcactttaagcgaacgcgagtaattgaaatttcaatccgccaacgaacggttcgtgcgcgctgctccgctgcgagtttcttgtacctccgtgcctccgcaaagcgaaacacacaaaaaaaaagaataaagcctggccaaaatctgcgagccgttttttcgcataaaaccctttttgaaacgagcaagcggaggaagaagaagaagagaagctgagacggagttcttcggagagaacggtacttaactggcgaaataccgaaaataacaaaaacaaaaacataaccagcagcaacagcatcacacatacatacacacgcgggaattttttcgggcctctctttgcgcgcgtgtgtctgtgtgttgcagttgcatagtttttgcttctttacttcttttaattcattagtgtgattttttgtttttgctgtttttgggttgtactggaatctggtctccttctccctccctgtcgctctcccgcgcgcaacgtattccgctgcattatatcgaagcgtgtgtttttatcactaaactacaattttttttggttctgtgcagttgagattcgaccctcaaagaaataacaagttaccattaaaaaaaataaaagccaatcaaacgaaggattaaatacagccaaaaatcgaaagaagattcgatcttcaaacacactacacacacacaaacaccacaatccccccccacacacacacaaaatgttcaccgaaaagggaatttttcccattggcgacggacttttggatgtggacgccgatcggctgaagggactcctcgtctcatgtcccgacatcaacgagatctacgaagtggaacagacgccgtttgccaggtgagtttttagttttctgttttgagtttcgcgctattattctccttttcccttgccaaaaattcaaccgaaaataagaagcacaaaaacaagatttttgcatctccacactgcaaaaaaaaatcagttagaaaggaaaccatatagataatttagctcttttggggaattctggtcagaaccatagatacagtccataccgcagatatacatatgtaactaactataaagttctaagctaggagttttacttacttgttttaggtacttgaataccataaatctatacatatgtgtatcttttcttgatcgccttatttgttttactaagctcgatcgtttctttttcgtatcataatattttgaaatgtaatccaagataaatatacatgtctctatgcatagttatgccaaaaataaccatattgaaaatgatcttctaagtttttacaacctaaacatactttgcgatcacaattgaaggtaactgctacaaaatcacacctaacatcagtgaatttatcatcgtttaatagatttgttttccttgtttttgcgaatgcagctgctaaattcaataaaaaataaaagcggaatccaaaaaccaccgaaacaaagctaaaaatgttaaagaaagtcagtggcgagtctgttttattttttctgaaaaacttctgcgtctcaaaacttgttttatttacttttttcttctttcttgcgacttgcctgtgtgtgtgagcttctactcaacacacacatgtgaacgggagacaaaaagagagttttgtgtggataacggcacagtggttttgttatgaacatcgaaagattcgtaaacaaatacgtatctattcagtacgaattggttttgaaaatagctctgaatttgtacgctttaaaaatgcgcatttttagatacgaatttgctgacaatatggtcagtttcgcgattgtccttatgcactgtgtgtgtatcaagagattcattttatttacttacctgattt

SEQ ID NO: 2231 - DNA, 497 bp, DROSOPHILA
ccaacgaacggttcgtgcgcgctgctccgctgcgagtttcttgtacctccgtgcctccgcaaagcgaaacacacaaaaaaaaagaataaagcctggccaaaatctgcgagccgttttttcgcataaaaccctttttgaaacgagcaagcggaggaagaagaagaagagaagctgagacggagttcttcggagagaacgttgagattcgaccctcaaagaaataacaagttaccattaaaaaaaataaaagccaatcaaacgaaggattaaatacagccaaaaatcgaaagaagattcgatcttcaaacacactacacacacacaaacaccacaatccccccccacacacacacaaaatgttcaccgaaaagggaatttttcccattggcgacggacttttggatgtggacgccgatcggctgaagggactcctcgtctcatgtcccgacatcaacgagatctacgaagtggaacagacgccgtttgccaggtgagtt

SEQ ID NO: 2232 - protein, 45 aa, DROSOPHILA
MFTEKGIFPIGDGLLDVDADRLKGLLVSCPDINEIYEVEQTPFAR

SEQ ID NO: 2233 - DNA, 7116 bp, DROSOPHILA
tttttagattttgtggtataatttaattttttaatttatatactttatatggtccaaaacgtttccgtctatctgttacatacgtttcaacgagtctagtatataaacattgaaaataaacactttaattttttcattataaatcattttttattattagcaatcacatcattttttttaacaaataccgagatttgaaagatcgagtatctgcgcatatagaccacttttaataaagagaataacatcgttgccaatttatgcatttttgcacttgtgtgacatattaaatgattatattatttaaattgaatagtgtcgctatcaatacatatgtatacacatacataattaatggaaaaaaatgtaagatatgtcgccaaaaataaaatttgacatgtccttgcataataagatgaataagattttgtgtggaatacacaaacgactgccaaacgagtccgcgattcataagcacctaccgcaatcattgcaattaaaagaaatgatctcgtttccctaagattgataaaccaagtttcatggcatctagtgagaagatattctgctgccgtcattaatacatatgtatatggcagcgtctcccagctgaaagatgaggggcaacgaatggaggattcaaaaatcgttgtttcttcgccgaataaaagggtatttgagattcgttgaaaagtatgcaacagtcagaattacgcgtttccaacgtaactaaatttatattcttgatcaaggtaaacagtcgagtcgatataaccatgacccatgatgcacattctagaatagccagtgttttattagttaagtgccacggtttcaaaacagtcacacacacacttttaaaaaaccttttctttttattttaaattttaaaacagaatagttgcgtattacttatagcaaccattaaccagttaacaagaacgtgttaaggtatgcaatgtgaatatgtttatattactatgtttgcacaagaagacagctatttctgcaatatcgtgttaaacttgctgattgcctcggcaacatatttttccttttcggccaacgcacatttaagctgcgtacgcagttgctgcagattaggcatggtgcgacaatctctaatgttaagcagagtgcggaagatgttttcccacattgtgcgctgaaagtagcgtggcacgtttgttttcggcatccaaatcgtgctcggagaccgctgcactacttccatatagcggccgaaaagcagcacatgcataacgcttacgagaccatataaatccaattggtaagtccatgggcgtcccgttctcatctcaatgcacttgaataggtcatcatgatgaacatagttgaatgtctgattgtccggaaacagcttcatgtcaatagacacaccgaaatcaataagctgcaggctgacttcgttgggatccgcacatatcctgaaacagaaaaaacctgtgatattattggtgttgacgaagaagctttctggttattacggtttcataagtagaaagttatccggcttgatgtcggcgtggattatacccatggcgtgcaggtgatccacaatatcgagcatttggcaactcagatgcattaccacatactcgtccatattcctgttagtgacactcttaaccttgttgcatacaccgatcagagaaccatagtctgaaaactctgagatgtatacactggaattatttcctaccagtgcatagtcaatatgtgcataggatggaatctgtaaaagaatttgcattcggttaattcgtgtcatgtgacaagtattaataattatccctctatatgatatgaataggtaatattctaggataataaacttggaataaaaactatttgaaaaatcggatttaatgtccatatattattagttatgccttaccatttgctcactagttagccggctgtgaatctctagacaaatgtagaactcccagtagttagtgggccgttcctgcttgagcgcgaccttcttgccagatttcagatgctttcctacataaaccgagccataagccccctttcctatcattttagacacctcaaacttttcgttgtgcacttccaggtgggtgttaggatgtaggcgcttaacgtgtccaaccagttgacaatggggcagcttttcgatgtacatagaaaagtcaattgattcgagtagcgagctgatcagttctacattgaaagggtttttattagcgtctgccagcgtttcgttcaaaacagtttgatctccgtttgaggtggggtgaacaaagttttcccgcggaggagtttctaaatcagactgcgaccaggaacggtgcgattgcttcggcgtcagtggagttgtcttatagtagatgcttagttccgacgcctctgctacctttgcgttagggatcagcagtgtggaattttttatcatactgatatttgttgcaaacatttcagtagctgcgttaagctcgaaaaactcgtcaggttgttttgaaataccgacattttcattcacaggggctttccttgacgattctgacatggaatcgttggaaaatttgatcttattcgatgtgcttgaaatattcgttttgacaacggaagccggcatctgtgaaggacagctgcctatttctgtgcaatctttcataaacgaggcaatcatatgggagtgcccaatattttcctgttgagtccctggctccttaattgccacctgttgcgtttcgggcagcgtgcagtctaagtcaaagctggagaccattaaagctactggttttgacttagtgagctttggctgcgtgtcgtccagaaaaatatcaaacttctgtatcgcccctgattttgctacagcttcaggctgcgtttcgggcacaaaggaaaggtcgcacataaaggaatcctgcagattgctgatgctgggcgcagcctccagtttgttgccagtcactgcgaaggatctccgatcgccctgtgtcgatttaaaaagctgtgaagttggatcgaaattgcgcttcggagagccaaaaatatttgttttcggcggtgtctttccaaacaatccacacaaatcgctttcatcctccaaagtgggaagttgcggtgcggaaaaacaattttcagctcccagtgagccatgatccatagaattctccggcagtgcgatcggcatttgtgggagtgtttcagttttatcttcctgaaagcaagcaagaggtcttgggatagtctctgtcttatcctcttggaagcgcaacgacttaagcataggcacgctaggcgcattgggctcccataactcacggcgcaaaaagttgtcaccacccggtttttccggctcggaaaggactgctgatacaccagcacttatcacgcgctgcagacgcatttgtccaggagtgttctcttcaatcttgctgcctagtttagaaacagcattggatccgggtgaagacgtggaggtaatagtggatttagtggtggtaccgctcgtcgccaagctttgtgtgccgtgctcagaggtttccaatatggtagatagttgctttcgcaaagttggagaacgagtctccactggagattcgacggaatgagcagcctcctctggtagcggtagttctttgagcacggttccaaattgacgtgacggagcctgtttctgtgttcccttaggagtgcttactgcctgcgactttatgaacatgttgaacatttgcgtggagcaggtctcatctccgtcataaaacggccttgtttttggagttggctgcggctcttcagagtcttcatagatctctattttcggaacaggaacggccggtacagcaaaattgtcacgtggagaaccggaatcctcaaatattttaatttttggctcatctatttgatcgcacggcgattcaggtatcttaggtgccacctgagaaggtatatcttttacaatcaaagtggcttcatcctctttcttttcatcctcctcctgcacagacgaaactctgcgtggcatgatggattttctgaaggaagagggaaagaagctcttgcggcgtggcatcttgtttccgggcaagcaaacggtttcttccatgtcaaagtcaccatgaactgtcacatttcgtttttccatccatttagctgccaacaactcctctggctggtactccttttgctcaacttcgttgtaaattttgtcaaaaactacctgaaggcccggtaccagtgggggtttccaaaacttgtctagctcatcgagatcttgtggcttagaatatctggcgaaattcggatagcagcgaattcctctgatcacccgtccagtgccccaccaatcatcattgcgatggataaatggatgctgtgggttgcgatgcttcaaaaaggaataggctcgatactcttcgggcgagaactcgatgttggggcgggggtagaggagacacttgttatagcaaggcagtccacttgcgtttggctcgtcctcaatagtaactggcgtcacccacggttcctgaggcctgttcttggccacaaagtttgtcggaaatctaaatggttgttctagacgacgctcgtagtttgtaataggtggcattgcttgttcgtcaacgtgtatatcaaagcccagatccggcgaggcgttactgccgaaaatttttccatgtttgtggcgtttagcatttgccttattccaggccaccggttcttttatattctcctgactgcaagccgagtcgataatggatcgcaggcttgacttcacctccgtctcagaattagagatcggaatatttccctcagaattttcgtcattaaacacctcaacgttccgacctacattgcgcctactggtggtggttgaaggctcgacctgcagaatgacaatgtatatttttaaagaaattttattcgatttaaaccttttttattactactgtatattgatataaaagcttaggtggatttaaaatcccttagaaaaaatcgagcttaacggcgggatctccaaaaagttggacaggttcaccctaagccgtttaataaaatacaaatacaaattaaggtaaggtgcacctgatagtcaaggaaaccgactcgttctctatcgttctctgttgtttctgaattctagagaagatagtcattaaacatgcatcaaacataagttataaaagcaaaattatacttgaaaccgatttctctagccaaccaagttctttgtaaacatgaaataaaaaatcacccacctgaaccacgcctgggaggccgcttttaactgctgctccggtacggatgctgcccacggtgatgctgttagagatctgctgccggcgaccatgaagtgattgcagtgctagccgtcgctcgttaagttcctggtttactgcgttggcctcttcaccagtgctgtagagcatgcgctggcccaccgtatagccaaagtggtggtgggcctccttcagatcctctaagggctctgcgcggcactctagacctaagcgaaagatctcgtcggccttgcgcatgttaccgctcaggtcgtagctgtaggcccaagcaatgtagaaatctgccagcattgttccgatcccgttgttgtacatctgctgataaaactcgatcttgtccttctgtttctccatctaaaaagtgacgaagtaaaatcggtggttgagtgatcgtttaaaatatcatcggctactcacgaatttaatgaaaagctttataagccgcttgtcctgacggtagcgctcgtcgtcttcaaatttggtgaggcactggtgtaggacagtctgcagaccggagccactgccccccgccggatagctctgctcgatccagcagatgaacgtgtaccaggcaccgagaggatccgcgcctttgtaggtgcgcacctcctcctccatttgcttgcgttgtgccagcagttcctggccgtgggtggagtcctggctaagagaagcctgcagaaggctcacattgcgaccgctggccagcggctgaatgttctctttcgcattgtcaaagtccatatcgttctcctcaagcaaatgacctgaaacttttggttgtcttgtatcggttaaacaaaaactacgcgccgaagcaaatgctagagatgaatgatactacgctctttcgatatttttaattgtgtcgtatcgatacttcgattgaaaaactgttctcactgaagccgaaatacatacgataaaaattgaattgcttagcaacacaacgtcatcactgaccaccacttttaattggtaacgaagctcaccatcttgaccagtaaaaaagaagcgtaagaacagcttactccagttactattacatttctggtgctcctcaaatctttgtgatctaatatttatttgatcaactttcattattgcttcgaaaattatgatattttaaaatcaccgccatatctgtacaataattaatttttcttttcccttcgagttttgataaggcacgaaatatgttttgcatatatatggctttttattgtatatattgttgtcatgacatatgttttaaaaaggtctaattgcgaaatcagtaatcgtctaaaatgctagcagagataaaaaataatgattacacaggttcaccaaaagcctttatagaatgaatgtttttgatctcattttgtgacaataaacgatttccacgccttcacaaacgaaattccagcaatatatgtatgtatgcaacaggttagggaatgtcagcggaactatcatatttggttactatttacatacgttaactcgtgaatctattcggatcgcacatgcgtatttaatgccaaaaaaccaaaagattcaatgcgtcttatttgtataatcccttcagcatatcgaaatgcgaatagtaatgtttattattctttttgtttttgaaaaaaccaatacattttttttatgtatccgttaaaagttaccccagcggccgccttggtcgccatttctaaagccgccgcctgatcctctattgctttcaaatgagtctccaaatccacctctcttgttcccatatcctccgccattgtttccatatcctccaccattatttctataacctccgccattatttcca

SEQ ID NO: 2234 - DNA, 4455 bp, DROSOPHILA
tcggcgcgtagtttttgtttaaccgatacaagacaaccaaaagtttcaggtcatttgcttgaggagaacgatatggactttgacaatgcgaaagagaacattcagccgctggccagcggtcgcaatgtgagccttctgcaggcttctcttagccaggactccacccacggccaggaactgctggcacaacgcaagcaaatggaggaggaggtgcgcacctacaaaggcgcggatcctctcggtgcctggtacacgttcatctgctggatcgagcagagctatccggcggggggcagtggctccggtctgcagactgtcctacaccagtgcctcaccaaatttgaagacgacgagcgctaccgtcaggacaagcggcttataaagcttttcattaaattcatggagaaacagaaggacaagatcgagttttatcagcagatgtacaacaacgggatcggaacaatgctggcagatttctacattgcttgggcctacagctacgacctgagcggtaacatgcgcaaggccgacgagatctttcgcttaggtctagagtgccgcgcagagcccttagaggatctgaaggaggcccaccaccactttggctatacggtgggccagcgcatgctctacagcactggtgaagaggccaacgcagtaaaccaggaacttaacgagcgacggctagcactgcaatcacttcatggtcgccggcagcagatctctaacagcatcaccgtgggcagcatccgtaccggagcagcagttaaaagcggcctcccaggcgtggttcaggtcgagccttcaaccaccaccagtaggcgcaatgtaggtcggaacgttgaggtgtttaatgacgaaaattctgagggaaatattccgatctctaattctgagacggaggtgaagtcaagcctgcgatccattatcgactcggcttgcagtcaggagaatataaaagaaccggtggcctggaataaggcaaatgctaaacgccacaaacatggaaaaattttcggcagtaacgcctcgccggatctgggctttgatatacacgttgacgaacaagcaatgccacctattacaaactacgagcgtcgtctagaacaaccatttagatttccgacaaactttgtggccaagaacaggcctcaggaaccgtgggtgacgccagttactattgaggacgagccaaacgcaagtggactgccttgctataacaagtgtctcctctacccccgccccaacatcgagttctcgcccgaagagtatcgagcctattcctttttgaagcatcgcaacccacagcatccatttatccatcgcaatgatgattggtggggcactggacgggtgatcagaggaattcgctgctatccgaatttcgccagatattctaagccacaagatctcgatgagctagacaagttttggaaacccccactggtaccgggccttcaggtagtttttgacaaaatttacaacgaagttgagcaaaaggagtaccagccagaggagttgttggcagctaaatggatggaaaaacgaaatgtgacagttcatggtgactttgacatggaagaaaccgtttgcttgcccggaaacaagatgccacgccgcaagagcttctttccctcttccttcagaaaatccatcatgccacgcagagtttcgtctgtgcaggaggaggatgaaaagaaagaggatgaagccactttgattgtaaaagatataccttctcaggtggcacctaagatacctgaatcgccgtgcgatcaaatagatgagccaaaaattaaaatatttgaggattccggttctccacgtgacaattttgctgtaccggccgttcctgttccgaaaatagagatctatgaagactctgaagagccgcagccaactccaaaaacaaggccgttttatgacggagatgagacctgctccacgcaaatgttcaacatgttcataaagtcgcaggcagtaagcactcctaagggaacacagaaacaggctccgtcacgtcaatttggaaccgtgctcaaagaactaccgctaccagaggaggctgctcattccgtcgaatctccagtggagactcgttctccaactttgcgaaagcaactatctaccatattggaaacctctgagcacggcacacaaagcttggcgacgagcggtaccaccactaaatccactattacctccacgtcttcacccggatccaatgctgtttctaaactaggcagcaagattgaagagaacactcctggacaaatgcgtctgcagcgcgtgataagtgctggtgtatcagcagtcctttccgagccggaaaaaccgggtggtgacaactttttgcgccgtgagttatgggagcccaatgcgcctagcgtgcctatgcttaagtcgttgcgcttccaagaggataagacagagactatcccaagacctcttgcttgctttcaggaagataaaactgaaacactcccacaaatgccgatcgcactgccggagaattctatggatcatggctcactgggagctgaaaattgtttttccgcaccgcaacttcccactttggaggatgaaagcgatttgtgtggattgtttggaaagacaccgccgaaaacaaatatttttggctctccgaagcgcaatttcgatccaacttcacagctttttaaatcgacacagggcgatcggagatccttcgcagtgactggcaacaaactggaggctgcgcccagcatcagcaatctgcaggattcctttatgtgcgacctttcctttgtgcccgaaacgcagcctgaagctgtagcaaaatcaggggcgatacagaagtttgatatttttctggacgacacgcagccaaagctcactaagtcaaaaccagtagctttaatggtctccagctttgacttagactgcacgctgcccgaaacgcaacaggtggcaattaaggagccagggactcaacaggaaaatattgggcactcccatatgattgcctcgtttatgaaagattgcacagaaataggcagctgtccttcacagatgccggcttccgttgtcaaaacgaatatttcaagcacatcgaataagatcaaattttccaacgattccatgtcagaatcgtcaaggaaagcccctgtgaatgaaaatgtcggtatttcaaaacaacctgacgagtttttcgagcttaacgcagctactgaaatgtttgcaacaaatatcagtatgataaaaaattccacactgctgatccctaacgcaaaggtagcagaggcgtcggaactaagcatctactataagacaactccactgacgccgaagcaatcgcaccgttcctggtcgcagtctgatttagaaactcctccgcgggaaaactttgttcaccccacctcaaacggagatcaaactgttttgaacgaaacgctggcagacgctaataaaaaccctttcaatgtagaactgatcagctcgctactcgaatcaattgacttttctatgtacatcgaaaagctgccccattgtcaactggttggacacgttaagcgcctacatcctaacacccacctggaagtgcacaacgaaaagtttgaggtgtctaaaatgataggaaagggggcttatggctcggtttatgtaggaaagcatctgaaatctggcaagaaggtcgcgctcaagcaggaacggcccactaactactgggagttctacatttgtctagagattcacagccggctaactagtgagcaaatgattccatcctatgcacatattgactatgcactggtaggaaataattccagtgtatacatctcagagttttcagactatggttctctgatcggtgtatgcaacaaggttaagagtgtcactaacaggaatatggacgagtatgtggtaatgcatctgagttgccaaatgctcgatattgtggatcacctgcacgccatgggtataatccacgccgacatcaagccggataactttctacttatgaaaccgatatgtgcggatcccaacgaagtcagcctgcagcttattgatttcggtgtgtctattgacatgaagctgtttccggacaatcagacattcaactatgttcatcatgatgacctattcaagtgcattgagatgagaacgggacgcccatggacttaccaattggatttatatggtctcgtaagcgttatgcatgtgctgcttttcggccgctatatggaagtagtgcagcggtctccgagcacgatttggatgccgaaaacaaacgtgccacgctactttcagcgcacaatgtgggaaaacatcttccgcactctgcttaacattagagattgtcgcaccatgcctaatctgcagcaactgcgtacgcagcttaaatgtgcgttggccgaaaaggaaaaatatgttgccgaggcaatcagcaagtttaacacgatattgcagaaatag

SEQ ID NO: 2235 - protein, 1460 aa, DROSOPHILA
MDFDNAKENIQPLASGRNVSLLQASLSQDSTHGQELLAQRKQMEEEVRTYKGADPLGAWYTFICWIEQSYPAGGSGSGLQTVLHQCLTKFEDDERYRQDKRLIKLFIKFMEKQKDKIEFYQQMYNNGIGTMLADFYIAWAYSYDLSGNMRKADEIFRLGLECRAEPLEDLKEAHHHFGYTVGQRMLYSTGEEANAVNQELNERRLALQSLHGRRQQISNSITVGSIRTGAAVKSGLPGVVQVEPSTTTSRRNVGRNVEVFNDENSEGNIPISNSETEVKSSLRSIIDSACSQENIKEPVAWNKANAKRHKHGKIFGSNASPDLGFDIHVDEQAMPPITNYERRLEQPFRFPTNFVAKNRPQEPWVTPVTIEDEPNASGLPCYNKCLLYPRPNIEFSPEEYRAYSFLKHRNPQHPFIHRNDDWWGTGRVIRGIRCYPNFARYSKPQDLDELDKFWKPPLVPGLQVVFDKIYNEVEQKEYQPEELLAAKWMEKRNVTVHGDFDMEETVCLPGNKMPRRKSFFPSSFRKSIMPRRVSSVQEEDEKKEDEATLIVKDIPSQVAPKIPESPCDQIDEPKIKIFEDSGSPRDNFAVPAVPVPKIEIYEDSEEPQPTPKTRPFYDGDETCSTQMFNMFIKSQAVSTPKGTQKQAPSRQFGTVLKELPLPEEAAHSVESPVETRSPTLRKQLSTILETSEHGTQSLATSGTTTKSTITSTSSPGSNAVSKLGSKIEENTPGQMRLQRVISAGVSAVLSEPEKPGGDNFLRRELWEPNAPSVPMLKSLRFQEDKTETIPRPLACFQEDKTETLPQMPIALPENSMDHGSLGAENCFSAPQLPTLEDESDLCGLFGKTPPKTNIFGSPKRNFDPTSQLFKSTQGDRRSFAVTGNKLEAAPSISNLQDSFMCDLSFVPETQPEAVAKSGAIQKFDIFLDDTQPKLTKSKPVALMVSSFDLDCTLPETQQVAIKEPGTQQENIGHSHMIASFMKDCTEIGSCPSQMPASVVKTNISSTSNKIKFSNDSMSESSRKAPVNENVGISKQPDEFFELNAATEMFATNISMIKNSTLLIPNAKVAEASELSIYYKTTPLTPKQSHRSWSQSDLETPPRENFVHPTSNGDQTVLNETLADANKNPFNVELISSLLESIDFSMYIEKLPHCQLVGHVKRLHPNTHLEVHNEKFEVSKMIGKGAYGSVYVGKHLKSGKKVALKQERPTNYWEFYICLEIHSRLTSEQMIPSYAHIDYALVGNNSSVYISEFSDYGSLIGVCNKVKSVTNRNMDEYVVMHLSCQMLDIVDHLHAMGIIHADIKPDNFLLMKPICADPNEVSLQLIDFGVSIDMKLFPDNQTFNYVHHDDLFKCIEMRTGRPWTYQLDLYGLVSVMHVLLFGRYMEVVQRSPSTIWMPKTNVPRYFQRTMWENIFRTLLNIRDCRTMPNLQQLRTQLKCALAEKEKYVAEAISKFNTILQK

SEQ ID NO: 2236 - DNA, 2717 bp, DROSOPHILA
tcggattggatgttcatcagttctaattcaacagcgcctacttaaatggagatatcgaagaagagaacatccccctgaattccaagaaatattgacagcaaaggagaagaagatatacatatggccccgagaatgtttgcaagttgagaaaggctatatatggcctaaagacgagtggacgaaaatggtacagaatgctggaaaggaaactcaaagatttgaatcttaacggaatacatatcgtatcgcttgccgtagacctcgtaatagcgacgaatgacacccgaatgctgcgtcagttgaagcatgagttgtccaaaaaacagatgaaagatttgagcaagctatcgcattgtttgggcatagaatttaaacaaagtgaaggcaagacagagtttaccatgggctagtcgaattatatagcagacgtcctgaaacgtttcaaaactgcaagcccgtaaacacgccaatcaacacgattgaaaaattaacaacagaaatttcccccaccaccgaaggcgaaaagaaagaaatcttcaatgtgccatatcaatgtggttatcaatgcctaaatgtggttagcagtattaacgcgccctgatattaaacttgcagtaagcgcactaaaccaatataataccattttttttttcaaaaatgtgggcgtagcagttttgggtggttttaggtttaagagtgggtgtgcaaaaagtttttttttggaaaatcgattaaaatttacaagactaataaaattatgaaaaaatatacaacaatttttcaaaaatgagggcgtcgtagtttgtagtagtgtgggcgtgtcagttttgtgcggtttgtgggcgttagagtgggcatggcaacctgggttacatactgttacatactttttaacgaatctagtatacccttttactctacgagtaacgggtataattatacaacaataattattataataccctgaatttatgttttatcctacctgctgtattttatctcagtcgtactcaccatcattatagttatcttcgataaaaggtgatattaagtctacaatcattgtaatagatcgtttaacggcattacgacgttcatttctatatacggccagctcgtctttcttaagtgcttggacaacataacgatgtttcactgtggctgcaaactttacggtctcgttcagtttaccgccaccttctgccttaataaccgagcccgtgactggttcgttgtttaaagactggtacccgtcggtttcgccaatttgttgaatcggctcagcctgctgttgaagtttaatgatattcgtctcactctccatatccgattctattgcttcggtttggacatcacaaagtctccgaaaggccaactttactttctccacatcgcccaaggcgaagtagcagagtaagaggtgaatgctacttctaatgtttgcccgctccgtcatgatgaactcaaagctagaagcagcatctgaataagagcccatgcgaataaaaaggattccaatgttttcacggatctttagccttaactgacttaagctctttggtacagaatcaagggccatgcggtacattttaaccgccttttggtaaatacccatgctgtagtagatgttacccatatttagttttagctgattgacgtgtggaaacatcttgtttttggccataatgctgtaggtattgagggcttcgatgtgcatctcactccgttcgtattgctccgcgagattaaaaaaaacctatagtccatatatattaaagttttaaattatccttctagtcgtgcttaccgcatatgtcaaatcgaagttgtgataaacattttcaccgtgctggtctcgaaattggtgtaatgttctatccaatgagaatgcttctttggctttactcaatgcctcggccaattttgtatccaggttcaataatttattgggtgagccttgccaggccaaaactatagatgactccaagagcttcacaattttttcctctagatttttatacttcatttgtgggctataatttgaattatgtaaaacgtaatataagttggttagtattcagactttggttaactcgctacataataatcgactaaaaggatcagatcattgctagttcctgataagcttggaaatgcttaagacttttccttgttgttttgtaaaatttacagagagaagaatgaaaaaagacagaattaaaataacatttttaaattccactatgtttaaaaattatgttatgttaaaaaattcataattatttacacacagcttttttaattcatttttgccttttttattgaatttaaacgaaatattttatatggaatatgagcaatggaagtaccgcctgatttatgtctttcaagaacttggttggtactcggcccttgtggcatggagcattgccctgctgcaagatccagtcattcttggagaacagtctatttcctgaggtcaatgcgtgctcatttaagatatggaggtatcctgtttgatttactgtaccctctatcggtaccatgtctccaaacccatagtagcttaaacagccccagaacatcaccgtgacaccaccaaaccgattgattggctgaacggcattaccctttagttgtattgggaaatgcataaattgcttgctaaaggatccctgaaactgaaacgcaacttcatcagtccataaaatatcaaa

SEQ ID NO: 2237 - DNA, 717 bp, DROSOPHILA
atgcacatcgaagccctcaatacctacagcattatggccaaaaacaagatgtttccacacgtcaatcagctaaaactaaatatgggtaacatctactacagcatgggtatttaccaaaaggcggttaaaatgtaccgcatggcccttgattctgtaccaaagagcttaagtcagttaaggctaaagatccgtgaaaacattggaatcctttttattcgcatgggctcttattcagatgctgcttctagctttgagttcatcatgacggagcgggcaaacattagaagtagcattcacctcttactctgctacttcgccttgggcgatgtggagaaagtaaagttggcctttcggagactttgtgatgtccaaaccgaagcaatagaatcggatatggagagtgagacgaatatcattaaacttcaacagcaggctgagccgattcaacaaattggcgaaaccgacgggtaccagtctttaaacaacgaaccagtcacgggctcggttattaaggcagaaggtggcggtaaactgaacgagaccgtaaagtttgcagccacagtgaaacatcgttatgttgtccaagcacttaagaaagacgagctggccgtatatagaaatgaacgtcgtaatgccgttaaacgatctattacaatgattgtagacttaatatcaccttttatcgaagataactataatgatggtgagtacgactga

SEQ ID NO: 2238 - protein, 238 aa, DROSOPHILA
MHIEALNTYSIMAKNKMFPHVNQLKLNMGNIYYSMGIYQKAVKMYRMALDSVPKSLSQLRLKIRENIGILFIRMGSYSDAASSFEFIMTERANIRSSIHLLLCYFALGDVEKVKLAFRRLCDVQTEAIESDMESETNIIKLQQQAEPIQQIGETDGYQSLNNEPVTGSVIKAEGGGKLNETVKFAATVKHRYVVQALKKDELAVYRNERRNAVKRSITMIVDLISPFIEDNYNDGEYD

SEQ ID NO: 2239 - DNA, 4569 bp, DROSOPHILA
aatttatgctaggccaaagggcttacttgcatgccttgtgggccaaaaattgacatttatatattcgttgaaacaatgaacactatcccctcccttcagcagcttctagtgttttcctcaaaacgcgtaacaaacatggatgatatgtctaccaaaaattccgttgaaatcagcttactctactctaatacacctaacgctctcctcgattccttaatctttttcattcatctcctttcgtttagcttaattttttttctcgtgactttagctaagttgtttttcgtttttctagtgtgtgtgggtgtgtatgtgtgtgtgtgagtggggggtatgttgggggtcgccaacgcacggttgccatcgaaaaggtccaatagtgtagtctaacacaacattcgttttaacaaatattaaaaaaaaaaacatacatttctttaacttataaaactgtaaagtttggtatgaatatgaaaactttcaattttccgttgaataagaagatgttctcatgtggcaaccgtgatatagtgtggcactcctttcagatgctaaggccgtaaaaaaattatctaaactaagctcaaatcaaaatcaatgcatcatcgtcttcgtgccagtctggcggatgatcccctctccacttccacttccacttccatctcccgctgcagcaccaattccagctccacttccaattccagttcaagtttaagttcccgttcccgtttcctattccgttccaactccaccggcttcccaacgctgatcctttgccgtagccatagctcctcaaatcgccactttgccacctagtgatcctgcagctaggtgattcgcagccactcctcttcgccttctgccagtgggcgctggtcgggggaggaggtggtgtcgtattagtggtcgtagtggtagccatggcagctggtggttacatgcagcacagaaagcgatgaaagaaacttttggcattgcggctggcccggctggcccttagctaacagatgataccctgatccaggctcaagttgttggtggcggccacggcagcggcattctttgccgcaatcaccacatgatggtggtggtgatgatgatggtggtgcatatgatgatggtgcaaatggtgggcggcacttgttgacttccctgagctgctgttgctgctgctggcggaggaggtggctgtggctgttgctggaacggcgacgcagtggctcgccggcgctgtgctgttgcccaaacgctgactgtggatcagcagagtggcggtgctgccggatgtggtgggactgctgccgggacttgagctcggattcgaagtgctgctgcatccattctgtgacgtctgcttcttgtagaccgtggtcagcggctccgaggcgcgacgaatgctattcaacctgaccgatgtcgtcgttggcgaatgcagtccactgctgctggtcaccgctcctccactgcgtcgtgccaccgccgaaccgctcgagtcctccagttgaaatttcttcaccagagccttgacagacgttgccgagccattcgactcacccgtcggcgtcttgcgaatcacctttggtgtggtgggtgcgtcgggaaacagagtgagtgtggccacaaccgtggcatcctcgatgccattggagctgcccagctggatggtggcgactggcttctttacaaacgtggccgtatacgtgttctccttgtccgaatccgaggctcttcgcgttggcgtcacaatctgagtgggcttgtggacgtgtccattgctgttgctggtcagcgtgtggatggccgtggtggtctcggagctgggagtgctctgcagtttgcttgtcgcaatgggtatcttggagatgctgccgccactgtttgcccgatggtggccattgtgcgtcggtttgctgtgaatttggccggatttggctagctgatgctgctggacaggttgttgctgttgttgtggcgcttctgtcgttggctcctccacgttctgtgtctcctcctcctcctcctccacctgctcctcctcttcctcgtcctccacatcgtcgtcgacatcctcctcttcctcctcttcggcatcgctctggggctgcagataaatctgtctgtccagcgagcagtcgtccttcaaccaaatgtgatccaagcagccagtggcattcatgcgatcgctgcaagaattgttatatacggttaatatttttgaaaccaactgcattataaatgaatattaatataacaacactattctacattctgtttacaaaacttctaacgataaatggcacgtacaggcaatccgctgattgtttaatggaaaaggaaatgcattcacagcaacgaaagttacgaattcctttcatcttaatcaaaatattgttgataagaatcaaagtcatgaggcacagaagctgtacattaatcactcatcacgcatcatatttaaatcaatgcgtataaacattatttatcagctgaccacaaaattaagaatgggtttcattcatttcatttccattcatttgtgtgtcatttgtgtcagtctagtaaattttagccagtgctgatacattgaattgcaaaaccgatactcactttggcttaattcgcaatgcgcgacggatgaagtcgatggccaccggcgagacgccgccgaagaggttgtccggaaaggtgagggcgcactgcgagatgttgaggaaggtctcctgtttggtgtcgccgccaaagggcgagaatccggatagcagcacgtaggtgagcacgcccaccgaccagatgtccgtcagcagggacagcggctcgtattgcagcacctcgggggccacgtagtctggtgttccggccatttcccgcacattgatgccctcgcacaccacccgcgagatcccaaagtcgcacagcttcaatccatctgttgttgttgttgttgttattaaaagacaatccattagttcagggaattctgcaggcatatgccataattgattcaaaagtatacacaccttctatgcgctcgccggcgagcaggatgttctgcggcttgaggtccaaatgggcaatggagcgatcgtgcaggaacttcagcgccttgagcacctcgcgcatgcagtggcgggcctgcgcctccgtcaggcactcctcgttgtccaggatcgtctgcagctcgccaccagtggctctgtaagggaggaaaaatgcatttagattcccatttcatatgtgaactctatgtatataacgtttcacttacagctcgaggaggagtgctgtgtccgagcgcgtctcgtgaacggcattgaggttgacgatgttgtcctcgccctcgcagagcatcagcaccgcgatctcgtgcttgatctccttgtcgctactctgcgcccggcgcctccgcttcaggaactttgccgcaaagtgcgagcccgtgttcttgtgaatggcgcgtcgaacggcggcgaatttgcccctgcgaatggagatggtattggttggtgtgattagagccaatggtttctgttacgaccagcccacacagtgcgtgagccagctgcgatcatttttcattcataagttaagtggattttggaaaggaacgctggtcagataataaacactggacgaaaaagctcaaagttaacaaaatgtcttcatttgcttagatactaaaccattttgattcatatagcacttttcttagcgaacgatttggagaattatttacacaaaaggggtaatcttaacgattcggtaagacagtatattcaaattggttttattttcttttagtgcacaaatcgaacgaaaagtgactcaacgcgacgccttttgacaaagtacgtgccataatgaagcaattgcgcttccggcaacaggcaaactactaaaacaactaaaacagcaacactacgaagtattgccaacacccaaagcgacacaacaactggcgatgcgatccggcagccagaacaggagccagagccaacccagagcggtggccagaggaaagaagctttggtgacaaagctggcataccaaatagttggccagctgcttctcttgtcattcagggggggaagggttctcctgcccccctttgggcaaccccaccgcccaccacacatctcatcccgccaagacgacgatcacgcaagcctcgatcggttaaatgtattggaggaatggataaaaggaagggacttatttcgatcacaacctattgcaaatactcttagcattaggagaatgattacttatcgataatatcgataaaagctaaaggctataatactacttttacaaatattgcaagttgcataatttaagcaaaatgattaaaggctactaacaagttcaagactatgtgaaaacagacaatacaaatacggtgaagataaccatgttattaactttatcgatggtgttgtcgattttttcgataagtaagatatatttatatttatataatataaaaaaaggcaagtttatgcatgtgtttgggtagtttccaatcatagaaagagcaccttacaaaaattcccaccgatttgatagtcgctt

SEQ ID NO: 2240 - DNA, 1917 bp, DROSOPHILA
atgatcgcagctggctcacgcactgtgggcaaattcgccgccgttcgacgcgccattcacaagaacacgggctcgcactttgcggcaaagttcctgaagcggaggcgccgggcgcagagtagcgacaaggagatcaagcacgagatcgcggtgctgatgctctgcgagggcgaggacaacatcgtcaacctcaatgccgttcacgagacgcgctcggacacagcactcctcctcgagctagccactggtggcgagctgcagacgatcctggacaacgaggagtgcctgacggaggcgcaggcccgccactgcatgcgcgaggtgctcaaggcgctgaagttcctgcacgatcgctccattgcccatttggacctcaagccgcagaacatcctgctcgccggcgagcgcatagaagatggattgaagctgtgcgactttgggatctcgcgggtggtgtgcgagggcatcaatgtgcgggaaatggccggaacaccagactacgtggcccccgaggtgctgcaatacgagccgctgtccctgctgacggacatctggtcggtgggcgtgctcacctacgtgctgctatccggattctcgccctttggcggcgacaccaaacaggagaccttcctcaacatctcgcagtgcgccctcacctttccggacaacctcttcggcggcgtctcgccggtggccatcgacttcatccgtcgcgcattgcgaattaagccaaacgatcgcatgaatgccactggctgcttggatcacatttggttgaaggacgactgctcgctggacagacagatttatctgcagccccagagcgatgccgaagaggaggaagaggaggatgtcgacgacgatgtggaggacgaggaagaggaggagcaggtggaggaggaggaggaggagacacagaacgtggaggagccaacgacagaagcgccacaacaacagcaacaacctgtccagcagcatcagctagccaaatccggccaaattcacagcaaaccgacgcacaatggccaccatcgggcaaacagtggcggcagcatctccaagatacccattgcgacaagcaaactgcagagcactcccagctccgagaccaccacggccatccacacgctgaccagcaacagcaatggacacgtccacaagcccactcagattgtgacgccaacgcgaagagcctcggattcggacaaggagaacacgtatacggccacgtttgtaaagaagccagtcgccaccatccagctgggcagctccaatggcatcgaggatgccacggttgtggccacactcactctgtttcccgacgcacccaccacaccaaaggtgattcgcaagacgccgacgggtgagtcgaatggctcggcaacgtctgtcaaggctctggtgaagaaatttcaactggaggactcgagcggttcggcggtggcacgacgcagtggaggagcggtgaccagcagcagtggactgcattcgccaacgacgacatcggtcaggttgaatagcattcgtcgcgcctcggagccgctgaccacggtctacaagaagcagacgtcacagaatggatgcagcagcacttcgaatccgagctcaagtcccggcagcagtcccaccacatccggcagcaccgccactctgctgatccacagtcagcgtttgggcaacagcacagcgccggcgagccactgcgtcgccgttccagcaacagccacagccacctcctccgccagcagcagcaacagcagctcagggaagtcaacaagtgccgcccaccatttgcaccatcatcatatgcaccaccatcatcatcaccaccaccatcatgtggtgattgcggcaaagaatgccgctgccgtggccgccaccaacaacttgagcctggatcagggtatcatctgttag

SEQ ID NO: 2241 - protein, 638 aa, DROSOPHILA
MIAAGSRTVGKFAAVRRAIHKNTGSHFAAKFLKRRRRAQSSDKEIKHEIAVLMLCEGEDNIVNLNAVHETRSDTALLLELATGGELQTILDNEECLTEAQARHCMREVLKALKFLHDRSIAHLDLKPQNILLAGERIEDGLKLCDFGISRVVCEGINVREMAGTPDYVAPEVLQYEPLSLLTDIWSVGVLTYVLLSGFSPFGGDTKQETFLNISQCALTFPDNLFGGVSPVAIDFIRRALRIKPNDRMNATGCLDHIWLKDDCSLDRQIYLQPQSDAEEEEEEDVDDDVEDEEEEEQVEEEEEETQNVEEPTTEAPQQQQQPVQQHQLAKSGQIHSKPTHNGHHRANSGGSISKIPIATSKLQSTPSSETTTAIHTLTSNSNGHVHKPTQIVTPTRRASDSDKENTYTATFVKKPVATIQLGSSNGIEDATVVATLTLFPDAPTTPKVIRKTPTGESNGSATSVKALVKKFQLEDSSGSAVARRSGGAVTSSSGLHSPTTTSVRLNSIRRASEPLTTVYKKQTSQNGCSSTSNPSSSPGSSPTTSGSTATLLIHSQRLGNSTAPASHCVAVPATATATSSASSSNSSSGKSTSAAHHLHHHHMHHHHHHHHHHVVIAAKNAAAVAATNNLSLDQGIIC

SEQ ID NO: 2242 - DNA, 3643 bp, DROSOPHILA
atccacgctcccagggctccatatgcttcacctggtagtagatctcgtcgaccacttcatggtacgttttcagtttaaacaaatggactgtttggggtacacaaaaaaaaaggcgggttagtaagtgtgacgattggcaatagcacgcgtgtggatttggttgcacctttgaagtagctggagctctggatgttggccaggatcagggcattcaggttcatcgaggattcgttgccccaaaagggcagcgtgttgtgctgcttgccggccttcttgccaccgccggccgaagatgacgccgaataatctgcacgagacaagacgccgccatcaatgaaacgctcgcggggattggatgctatgttcttactcaccttcgtccatgcctactgctcttttactattgggcgcattaattttacggctaccgaaggattgtgtgcgcgggaaaacgcgaaaaatgcaagcacaatttgcaatttacatgcgagaaaatgcccaaattggcgatgtgtatgcgttagcagtcgttatcggtgtgttatcgataacgctggagcgggcaattcttaaggtcactgctttggtcgtgactgttcaccacaagtcgtgattttcaataatttgtaataatttatttaatatttgcttatgaaaccttatttgttagcgtaatatataatatataatatattattatatcacagtaagcgcaattttcttttccttctaatgtttttgggtcaattcttatgaaaatgcacagaaaattcgcatttcgttcagttatatgcttgtccttttaattattaatttatttgatttgtaatactacatttagaaaacaaaaagtgtaattttccgttactaaatcgtttcaaaaacttgtaaatatttccagtgaatggcagagtgaccagggcgtcgaaagaattgcctttacgggcattcgcagcgaggtcacactgtgcccaactgaatccaatccgaatccccatcttcgcatccgcatctgcatctgcattccgccgccgaggacgagcacccagtggccaatccgccgaccatgtcgcccaagtacacacatgcgattgtggccaggtgagtggagcccaaattcgtctcaattcgacggattgccgcatccggaggagggagtgccccagtggcgcggaattaggtcacccaaccaaacgttcgtgggtacacatgccagtgggtggggctgcaccttccaagccgcccagttcctggatcctgtctttaacactatctagtttggatctatctgattattcaaatctttctatagctacatatctaaaatagaacttataagcctgaggataccaattttgaagttatacgtttaaaaatacagtttcctgtttaccaagcattaatttatctatttgacacatcttctacaatagtttctcccacaatcattaaacaaaatgcttaagaataggaattaataactttctttcttataaggagtagttagcacacaagtacattacccactcgtttatccactcagacgttctcgtattcgcgcctcaattagcagatccattgttaaccgctttaaatccgtagaatctcggatgccctgctggagaacggaaagttcgacgtacagctggccaagcagcagcacgagcagtactgcaccctcctgaggaccattggtctcgatgtgatcgagctgccgccggatgaccagctgcccgagggcgtatttgtcgagaacagtgcggtgatctgtaacggagtggccctgatcggaagatcggagcatcccaagcggcaactcgaggccgagagcatggccattattctcaaaaaggagctggacattccggtcatcgagatcgaggatccgaacgctcagctcgatggtggcgatgtgcttttcacgggtatatatttcatttaaagagataccatgatatcataattaattcattgtgttaattgcattaggtcgcgaattcttcgttggcatctccagtttcaccaatgaggagggagcccgggcggtggccatggcctatcccgaatatccagtgacgccgattcgggtattgttataatataactattggaagctttatagattatccactaattcagtaaacatctgtgaagagatctttgagattgtctattaaagcttccctttctttgtacaccgcccattaatatgtgcatatattacaaatcaggtcaacggcaccaagaggctgaagtactatgtgaccatggcggggccggaagtgctgtgtgtgagcagtagccccacctgccaggagatcgtcaagcggatggagcgcgaggccatctgcacctaccagaagttgactctgcccgaggagagtgcggccaatatgctgtacatcaatggaacgatcgtgcacagatccccaacggaaattccagaagcctacaaggtcagcatcgatcgttctaattagacgccatgctaattgtttttttttttctttcgggcagactttaaaagagaaaatcgacattccaacacgcaacataaatattagtgaatttagccaatattccagtggtctgacctcgtcgtgtttgttgctgcgacgctggaagtccatacggagcttgtgaatctctctgggagccgagaggttcaaccgaccggagtgagaagcattgccatgagaaacatgcacaacaggcccaaggagcaggatactgcatgcattccctgctctgtccaggcatcagcaaaattgtattatcttattatagtttatacacaccatctcttgttattgttacacaattaagattaaacctttgacgctaatcaaactgattgtcgctgaggcgtcgctgctgttactttccagctcattgttattttataggttgtgtaattcaatcagagttggaaagtatcatcgccgtcgacgtccagatagatgatcgccattcctcctccactcacaatccatgacgatgttgaacggatatcattgtattaatatggtaaaattactattatgaattgtatctactttacaagtagtttgttgaatgtgttcactgtctgtcctcgaaataaatgcaacatttgtaatctcttcttaaaaaaaaaatcttaaaatgcatcatttgggaatgaaacgccgggctaactttaagtgaacatttcatttatttataactaaatataaacttagcctacatttaaatgcattttgctttatcagtatttaaaacttatcaaatgagtgtaggacttttgggtggagatttgtgtggtgatttctatgacattgtggatataaatgatcgattgaccatctggttggatgaagttttctccggtgagtgtgagatttgttgatcttttgtggagtaatactagtcataataaatagggagtccttactataattacaagttcagttagctggctaggttttaagtgggcgaaacttaagatataagcccactgcccatatatatacatatatatatatatatacatacatatgcatattggcgagggtcagtgggttgggtacacatcttggtactaaaatactttgggactggcacgtttaatcttttggattgccggccaagcggggttgttgcg

SEQ ID NO: 2243 - DNA, 873 bp, DROSOPHILA
tcgcatccgcatctgcatctgcattccgccgccgaggacgagcacccagtggccaatccgccgaccatgtcgcccaagtacacacatgcgattgtggccagaatctcggatgccctgctggagaacggaaagttcgacgtacagctggccaagcagcagcacgagcagtactgcaccctcctgaggaccattggtctcgatgtgatcgagctgccgccggatgaccagctgcccgagggcgtatttgtcgagaacagtgcggtgatctgtaacggagtggccctgatcggaagatcggagcatcccaagcggcaactcgaggccgagagcatggccattattctcaaaaaggagctggacattccggtcatcgagatcgaggatccgaacgctcagctcgatggtggcgatgtgcttttcacgggtcgcgaattcttcgttggcatctccagtttcaccaatgaggagggagcccgggcggtggccatggcctatcccgaatatccagtgacgccgattcgggtcaacggcaccaagaggctgaagtactatgtgaccatggcggggccggaagtgctgtgtgtgagcagtagccccacctgccaggagatcgtcaagcggatggagcgcgaggccatctgcacctaccagaagttgactctgcccgaggagagtgcggccaatatgctgtacatcaatggaacgatcgtgcacagatccccaacggaaattccagaagcctacaagactttaaaagagaaaatcgacattccaacacgcaacataaatattagtgaatttagccaatattccagtggtctgacctcgtcgtgtttgttgctgcgacgctggaagtccatacggagcttgtga

SEQ ID NO: 2244 - protein, 268 aa, DROSOPHILA
MSPKYTHAIVARISDALLENGKFDVQLAKQQHEQYCTLLRTIGLDVIELPPDDQLPEGVFVENSAVICNGVALIGRSEHPKRQLEAESMAIILKKELDIPVIEIEDPNAQLDGGDVLFTGREFFVGISSFTNEEGARAVAMAYPEYPVTPIRVNGTKRLKYYVTMAGPEVLCVSSSPTCQEIVKRMEREAICTYQKLTLPEESAANMLYINGTIVHRSPTEIPEAYKTLKEKIDIPTRNINISEFSQYSSGLTSSCLLLRRWKSIRSL

SEQ ID NO: 2245 - DNA, 4711 bp, DROSOPHILA
gaccctgggtcgtttccatggcgtggccctggccttcaatgccctggatagcaagaacttcgagaaggctgctggttcgctggaggagacctactatggcgaacacacccgcgagtggtacacgggcttcctcctgctggcggagaatgtggccacggacgccgtcaagcagatctatccgaatagcaaatacgagactgtggccacaaacttcctgcagccgccgctgttcgatgatctgatcaatctggtgtccactcgctccaagttgagtgtcttcgggcacggcgattgctggacgcccaactttctgaccaagtacaacgaacggggacaatcggaggagatcatcatcattgatttccagttggccaggtgctcctccttggccctcgacctgagcttcttcatctattcctgcactagccaggagctgagggaacagcactacgatgagctgctccgcgcctacctggagagcgcccaggatttgattcaggatctcggtggcaatgcagagtctatcatctcctgggaatcactgcaagaggagctaaagaactttggtcgctttggttgcggcatgggcatcgaatcgctgccgatgacgatgatggaggacgatgaggtggccgatctggatggaatcaaggagaacgccattctcaccgacatctggaatatcacacccttcaaggagtccgccaagcagcagcgactggctgatatcttcaagcacgccatcgatcagggctacattaagtgagctcattaatttctatgataaaatcgaattcatatagtattgggtatttcgtaattgtaacccatataatgtacaaaactgtaactccagataattaaaagcatattatagacacattttggattggattaaaagcagatctttatgggcaataactgatgaataaaataacatagtttgaaaggtatgtacatggtatgtgctggtgctaaaactaggttcggaacgaccgatttagaggcactgtccttcgtggaggacgcaccagtgcggaataactgcatccgcatggattccgcgcgccaggagtcgctcccggtagcggtagaatcttctttgggccaacagggctgaagactttggatttgaccacattcgctcggctgctgctccagctcgcggccagattcgggattctgtaggggattggattgggtttaattaaatgggtttggttcaccgtttggttccctagcgtttacatacccagtgagttctgatccacatactcgctccacatgcacacctcaccgccgagaacctgatccttgctgcgaccaacgggcatgccactggagtacacggtgcgccagttgtagtacgatgtgctgccccagaagccgtgatccaggtaccaggcattcttcgtggacacaatcagtcggtagcctcgctgcaatagctcccgattgagggcatcctgtgactccacccatgtctggattatgaaccgctccttgggcaggtaggtctcgatgtaccggggattggtgaggtgactggaccagatgatcaccgacttcggctccttgatgcccggatacatacgctcgttaatctcgtcccatgcattgaggttccgctgatggaattgcgaccacagccgcaggaagctctgctcgctgagatcgtagccacgtgcccgcatcccatcccgaatctcgtcggtgttattccagcagggaaggaacacctcgtcgccgcccatgtgcagggtctcctcgggagcgcccacctcggctacgtcctcgaagatctccttgagcactgcgtacatatgatcgttcaggggattcagttggccgcacggtggctgtacacagaatctcctccagggcgattgattcaggcacacggacatgttgcccagtccggcggcaggaccccattgccagccattgcccgcatgcgagggtccatcgatctcgatcagtatccgtatgccccgcagtcgggcatatttcacaagattcagtgcatcctggcgcgagtacgtctgcgatgaggagtacgctccgtaacgctgcatctccggcaccctggtgatctccagcggaaaactgtgcgtgtccaccacatgccagtggagcacattcagcttactggccgccatcgcatccaaggtgctgcgtataaacttgagcggcacaaagttacgggccgtatccagaaggacgccgcgatgcgaaaaggccggacgatcggtgatgttggccgtggtgaccatcagcaggccattggacaggctgccggtgaccaggttgctcagcgtctcgaaggcatgacgtgcaccgtacaccgtcgtcgcttggatgtccacaaaggtggccgtttcagtggttcgcaccaccagggcgtagctctcgtcggtgggccagtccagaacgaggctctcgttggccaccgtggatctgaccagaatctgcttgctggtctccagcgtgcagtttcgtatgcactccttcagcagattcgagacgaacagccggttcgtctccctgagaaactgggtggccgcctcgccgggcgccacaacatggaaacgcaccttccacggatcgaatcgtacccgcctgtgcgatatggtgcactccttgccggtgggcatgggccagatggctccgtacttgccgcacgacagtcggcaatcccgctggctctcgaagatctccggcgcgtactgcagtccggccaccatctcgccctccgcggtgcagatatccgtccggctgcacagccatttcctggaaattcggaagatattgctataataaagctaagtacatatatatttagatacataaagcagatttcactttatttattgcaaattcttttcaataatatatgcagctgcatagaaagtagttcttattctgtcgctttgccttttgcacttgttccctttacgaaaattgcacttggagcgaatgcaaattaacatgtaaatgcatttggcacagttaaattttcacctgttttcttctgtttgttttattttctagtttttaagactgatttcacttgttgctctcagttatttgaggagatattggatatcctgctgagcatagacaccaaccatttgttatccgttggcagttttttaaagttctcttttgtagaatgaatagatttcctttaatatatttaaaagtagtggactttttggactttttttcactagtctgctgagcgcatataacacttgaaatttcattgaaaataaagaacagtcagttttttgtattttcactgcattttgttagcaaaaattgttatacttccaaaacaaaacatgtatttaaaaaaaaacttgcacttgttgcactgatttcctttatgaagcaaagacacaaacctgctggcgctgccggcgtcggcgtcgctgccgacgtcatctgcccgcgtcagcgcagcgccgaccgcgaaggataatagggataatagcagcagcgatccaacagcagagcaaaagcactgataacgattgtagccgctgaaccgcatcgtttctttctaacggcttctttggctgcgccgctcgcttttataatttctgttcggtatttgctatatttgttgtgttaggggggtgtgtacggtgtattcgctattttcaaccggccgcccacccgctccgctcgccgagcacaacaacactgaagagctgaaatcgaaaaagcgaataaaataaatccagcgaaatttcacttgcagcgcagtagcggccgcaacaacagcaataacaagtcgagcttatcgtcaattgaattgaagagagtgcaagagcgcgagagagcgcggattgaaattacactgcgagaaacgccaagtccttgcattacactgctactccacattaatgcttggcaattagattttacagctttattaaatgagcttccctatactaacaggacacttgatgcatgaagtgccacgtcttttctgcctgtgtagtgctgtgaaatcagcatatctcccactctttgaagcaaaccccaccccctggagagtggcccacatacggaagttgtggggtgagtgataaaatggaaaatatatacatacatatgtatgcatgtatgtatgtatatgcggtgcaagaaccgcagcaacaacaataatcgtgggcttgaaaactgccagcgtgcaaaacaccaaaaagaatttaactaaatcaacctaattcttcacaaatttcggcacaaatgcagttaagaaagccagcatattaattaaacataagtacatacacacatgtgtagtatgtagatacatgtagtatatgccaattgaacttgcaacatttaagattccaataatacatctcgaaaatattattcaaatgagtttccaccctcgaggtaaacaaagcagcagttaattataaacaagatagaacggtgtatcaattttcagttaacacaaataatcaaaaaattattgtttatagtagatagataaacaactcagcaatggggaatggaaccaccgtcttatccctccaaagatacacaactatatttgtgcttttttagtatttatcatttgtttctgcgtcgatttttcgttgagttttcgcatttgattcgtcttgtattatcatgttgttgcacgtacagttgaggccgtgactgtaaggcaaaataaaagatgtat

SEQ ID NO: 2246 - DNA, 2024 bp, DROSOPHILA
cagtgttgttgtgctcggcgagcggagcgggtgggcggccggttgaaaatagcgaatacaccgtacacacccccctaacacaacaaatatagcaaataccgaacagaaattataaaagcgagcggcgcagccaaagaagccgttagaaagaaacgatgcggttcagcggctacaatcgttatcagtgcttttgctctgctgttggatcgctgctgctattatccctattatccttcgcggtcggcgctgcgctgacgcgggcagatgacgtcggcagcgacgccgacgccggcagcgccagcaggaaatggctgtgcagccggacggatatctgcaccgcggagggcgagatggtggccggactgcagtacgcgccggagatcttcgagagccagcgggattgccgactgtcgtgcggcaagtacggagccatctggcccatgcccaccggcaaggagtgcaccatatcgcacaggcgggtacgattcgatccgtggaaggtgcgtttccatgttgtggcgcccggcgaggcggccacccagtttctcagggagacgaaccggctgttcgtctcgaatctgctgaaggagtgcatacgaaactgcacgctggagaccagcaagcagattctggtcagatccacggtggccaacgagagcctcgttctggactggcccaccgacgagagctacgccctggtggtgcgaaccactgaaacggccacctttgtggacatccaagcgacgacggtgtacggtgcacgtcatgccttcgagacgctgagcaacctggtcaccggcagcctgtccaatggcctgctgatggtcaccacggccaacatcaccgatcgtccggccttttcgcatcgcggcgtccttctggatacggcccgtaactttgtgccgctcaagtttatacgcagcaccttggatgcgatggcggccagtaagctgaatgtgctccactggcatgtggtggacacgcacagttttccgctggagatcaccagggtgccggagatgcagcgttacggagcgtactcctcatcgcagacgtactcgcgccaggatgcactgaatcttgtgaaatatgcccgactgcggggcatacggatactgatcgagatcgatggaccctcgcatgcgggcaatggctggcaatggggtcctgccgccggactgggcaacatgtccgtgtgcctgaatcaatcgccctggaggagattctgtgtacagccaccgtgcggccaactgaatcccctgaacgatcatatgtacgcagtgctcaaggagatcttcgaggacgtagccgaggtgggcgctcccgaggagaccctgcacatgggcggcgacgaggtgttccttccctgctggaataacaccgacgagattcgggatgggatgcgggcacgtggctacgatctcagcgagcagagcttcctgcggctgtggtcgcaattccatcagcggaacctcaatgcatgggacgagattaacgagcgtatgtatccgggcatcaaggagccgaagtcggtgatcatctggtccagtcacctcaccaatccccggtacatcgagacctacctgcccaaggagcggttcataatccagacatgggtggagtcacaggatgccctcaatcgggagctattgcagcgaggctaccgactgattgtgtccacgaagaatgcctggtacctggatcacggcttctggggcagcacatcgtactacaactggcgcaccgtgtactccagtggcatgcccgttggtcgcagcaaggatcaggttctcggcggtgaggtgtgcatgtggagcgagtatgtggatcagaactcactggaatcccgaatctggccgcgagctggagcagcagccgagcgaatgtggtcaaatccaaagtcttcagccctgttggcccaaagaagattctaccgctaccgggagcgactcctggcgcgcggaatccatgcggatgcagttattccgcactggtgcgtcctccacgaaggacagtgcctctaa

SEQ ID NO: 2247 - protein, 622 aa, DROSOPHILA
MRFSGYNRYQCFCSAVGSLLLLSLLSFAVGAALTRADDVGSDADAGSASRKWLCSRTDICTAEGEMVAGLQYAPEIFESQRDCRLSCGKYGAIWPMPTGKECTISHRRVRFDPWKVRFHVVAPGEAATQFLRETNRLFVSNLLKECIRNCTLETSKQILVRSTVANESLVLDWPTDESYALVVRTTETATFVDIQATTVYGARHAFETLSNLVTGSLSNGLLMVTTANITDRPAFSHRGVLLDTARNFVPLKFIRSTLDAMAASKLNVLHWHVVDTHSFPLEITRVPEMQRYGAYSSSQTYSRQDALNLVKYARLRGIRILIEIDGPSHAGNGWQWGPAAGLGNMSVCLNQSPWRRFCVQPPCGQLNPLNDHMYAVLKEIFEDVAEVGAPEETLHMGGDEVFLPCWNNTDEIRDGMRARGYDLSEQSFLRLWSQFHQRNLNAWDEINERMYPGIKEPKSVIIWSSHLTNPRYIETYLPKERFIIQTWVESQDALNRELLQRGYRLIVSTKNAWYLDHGFWGSTSYYNWRTVYSSGMPVGRSKDQVLGGEVCMWSEYVDQNSLESRIWPRAGAAAERMWSNPKSSALLAQRRFYRYRERLLARGIHADAVIPHWCVLHEGQCL

SEQ ID NO: 2248 - DNA, 7572 bp, DROSOPHILA
catttggtaaacatttggagtttttcatccgattttccgctacaaacacaaaaaatgcgaaactccgcgctccgctccaaagctgaaccgttccgattgaaaatcgtccgctgtacgaccccgcgatttgaaaatttttcgccgactggccgtttcatgagtgtttcagtattttgctgcgtctttttacccacgattttggtcacactactgcgccatccatctcttgttcacacagccatttcataaaatgaaagaagaggacaacaacataatggtaaaaatgttttttctccgcggggttggtcacaggatagtaagaccatggctcggctggagaattataccgcccgaagagagtaagagagcactaacttaagaccagttttgacaaattgagcctaacagtgtgaccagtaatttcctaataaaatcgttattctgacttatatattaaataatttaaattctattttacgtttaaaatcataaaagcaatctgaaaaacacaagactaacattatgccaaccgatagtcctattcattgtgttatttaatacaaatttttctaagagaagacttgcactaaatgaacaaaattttttttattaaatttgtatagttttgcttatgtgtagctgttggtttgttgttgtttgctttagactctttcatatgaattcgtcttggtttattttagtattttcggtcccttacaagctctgacggctacaaaacttgtggctccacatatttaaagtacaaatatgtaaccccttctctaccattaaatgggagctggtctataatatatttctaatgggatggaatttttaaaacaactagacataaaagtatactttaaggttttgattgtgactaaatatgatatctaaataaataaagaaatggatctccaaataaatatacatatattatgtatatactttccaaacactaatatttatttaaacaaaacataagaacgatagcagtgcattttttatgtcttaaaatgtagtgagttagacaacacgtgaatgaaatttgctttcttttattatcacttattactctcatttatttttaagagtgccatttattctaatcacatcattttcccaataacttctcacattttttgtcactctctcctgataagatacgagcggagcaatcaacgtttttcgtactgaacaaatattagttacgctggacttctaaggccgaacggtcgctagctcccttagcaaaaaaaatatatgtgatcgttggtagtgaaaattgcacgcattttgaaaatgacgtcactgggcggaagggcgttcttgtggatatatttggtttttctaatagctgagatctctcattcggatgcagattcaattggtttgttagccggcagctttgacgtgacataacggatttgttatcgccatctcttttacgcagatgatcagtgcaggcacgcagacagctgcgaaagatgtttatccgctcatctggaatgcgcttggtgcacggacaaggtgagtacgagggagatggcaagaaaacataaacggttcctactgctgctgtcatccttgcgaagtcaatcattttcctatttggttgcatatcaggaataccaggtgggatatcgttgtctctctcgccggcaactacttaactacaactgcagtgaaacggatatatacgagaaccagccggtcctagatgtccttcaggataagcccctaaaggactacgaaaccagtgatcaggctgtccaagtcacaccccagcgggcataccttaagttggtcaaaggtgtgtgtttggataattgttttatttagcttttcttatcttatcaaatttgatttatcatgtggctaccaacactttttcatgtgtgtcacccttccaattcttccccactacttcgtatttgttccacatttgctccacatcatttttaaacattttgtttttgtgtccgtgctttgcttatcaggccttggtggttgtcacatcttgttattgttgtaccatttagcgtgggaatacctatccctctctttctttccgccgtccttgtccaacacttttgaaagttcactgacccaaagacattataataattataatctaatgtctgattgaaaacccactttataggtattgagatacttaccttataagtattgtgatcccagaactaatagattatgtattcgttgtcgtgctgaataagcgagcaaaaatgagtcacaagaatgtgcttttgttgtttataagttttctcgagggttgaataatatttcaatgagtaaaacgcgattaatttcaaaaaaaaaaaaacatacattaatattttggagctttgatccggaaatactcaactaatttctacatatatcactaacttctaagattaaatcacagaaaaccacaacctataattgtattttattatttttagttgttaacccattttggggtagttatttttagcatacagacccaactagcacttttattccttagtctccataatgcatttgcgtttatctcaattgatatggtgctaagttgttttcatcgagccgcattttgatgtctgtcaataattttgattctccaagagcttgttaaccaatttaataaccattagcatcgcttgcgtagaaatctagctaggttaagaaaaccagttattaagcacaaacagtggtatagggaagtcggttaattgcacgcttaaggattacaaggaagccaaacatttatcctgggtgtgaactggctcaagtggtaatcaatggttacaaagcagcagtgaagtgcacagagaaaatgagttgacacgcaatatttcttttcatctttgacgaaaaattatttatttattttaaatattaacagaacttttttctcaaaggccgacataaaattgagtgctttaaaatgtaacaccctaaaatgcacttcagtgaatacttaatttaaaaagctatagtttttctcactgcgagactgaaatgggtgcagaatatatatcagactggtttcagcttatgtagatgtgtcagcccataaaacagctcataaacaaggttgcctttcaggtgcatagtaaaccgatctattaccttttattcctttttgtcttacaggaaacacgcaaagaatgaagctgagctatagaactgcacgcaacaatccactcgatttgtacgtattgatggatctaacctggacaatgagggatgacaagaaaaccctggaggagttgggagcccaactcagtcagactcttaaaaatctaacaggaaactacagattgggatttggttctttcgcggacaagccaactctacccatgattctgccacagcatagggaaaacccctgtgctgcggagcgggccacgtgtgaaccaacctatggatatagacatcaactttcgctaaccgatgatataccagcgttcacctcagccgtggcgaacagcaaaatcactggaaacttggacaatctcgaaggtggcttggatgctctaatgcaggttatagtgtgcaccaaggaaatcggctggaaggaacaagctcgaaaagtggtgatcttagtgaccgatggctttatgcacttagcgggggacggtcttctagcaggtattatccagcgcaatgataagcagtgtcacctgaataaagcaggtgagtacacgggttcattgaactacgactacccctcgctggaagaaatctatcgggagttgcttcgtcgcaagattaatgtaatctttgctgtcaccgaggaggttgtaagtagctattgggaactcagtgccctaatgaaggaaattagttacgtggacatcctaagtgctgattcctctaatatattggaactaatcaaaaagaggtaagtggggcggtagtactcttcttagatcctaaatctcattagttctaccttttagctatgagagtttgattaaacgcactcagtttgccgataacagcccggattttattgacatggcttactatacggattgcggtggtcagtttcccagcttacaaaagcggaattactgcaataacgtcactctgggcaagcagattgatttctacgtggacgtcactctcaagaaatatcccgataatcaggtttatgtaagacaaacaatactaagtggaaaacaacaatttaattcaaggataatcttttggatatatgtttgcacagttcacttaccacttcattctctttcgcttttagacacacaaaatccgggtggaggaaacctccttgagcgagttcatggatttggatgttgagcttcagcggccgtgtccctgtcaggaaacaccagatccggaaaacgaggaaggacgtttcctgtgcgattataagggctatttgtactgcggaatgtgcgaatgcgatgaggggtggactgggacctattgcaactgtcccacagatgccacaaatgtcaccagcaatgaagctctgctccagaaatgccgtcaaccgttttcggataaatccacctccgaattggtttgctccaatcacggggactgtgactgcggaacttgcttgtgtgatcctggatatacgggtcctttttgcgagtgtcgcgaatgcctggactgcgatgaaaagctggctgattgtttctgcggccaatgcgtttgcaaatacggatggtcgggtagcaaatgcaactgcgatggggataccgatgcctgtgtgggacccacgggcgaaatatgctcggaaagaggcacctgccagtgcgaggagtgccagtgtgaggagccgtatttgggtaaattctgtgaaatcgatccagagaaggacaacaaactttgtttgttctacgagccctgtgtcacatgtctgatcgagcaaaaacagggaatgggcgtctgcgaaaacttgactgaaatatgcagcagtttggatagacaagaaacctatccatacaactttgtccacgagctggatcctgagcaggatcaatgcttggtacgactggtgaacaaacatggcatccaatgcgacagcttcttcgtctatcaggtcatcgaccactcaaacttcttgaccatccaggcagttgattgcgagcccccggattacgtggctctggtgggatatatatcggcatttacgctgctcattggacttttgatcattttcataattctgtggtacattcgagctaaggatgccagggaatatgccaagtttgaggaagatcagaagaatagtgtccgacaggagaatccaatttacagggatccagtgggtagatatgaagtgcccaaggcgctaagtgttaagtatgatgagaatcctttcgcaagttaacatgaaaaatgttttttttttaagatattagattgtactttgacttaaaattttcttcaaaatttgtgtatacccgttactcgtagagtgaaattatacactagattcgcgttgaaaagtatgtaaccggtagaagtaagcgtttccgttcatattttagttttagtttattttcttgatcacaatacatagccgaattgatctggccttgtctgtccgtccgtccgtttgtttttttttttttctaattttgttcccattttctgtcggtattccaaaaaatctctccttcgcatttttacttgatgagtaatggatagctgatattcggttaactcgactatagcattctctcttgtttttaagctattgtaactcaagaattacgagttcacgaagacattaatacaaatataaattttaggtgtttattaaaaagtattagccccgttcagaaataacattccaattccaagactggtcacaacaatagcactattaagatcaataattttatataatatatttagaacataaatttgttttttatacatagaaattatatgaattagttcaaaaactcgtgtatatctacgctaaatgagctaaaatttattacagctaaaaaacgagtaaacgtataacaaagttagctttcagttttcgtattggacagctcctttcagcgattgtattcatataagtacaaaaataatggcttaagacatcgtttacattaatccgcttggggagtatagatgactactggcaaatcggaaatgcaaaacattaccttaacttaagaggcattacaaaaatacaattcgattaattaaggctaaacgctttccccttcaatctactttaactaaatataatatcactagattcgtagcttagactaagtattggttcctcgcggccaaaacgccaaaaacacgaaattcaattacacatgctcgtacctccacgttggaaaaagaataatgtaaatacaacaacagcagtggatgatgcgcccttggtgttgggcgctcaaaggactcgctcccccagcgacggtgtcctttggatgagcatcgagggtggcttcgccggcagagtaacgctacttagctcagcatccaaagcggcgatatcggcggccgtcaacttggaattggagttcagcggtacggtgggaacggctatggagctgggcaggccgtgtggggaggcgtcgggcaccaggcgcttcaacaagccacccacgcagccccaggggaaggtcctgcgaaaaacaaggagggtgggtgagtaaaggtgggcccaggcaaaggtaaatattgtgcattatttaggagaaacacattaaagcgagaccattaggcatgtggacggggtgcgctatgatttggggtaggggctacctacccttctctagggcttttcctttgctcgactaaagaaaatattggtaacaatggaaatttgttttgtatatttttacaccagattttataaacgatttatttatagctcagtggtagcttaagtaaagcaatttgtatttcaggcccaaaaggaatattactttcattgctaacactttttttttaacagtgtactggacgagcgagcactcctgcttagatctgcattttattttgcatctttattattgatgcggcaaatagggatgtggtcacgcttttatatcgtggatttcctatattatttgggagtgccacataaagtacacattaaggttttgttaaactttcgaattttacccatgatactgcgaaaaaagatattggatggaacaagttcttgtgacttcaagtgatttgcttttgaacaaaatactgggcagatgctatattctttattaatgctagtgattttccctgacaaaagagagcccatcattaaatcaacattagctgcaacacctgcaccctttcccactaaccacgtatgccacgtattcctcctcgacagcgaacacggcattaaataaactcaaattaaaatattcaagtcaagcttttcccattaggggcctacaagcaccttacaaccattatggcgcctaattaaatgcggcaaattatcattattaagctggggcgaaagttcgtttgtttacataccacttgaaggagaggaggaccttcaggaaaccgggaatgacggccagtttctcgttcttcctg

SEQ ID NO: 2249 - DNA, 3900 bp, DROSOPHILA
ttttttatgtcttaaaatgtagtgagttagacaacacgtgaatgaaatttgctttcttttattatcacttattactctcatttatttttaagagtgccatttattctaatcacatcattttcccaataacttctcacattttttgtcactctctcctgataagatacgagcggagcaatcaacgtttttcgtactgaacaaatattagttacgctggacttctaaggccgaacggtcgctagctcccttagcaaaaaaaatatatgtgatcgttggtagtgaaaattgcacgcattttgaaaatgacgtcactgggcggaagggcgttcttgtggatatatttggtttttctaatagctgagatctctcattcggatgcagattcaattgatgatcagtgcaggcacgcagacagctgcgaaagatgtttatccgctcatctggaatgcgcttggtgcacggacaaggaataccaggtgggatatcgttgtctctctcgccggcaactacttaactacaactgcagtgaaacggatatatacgagaaccagccggtcctagatgtccttcaggataagcccctaaaggactacgaaaccagtgatcaggctgtccaagtcacaccccagcgggcataccttaagttggtcaaaggaaacacgcaaagaatgaagctgagctatagaactgcacgcaacaatccactcgatttgtacgtattgatggatctaacctggacaatgagggatgacaagaaaaccctggaggagttgggagcccaactcagtcagactcttaaaaatctaacaggaaactacagattgggatttggttctttcgcggacaagccaactctacccatgattctgccacagcatagggaaaacccctgtgctgcggagcgggccacgtgtgaaccaacctatggatatagacatcaactttcgctaaccgatgatataccagcgttcacctcagccgtggcgaacagcaaaatcactggaaacttggacaatctcgaaggtggcttggatgctctaatgcaggttatagtgtgcaccaaggaaatcggctggaaggaacaagctcgaaaagtggtgatcttagtgaccgatggctttatgcacttagcgggggacggtcttctagcaggtattatccagcgcaatgataagcagtgtcacctgaataaagcaggtgagtacacgggttcattgaactacgactacccctcgctggaagaaatctatcgggagttgcttcgtcgcaagattaatgtaatctttgctgtcaccgaggaggttgtaagtagctattgggaactcagtgccctaatgaaggaaattagttacgtggacatcctaagtgctgattcctctaatatattggaactaatcaaaaagagctatgagagtttgattaaacgcactcagtttgccgataacagcccggattttattgacatggcttactatacggattgcggtggtcagtttcccagcttacaaaagcggaattactgcaataacgtcactctgggcaagcagattgatttctacgtggacgtcactctcaagaaatatcccgataatcaggtttatacacacaaaatccgggtggaggaaacctccttgagcgagttcatggatttggatgttgagcttcagcggccgtgtccctgtcaggaaacaccagatccggaaaacgaggaaggacgtttcctgtgcgattataagggctatttgtactgcggaatgtgcgaatgcgatgaggggtggactgggacctattgcaactgtcccacagatgccacaaatgtcaccagcaatgaagctctgctccagaaatgccgtcaaccgttttcggataaatccacctccgaattggtttgctccaatcacggggactgtgactgcggaacttgcttgtgtgatcctggatatacgggtcctttttgcgagtgtcgcgaatgcctggactgcgatgaaaagctggctgattgtttctgcggccaatgcgtttgcaaatacggatggtcgggtagcaaatgcaactgcgatggggataccgatgcctgtgtgggacccacgggcgaaatatgctcggaaagaggcacctgccagtgcgaggagtgccagtgtgaggagccgtatttgggtaaattctgtgaaatcgatccagagaaggacaacaaactttgtttgttctacgagccctgtgtcacatgtctgatcgagcaaaaacagggaatgggcgtctgcgaaaacttgactgaaatatgcagcagtttggatagacaagaaacctatccatacaactttgtccacgagctggatcctgagcaggatcaatgcttggtacgactggtgaacaaacatggcatccaatgcgacagcttcttcgtctatcaggtcatcgaccactcaaacttcttgaccatccaggcagttgattgcgagcccccggattacgtggctctggtgggatatatatcggcatttacgctgctcattggacttttgatcattttcataattctgtggtacattcgagctaaggatgccagggaatatgccaagtttgaggaagatcagaagaatagtgtccgacaggagaatccaatttacagggatccagtgggtagatatgaagtgcccaaggcgctaagtgttaagtatgatgagaatcctttcgcaagttaacatgaaaaatgttttttttttaagatattagattgtactttgacttaaaattttcttcaaaatttgtgtatacccgttactcgtagagtgaaattatacactagattcgcgttgaaaagtatgtaaccggtagaagtaagcgtttccgttcatattttagttttagtttattttcttgatcacaatacatagccgaattgatctggccttgtctgtccgtccgtccgtttgtttttttttttttctaattttgttcccattttctgtcggtattccaaaaaatctctccttcgcatttttacttgatgagtaatggatagctgatattcggttaactcgactatagcattctctcttgtttttaagctattgtaactcaagaattacgagttcacgaagacattaatacaaatataaattttaggtgtttattaaaaagtattagccccgttcagaaataacattccaattccaagactggtcacaacaatagcactattaagatcaataattttatataatatatttagaacataaatttgttttttatacatagaaattatatgaattagttcaaaaactcgtgtatatctacgctaaatgagctaaaatttattacagctaaaaaacgagtaaacgtataacaaagttagctttcagttttcgtattggacagctcctttcagcgattgtattcatataagtacaaaaataatggcttaagacatcgtttacattaatccgcttggggagtatagatgactactggcaaatcggaaatgcaaaacattaccttaacttaagaggcattacaaaaatacaattcgattaattaaggctaaacgctttccccttcaatctactttaactaaatataatatcactagattcgtagcttagactaagtattggttcctcgcggccaaaacgccaaaaacacgaaattcaattacacatgctcgtacctccacgttggaaaaagaataatgtaaatacaacaacagcagtggatgatgcgcccttggtgttgggcgctcaaaggactcgctcccccagcgacggtgtcctttggatgagcatcgagggtggcttcgccggcagagtaacgctacttagctcagcatccaaagcggcgatatcggcggccgtcaacttggaattggagttcagcggtacggtgggaacggctatggagctg

SEQ ID NO: 2250 - protein, 799 aa, DROSOPHILA
MTSLGGRAFLWIYLVFLIAEISHSDADSIDDQCRHADSCERCLSAHLECAWCTDKEYQVGYRCLSRRQLLNYNCSETDIYENQPVLDVLQDKPLKDYETSDQAVQVTPQRAYLKLVKGNTQRMKLSYRTARNNPLDLYVLMDLTWTMRDDKKTLEELGAQLSQTLKNLTGNYRLGFGSFADKPTLPMILPQHRENPCAAERATCEPTYGYRHQLSLTDDIPAFTSAVANSKITGNLDNLEGGLDALMQVIVCTKEIGWKEQARKVVILVTDGFMHLAGDGLLAGIIQRNDKQCHLNKAGEYTGSLNYDYPSLEEIYRELLRRKINVIFAVTEEVVSSYWELSALMKEISYVDILSADSSNILELIKKSYESLIKRTQFADNSPDFIDMAYYTDCGGQFPSLQKRNYCNNVTLGKQIDFYVDVTLKKYPDNQVYTHKIRVEETSLSEFMDLDVELQRPCPCQETPDPENEEGRFLCDYKGYLYCGMCECDEGWTGTYCNCPTDATNVTSNEALLQKCRQPFSDKSTSELVCSNHGDCDCGTCLCDPGYTGPFCECRECLDCDEKLADCFCGQCVCKYGWSGSKCNCDGDTDACVGPTGEICSERGTCQCEECQCEEPYLGKFCEIDPEKDNKLCLFYEPCVTCLIEQKQGMGVCENLTEICSSLDRQETYPYNFVHELDPEQDQCLVRLVNKHGIQCDSFFVYQVIDHSNFLTIQAVDCEPPDYVALVGYISAFTLLIGLLIIFIILWYIRAKDAREYAKFEEDQKNSVRQENPIYRDPVGRYEVPKALSVKYDENPFAS

SEQ ID NO: 2251 - DNA, 6950 bp, DROSOPHILA
gaattgtcttacggacagtgagatgagtacgactatttggaaatcacaaacgaattgttttcatggttgacgcgcttgtcaagctacaaaacaaaatgaatgatatacaatatacaatatacaatatgcaatacaatacaatacaagacaaaaaaatgtgtcttggaacgcaacattgtacaagtcgcaatgcaaactgaagtcttaaaagacgtgtaaaatgttgcaaattaagcaaatatatatgcatatatgggtaacgttttacgcgccttaaccagtcaaaatacaaaataaattggtaaatttcatataactagtgaaatgttatacgaaacttaacaattgccaaataatacagatcgatttagagcgagatgacaatagagaggcgatctctctcgtatacgagtcttgaaaagaaagagaaggcgaacggtgctggcttagagagagatggcaatactaattaactgcaaatacatttccgccattttgttggcgctaaaagtaacggaaattcgagatgcttttagggctgccaccttggtttccagggtgaccagaactgacacttaaattacatatgacaaataaagacttatctgctattgcaaatactgttttaagcggctttttttccatcaaatttgttagttcttgttcctgttttaataagttggcaataccgatcctccgcacttgctatgtgtgtctataatcatatagggtggcagcgcaggccagggctggcaagggtggcgcattaacagagttctgtaatgttatgctcatgaacaatagcgatgccattgtgcacgatatgtttgcaaaacatgttaagttgtgtgcagtattttagcaagattaagttaaattagagatggcccctacaacatacacataccaaaagcgaggtcacaagccacaatgtaaatatccatgacaccaacccagatcgttcttagtgttattaccgcgacggtcacactgccaaaatcaatttgaaatgcaaaggtcgcttggcttcgtcaaaaaagtaaaataattacggtgaatgcaagccaattgtgcattattcaaacaacttcaattcttcaatctgcatggagggcgccaaattaagcgcagttcggattgcggtccgcgaggcgccgtaccgccagttcttggggcgtcgggagcccagcgtcgtccagtttccgccatggagcgacggaaaggtatgtgccccaccattggccatgtgcatgtctaacggtatatgaccgccatctcgctttgtagtcgttaatagtggatcagaatgaattccacttcgatcacgcctttcccgcgaccatcagccaggatgagatgtaccaggcgctgatcttgccgctggtggacaagctgctcgagggattccagtgcactgcactcgcctacggccagacgggaacgggcaagagctactcaatgggcatgacacctccgggagaggtgggtttttcgtttagccatcagtggcttaaatctttcccactgatctatcgcttctattcctttacagatactgcccgagcacctgggtattctgcctcgcgccctgggcgacatttttgagcgcgtgaccgcccggcaggagaacaacaaggatgcgattcaggtgtacgcctccttcatagagatctacaatgagaaacccttcgatctgctgggctccacgccacatatgcccatggtggcggcgcgttgccagcgatgcacctgccttcctttgcacagccaggcggatctgcatcacatcttggagctaggcactcgcaatcgacgcgttcgtcccaccaatatgaattccaatagttcgcgatcccatgccatagtcaccattcacgtgaagagtaaaacccatcactcgcggatgaatattgtggatctggccggttcagaaggcgtgcggcgaactgggcacgagggcgtggccaggcaggagggcgtcaacatcaatctgggcctgttgagcatcaacaaggtggtgatgtccatggcggcgggccacacagtgataccataccgcgacagcgtccttaccacagttctgcagggtaagtgctacgttttggatcgtctcatgctcaattagttagtggaccatttgggttcaagcctttattgattagcgacttagtgactactataaatattgactgcaacttcttgccgttttcattctttgcagcctcgctaaccgcgcagtcgtatctgacctttctggcctgcatcagtccgcatcaatgcgatctcagcgagacgttgtccaccctgcgttttggcaccagtgccaagaagcttcggctgaatccgatgcaagtggcgcgccagaaggtgagccatctatatgtaattaaagtccacacagtcgaggatcacctcgcgtatacgctgtttaaatgtagcctcgttgcccgcgcccaggaaaccagctccatggagatccgtagtggcccccgcctcgatgcgctcgctaattgcctgaaggtcgggcacatcctgaccctgcatcgttacaatgggtagaaccatcatggcgagaagcaggcccacagccgctttggtagccacctgttcatcgaatgcaggacggggaaaaagttgctccacccgctcgcctagtctgttgcgaacacaacaatacaatagttgaagctctaggattcttatacttttacttacctaatcagctgcaggcccaactcttcatagtaatcctcgagcatattttcgaggtgtcgctgccggaatcgccgcgaagtgcaagtgaagaggaagtaagctagatcggtgaccggcgaggcatatcgcatcagttgccagtcgatcaggcgcacgtcctcgagctcgccccgctctgtactcttgtagagaatgttgttattccagcaatcgccgtggcaaataacagcgaagggttcgcaattgaatccgctgaccaaaggcagcagcagctcaaagtacgatcctctggcgaagtacgcctccagacgaactctgtatgcatcatccgccggtgcgagcagtgcggatagggcgctttccttcagattctcgaagtagacccccaaggcatgatcatcgcgtcgctgctcaaagatatccaccagctgctgcagttgttgcattttctcgggcaactgccgtttcccggccaatgatatagcatgtaatttggcataggtgagcattacgcgacgcacatgctcgacggataggtcgagaaagcgattgtgcagtgagaagccggcacaagacagatcctccagcacgatgcactcgttgggctcatcctggcgagttccgaaacagagcgcgtgctgccggaaacgatcatctccgattatcttccacttatcctgaattaacgcagtcagcggcagaaagacctcatatgctgccgtctcgcgcaggaaacatggtcgtgcaaagaattgcttgcggcgcacgcgattctgtggcggcagtttaaccaccaggctgcgtttcgaatcggatgccgcctgtaggcgccacaccacgcccaaatagttgtcgcccttggcactcgccctttccagacgcagttccggattggcgcccagctctggccacagctggctgaccagttggcgaaggaactgtgtaacctgctcgttgggcagatcttcgtctggcttggctgtgtcctcttgttgctctacaggactctccatcctgtctgggtgctctctattcacctccccatttcgttcatcttcggtgtcttcatgtggatctggttcggcttccttctgatcaacttgctctgctggagctgctaggttgccagtgagctgaatctcactcgcagagatttctgctagtttttccctgtccgcattctctgccagctcatcctttgatttcgcctcaggctcatcatctccttccaacaactgatctccaaatgtttgattcaactggggaatttttttatcaagctcctctatgcctttgagctcttgtttgtcgatcactttcgaatcaatctctttggctagttgtttttcaatgtgctccacctcagcacctctcggttcctccaactctgccaccaattcctcctttttcacacgattatcttctaaatcctgcactgcttcgctgttatttgagttctcctcctttggttcctcaacatcaattcgtttaggtgacttctgatcgacatctggataactttctgttgagtctggtgaatttccttgatcggatgccacttctatcacttcctgactttggcgatctttctgctccccctcctgcgtcttctcactgggctgttccatggcacactacgccaccgccgcgagtgtggatcgtttatatagagaaaccaagccgtaccgaaccgaactcattccaaccgcactgaccgcaaatcgaacgatgcagttactcgagtttcatccacccatcttgctctgattgcagcaatcgctggccgcacggacaacacacgtcttccgccaagcgctatgcacctcgacggccatcaagtcaaacgcagccaatcataatagcatagtggttccaaaatccaaatatagcacaaccaagccgctgagcgccgtgctccatcgaactcgctccgaacttggcatgacgcccaaagctaagaaaaggtgagtaacacggaatggaccaaaagcgaagatgatctaatcctcccatatcttcctccatagggctcgcgagctattggagctggaggagaccacgctggagctctcgtctatacacattcaggacagcagtctgagtctgttgggtttccatagcgatagcgataaggataggcatttaatgcctcccccaacagggcaagagccaaggcaagccagcagccagaactctacgctaatgggcattgtcgaagagaccgagcccaaggaatcgtcaaaggtgcaacagtcaatggttgcccccacggtgcccacaactgtacgctgccagctgttcaacaccaccatcagtcccatcagtctacgggcatccagctctcagcgagaacttagcggcatccagccaatggaggagacagtagtggcttcgccacagcagccatgccttcgtcgttccgtgcgtctagcgagtagcatgcgttcgcagaactatggagccattcccaaggttatgaatttgcggcgcagcacgcggctggcgggaatccgggaacatgccacctccgttgttgtgaaaaacgagacggatgcgataccgcaccttcgaagtacagtgcaaaaaaaacgtacgcgaaacgtgaaacctgcgcccaaggcctggatggccaataatacaaaatgttttctggacctgcttaacaatggaaacgttaagcaattgcaggagattccagggatcggtccaaagtccgcctttagtttggccttgcacaggtaagttacttacatagttggcatacctttattttgcgttttacccaataacccttaatccgtaatccacatttttcagatcccgcctgggttgcttcgagaatctttttcaagtcaaatccctgcccatttggtcgggaaataaatgggaacgattttgtcaaattaactgtctcgacacttgatacaattactaattaaatagcattttaattcgaatatagtatagtgattgttatttatgtggcatatactttgattttacaactatagtaggagtaaaaaaaggagccggatatcctaaaacaaacagttatatatgtgtatgtgtaatatttctcaagatgtttacttattttttgttttcgactataatttatttgatgatagcttagactacctattaaataagcgctatgtaatctaatatttaattgcattttttgatttaaagtaaaataacttttaggtcaataacaataataataggacttttacactttgacactttttattcttggcatataatttttagacaatatacatatatatatacattgattattgaagtcgtcgatcttcactcttcgcactcactcaacagggggattctatctacgaatccatcagtttcggccgcttcgattccagtttagttagcactctctcctggttgatttggtatatacatacatacatatttgatatatatatgtatataggtatgtatgatcatacgattagcatacgagataagctgccaatccaatccaaacacatggcgctggaaatcggcattccatacacattcctactctcttttggctggaaatcttatccgatttcccttcgcttcaaacatcaaaatactctgtttgggtttcccgagcgttgattcattaatctagccatgatataacaaccaaaataatatcaagctatagaatatattttttaaagaaaaaaaatcagtctgcgggcatccagttctcagcgagaacttagcggcatccagctaatggaggagacagtagtggcttcgccacagcagccatgccttcgtcgttccgtacgtctagcgggtaggatgcgttcgcagaactatagagccattcccaaggttatgaatttgcggcgcagcacgcggctggcgggaatccgggaacatgccacctccgttgttgtggaaaacgggacgcgccttcaaagtgcagtccaaaagaaacgcacgcgaaaagtgaaacctgcgcccaaggcctggatggccaataatactaaatgtttactgggccatcttaacaatggaaacgttaagcaattgcaggagattccagggatcggttcaaagaccgcctctattttggccgtgcacaggtcagttgacatacgttcatttgcgttttacccaataacccttaatccttaatccacatttttcagatcccgcctgggttgcttcaagaatctaattgaagtcaaatccctgcccatttggtc

SEQ ID NO: 2252 - DNA, 1686 bp, DROSOPHILA
caatttgaaatgcaaaggtcgcttggcttcgtcaaaaaagtaaaataattacggtgaatgcaagccaattgtgcattattcaaacaacttcaattcttcaatctgcatggagggcgccaaattaagcgcagttcggattgcggtccgcgaggcgccgtaccgccagttcttggggcgtcgggagcccagcgtcgtccagtttccgccatggagcgacggaaagtcgttaatagtggatcagaatgaattccacttcgatcacgcctttcccgcgaccatcagccaggatgagatgtaccaggcgctgatcttgccgctggtggacaagctgctcgagggattccagtgcactgcactcgcctacggccagacgggaacgggcaagagctactcaatgggcatgacacctccgggagagatactgcccgagcacctgggtattctgcctcgcgccctgggcgacatttttgagcgcgtgaccgcccggcaggagaacaacaaggatgcgattcaggtgtacgcctccttcatagagatctacaatgagaaacccttcgatctgctgggctccacgccacatatgcccatggtggcggcgcgttgccagcgatgcacctgccttcctttgcacagccaggcggatctgcatcacatcttggagctaggcactcgcaatcgacgcgttcgtcccaccaatatgaattccaatagttcgcgatcccatgccatagtcaccattcacgtgaagagtaaaacccatcactcgcggatgaatattgtggatctggccggttcagaaggcgtgcggcgaactgggcacgagggcgtggccaggcaggagggcgtcaacatcaatctgggcctgttgagcatcaacaaggtggtgatgtccatggcggcgggccacacagtgataccataccgcgacagcgtccttaccacagttctgcaggcctcgctaaccgcgcagtcgtatctgacctttctggcctgcatcagtccgcatcaatgcgatctcagcgagacgttgtccaccctgcgttttggcaccagtgccaagaagcttcggctgaatccgatgcaagtggcgcgccagaagcaatcgctggccgcacggacaacacacgtcttccgccaagcgctatgcacctcgacggccatcaagtcaaacgcagccaatcataatagcatagtggttccaaaatccaaatatagcacaaccaagccgctgagcgccgtgctccatcgaactcgctccgaacttggcatgacgcccaaagctaagaaaagaatctttttcaagtcaaatccctgcccatttggtcgggaaataaatgggaacgattttgtcaaattaactgtctcgacacttgatacaattactaattaaatagcattttaattcgaatatagtatagtgattgttatttatgtggcatatactttgattttacaactatagtaggagtaaaaaaaggagccggatatcctaaaacaaacagttatatatgtgtatgtgtaatatttctcaagatgtttacttattttttgttttcgactataatttatttgatgatagcttagactacctattaaataagcgctatgtaatctaatatttaattgcattttttgatttaaagtaaaataacttttaggtcaataacaataataataggactttta

SEQ ID NO: 2253 - protein, 427 aa, DROSOPHILA
MEGAKLSAVRIAVREAPYRQFLGRREPSVVQFPPWSDGKSLIVDQNEFHFDHAFPATISQDEMYQALILPLVDKLLEGFQCTALAYGQTGTGKSYSMGMTPPGEILPEHLGILPRALGDIFERVTARQENNKDAIQVYASFIEIYNEKPFDLLGSTPHMPMVAARCQRCTCLPLHSQADLHHILELGTRNRRVRPTNMNSNSSRSHAIVTIHVKSKTHHSRMNIVDLAGSEGVRRTGHEGVARQEGVNINLGLLSINKVVMSMAAGHTVIPYRDSVLTTVLQASLTAQSYLTFLACISPHQCDLSETLSTLRFGTSAKKLRLNPMQVARQKQSLAARTTHVFRQALCTSTAIKSNAANHNSIVVPKSKYSTTKPLSAVLHRTRSELGMTPKAKKRIFFKSNPCPFGREINGNDFVKLTVSTLDTITN

SEQ ID NO: 2254 - DNA, 3919 bp, DROSOPHILA
gcgttctgtttaccctcctggtgatctttttcctttccgtcaattacgtctcgtagtgtcaatattctgcttcaaacagcggtgtctactgacttcaggtggatttcccttccaacgaatggaaaacagtccttcggaggactctctatggttttctaactcgatcttatttattattcattcagctgacgtgagaaagtatttttggccacatgaaacgttttcattgttttcttgttgagatatttgctacatatatgtattcaaataataaagtttaaagggacactgaaaaatgcaattgatgttagagattattgaaaataaaacttggaatgtatcgaaaaggtgaagtagagagactgtaatttaagctaaatatttcaacttatcctacttttaattattgcaagttgtggcactccttccgatttattatggaccctttcgtcccactatgcgagaatatttcaaatgtacgtacatacgtgtgaatttgcacttgtgcacccgaaagtagcgatgaacgaaaacgaacgaaaaaaaaaaacaataaataaatgtagaaaaccgaaaataaagcagcaagaaatgaaagcgatgatggcactcatactcacgcatacacggccatatacgctcgcacacaactcacagatacgtgccggagagcggacaaagagtattccacgattgcaattgcatcggcattttcattcaagccgcttgctcagagtgtgtgtctgtggctgtgtgagtgagtgctgcctgcgtttcacatttatctttagcgccgattccgcttttaactctcgctcttttagcgccatggtgtgcgtgtctggtgagtttactttggtgtgcgtgccagtgtggtgagtttgagcgtttaacattctgctcgtctcgctcattgatttagtatttttttggactttgttgttaacggttgttcgctcgcacgtacgaagcccgatcgcgttcgtcaaaaaacaagatacaaaatacagcacacacaattgaaaacgacaacctaacagtacggtttcccaaagcaccttacatttcaaaaccgaaaacccccaaaatgttgtaaccaaataatgtttaaatcacatatacacctacatatatttatgaaaaattgttagacaaatcccaaataataccagttcccccaacaaccgcaacaaacacaagtgcaattcatcggcaaaaattaatataaagtgcaaatgcattgtagctgaaactcaaacaatagtaaaaatacatacataagtggtgaagaagcaaaaggaaatagttcttaaaataacgcaaatcgagagcatatattcatatttgtacagatattatatggcggctgcatagtgcaaactgcggctgagggaatacagcggtatcgaaatgtaaataggaaacaacgaagccagaactcgaaatcaaacatcagcaacgtgacacacagacataagacgcccgtctagtcgtggtctgtggaacgctagctccgctttgccaggagccggagactttttccgcatccacaatattacatatgtacatatatcgaagatagtgcgcgagtgagtgagggatttgtgccgtggatcccgatccccttacatatatataaaggtagtgaaaagattttactcaacattccaaatagtgctttgtcaactggaataccttttgttcaaatacgcagtgggcccatggatacttgtggattagtagcagaactggcgcactatatcgacgcatatggcctgctcgtcggaggtgatgatgctgcgtatggcacgacgctatgaccacagctcggactcaatattcttcgcgaataatagatcatatacgcgggattcttacaaaatggccggaatggctgataacattgaagacctgctgcatttctgccgccaaatgttctcgatgaaggtggacaacgtcgaatacgcgcttctcactgccattgtgatcttctcggaccggccgggcctggagaaggcccaactagtcgaagcgatccagagctactacatcgacacgctacgcatttatatactcaaccgccactgcggcgactcaatgagcctcgtcttctacgcaaagctgctctcgatcctcaccgagctgcgtacgctgggcaaccagaacgccgagatgtgtttctcactaaagctcaaaaaccgcaaactgcccaagttcctcgaggagatctgggacgttcatgccatcccgccatcggtccagtcgcaccttcagattacccaggaggagaacgagcgtctcgagcgggctgagcgtatgcgggcatcggttgggggcgccattaccgccggcattgattgcgactctgcctccacttcggcggcggcagccgcggcccagcatcagcctcagcctcagccccagccccaaccctcctccctgacccagaacgattcccagcaccagacacagccgcagctacaacctcagctaccacctcagctgcaaggtcaactgcaaccccagctccaaccacagcttcagacgcaactccagccacagattcaaccacagccacagctccttcccgtctccgctcccgtgcccgcctccgtaaccgcacctggttccttgtccgcggtcagtacgagcagcgaatacatgggcggaagtgcggccataggacccatcacgccggcaaccaccagcagtatcacggctgccgttaccgctagctccaccacatcagcggtaccgatgggcaacggagttggagtcggtgttggggtgggcggcaacgtcagcatgtatgcgaacgcccagacggcgatggccttgatgggtgtagccctgcattcgcaccaagagcagcttatcgggggagtggcggttaagtcggagcactcgacgactgcatagcaggcgcagagtcagctccaccaacatcaccaccacaacatcgacgtcctgctggagtagaaagcgcagctgaacccacacagacataggggaaatggggaagttctctccagagagttcgagccgaactaaatagtaaaaagtgaataattaatggacaagcgtaaaatgcagttatttagtcttaagcctgcaaatattacctattattcatacaaattaacatataatacagcctattaacaattacgctaaagcttaattgaaaaagcttcaacaacaattggacaaacgcgttgaggaaccgggagaaaatttaagaaaaaaaaaaccattgaaaattatgaaatttagtatacattttttttgggtggatgtatgtcgcatcagactcacgatcaattctcgaattttgttaactaaattgatcctccaaactgcatgcgaaacagatcagaaaagagaacagacagtagggcgtgaacagagggaagagagaagagaataaagattgtttatatttaaaaaatatataaaataataattactaactctaaacgtaatgaaagcaactgtataatatctaactataactataaattcgtactgtagggaagtgagaaaatctgttaaatgaaacaaaaataatgataataacattatcatccaccataattaaaatcatttaaagtaattaaaaacaaaacacttttaaaacacgcaaaacttggactgattttataaatattttttaatcataaagaaaggcaacctgaaaaaaatattacaaaaacaaataacaacatattttattatgacacccttatatgttttcaaaacgagaatttaaattcttagattcttataatttcatccaaaaatattagccagcaaaaacctttattattggcattgtttttagacatgttttcaaaaaaaactttgatattgaaactaaacaaaggataatgaaatgaaagtgattggagtcttactcaaa

SEQ ID NO: 2255 - DNA, 3706 bp, DROSOPHILA
caaaatacagcacacacaattgaaaacgacaacctaacagtacggtttcccaaagcaccttacatttcaaaaccgaaaacccccaaaatgttgtaaccaaataatgtttaaatcacatatacacctacatatatttatgaaaaattgttagacaaatcccaaataataccagttcccccaacaaccgcaacaaacacaagtgcaattcatcggcaaaaattaatataaagtgcaaatgcattgtagctgaaactcaaacaatagtaaaaatacatacataagtggtgaagaagcaaaaggaaatagttcttaaaataacgcaaatcgagagcatatattcatatttgtacagatattatatggcggctgcatagtgcaaactgcggctgagggaatacagcggtatcgaaatgtaaataggaaacaacgaagccagaactcgaaatcaaacatcagcaacgtgacacacagacataagacgcccgtctagtcgtggtctgtggaacgctagctccgctttgccaggagccggagactttttccgcatccacaatattacatatgtacatatatcgaagatagtgcgcgagtgagtgagggatttgtgccgtggatcccgatccccttacatatatataaaggtagtgaaaagattttactcaacattccaaatagtgctttgtcaactggaataccttttgttcaaatacgcagtgggcccatggatacttgtggattagtagcagaactggcgcactatatcgacgcatatgctctgattgtttcccgcactaaatgagcagggattcgggcgaaaatgtattttgaacgcaaacaagtgcgcaaaaaatactagctccaccacgaaactgcacaaaacaccgccagaagcgagcagaacctcgggccgcacgaccgagcttcgtaaagcaacagaggatcttaccaggagatagctcttctccacatagaccaactgccagggacaagctccttgtccccagccgacgctaagtgaacggaaaacggccacaaaacggcgactatcggctgccagaggatgaagcggcgctggtcgaacaacggcggcttcatgcgcctaccggaggagtcgtcctcggaggtcacgtcctcctcgaacgggctcgtcctgccctcgggggtgaacatgtcgccctcgtcgctggactcgcacgactattgcgatcaggacctttggctctgcggcaacgagtccggttcgtttggcggctccaacggccatggcctaagtcagcagcagcagagcgtcatcacgctggccatgcacgggtgctccagcactctgcccgcgcagacaaccatcattccgatcaacggcaacgcgaatgggaatggaggctccaccaatggccaatatgtgccgggtgccactaatctgggagcgttggccaacgggatgctcaatgggggcttcaatggaatgcagcaacagattcagaatggccacggcctcatcaactccacaacgccctcaacgccgaccaccccgctccaccttcagcagaacctggggggcgcgggcggcggcggtatcgggggaatgggtattcttcaccacgcgaatggcaccccaaatggccttatcggagttgtgggaggcggcggcggagtaggtcttggagtaggcggaggcggagtgggaggcctgggaatgcagcacacaccccgaagcgattcggtgaattctatatcttcaggtaagacaggtcgcgatgatctctcgccttcgagcagcttgaacggatactcggcgaacgaaagctgcgatgcgaagaagagcaagaagggacctgcgccacgggtgcaagaggagctgtgcctggtttgcggcgacagggcctccggctaccactacaacgccctcacctgtgagggctgcaaggggttctttcgacgcagcgttacgaagagcgccgtctactgctgcaagttcgggcgcgcctgcgaaatggacatgtacatgaggcgaaagtgtcaggagtgccgcctgaaaaagtgcctggccgtgggtatgcggccggaatgcgtcgtcccggagaaccaatgtgcgatgaagcggcgcgaaaagaaggcccagaaggagaaggacaaaatgaccacttcgccgagctctcagcatggcggcaatggcagcttggcctctggtggcggccaagactttgttaagaaggagattcttgaccttatgacatgcgagccgccccagcatgccactattccgctactacctgatgaaatattggccaagtgtcaagcgcgcaatataccttccttaacgtacaatcagttggccgttatatacaagttaatttggtaccaggatggctatgagcagccatctgaagaggatctcaggcgtataatgagtcaacccgatgagaacgagagccaaacggacgtcagctttcggcatataaccgagataaccatactcacggtccagttgattgttgagtttgctaaaggtctaccagcgtttacaaagataccccaggaggaccagatcacgttactaaaggcctgctcgtcggaggtgatgatgctgcgtatggcacgacgctatgaccacagctcggactcaatattcttcgcgaataatagatcatatacgcgggattcttacaaaatggccggaatggctgataacattgaagacctgctgcatttctgccgccaaatgttctcgatgaaggtggacaacgtcgaatacgcgcttctcactgccattgtgatcttctcggaccggccgggcctggagaaggcccaactagtcgaagcgatccagagctactacatcgacacgctacgcatttatatactcaaccgccactgcggcgactcaatgagcctcgtcttctacgcaaagctgctctcgatcctcaccgagctgcgtacgctgggcaaccagaacgccgagatgtgtttctcactaaagctcaaaaaccgcaaactgcccaagttcctcgaggagatctgggacgttcatgccatcccgccatcggtccagtcgcaccttcagattacccaggaggagaacgagcgtctcgagcgggctgagcgtatgcgggcatcggttgggggcgccattaccgccggcattgattgcgactctgcctccacttcggcggcggcagccgcggcccagcatcagcctcagcctcagccccagccccaaccctcctccctgacccagaacgattcccagcaccagacacagccgcagctacaacctcagctaccacctcagctgcaaggtcaactgcaaccccagctccaaccacagcttcagacgcaactccagccacagattcaaccacagccacagctccttcccgtctccgctcccgtgcccgcctccgtaaccgcacctggttccttgtccgcggtcagtacgagcagcgaatacatgggcggaagtgcggccataggacccatcacgccggcaaccaccagcagtatcacggctgccgttaccgctagctccaccacatcagcggtaccgatgggcaacggagttggagtcggtgttggggtgggcggcaacgtcagcatgtatgcgaacgcccagacggcgatggccttgatgggtgtagccctgcattcgcaccaagagcagcttatcgggggagtggcggttaagtcggagcactcgacgactgcatag

SEQ ID NO: 2256 - protein, 881 aa, DROSOPHILA
MKRRWSNNGGFMRLPEESSSEVTSSSNGLVLPSGVNMSPSSLDSHDYCDQDLWLCGNESGSFGGSNGHGLSQQQQSVITLAMHGCSSTLPAQTTIIPINGNANGNGGSTNGQYVPGATNLGALANGMLNGGFNGMQQQIQNGHGLINSTTPSTPTTPLHLQQNLGGAGGGGIGGMGILHHANGTPNGLIGVVGGGGGVGLGVGGGGVGGLGMQHTPRSDSVNSISSGKTGRDDLSPSSSLNGYSANESCDAKKSKKGPAPRVQEELCLVCGDRASGYHYNALTCEGCKGFFRRSVTKSAVYCCKFGRACEMDMYMRRKCQECRLKKCLAVGMRPECVVPENQCAMKRREKKAQKEKDKMTTSPSSQHGGNGSLASGGGQDFVKKEILDLMTCEPPQHATIPLLPDEILAKCQARNIPSLTYNQLAVIYKLIWYQDGYEQPSEEDLRRIMSQPDENESQTDVSFRHITEITILTVQLIVEFAKGLPAFTKIPQEDQITLLKACSSEVMMLRMARRYDHSSDSIFFANNRSYTRDSYKMAGMADNIEDLLHFCRQMFSMKVDNVEYALLTAIVIFSDRPGLEKAQLVEAIQSYYIDTLRIYILNRHCGDSMSLVFYAKLLSILTELRTLGNQNAEMCFSLKLKNRKLPKFLEEIWDVHAIPPSVQSHLQITQEENERLERAERMRASVGGAITAGIDCDSASTSAAAAAAQHQPQPQPQPQPSSLTQNDSQHQTQPQLQPQLPPQLQGQLQPQLQPQLQTQLQPQIQPQPQLLPVSAPVPASVTAPGSLSAVSTSSEYMGGSAAIGPITPATTSSITAAVTASSTTSAVPMGNGVGVGVGVGGNVSMYANAQTAMALMGVALHSHQEQLIGGVAVKSEHSTTA

SEQ ID NO: 2257 - DNA, 4711 bp, DROSOPHILA; identical to SEQ ID NO: 2245

SEQ ID NO: 2258 - DNA, 1981 bp, DROSOPHILA
cagtgttgttgtgctcggcgagcggagcgggtgggcggccggttgaaaatagcgaatacaccgtacacacccccctaacacaacaaatatagcaaataccgaacagaaattataaaagcgagcggcgcagccaaagaagccgttagaaagaaacgatgcggttcagcggctacaatcgttatcagtgcttttgctctgctgttggatcgctgctgctattatccctattatccttcgcggtcggcgctgcgctgacgcgggcagatgacgtcggcagcgacgccgacgccggcagcgccagcaggaaatggctgtgcagccggacggatatctgcaccgcggagggcgagatggtggccggactgcagtacgcgccggagatcttcgagagccagcgggattgccgactgtcgtgcggcaagtacggagccatctggcccatgcccaccggcaaggagtgcgtttccatgttgtggcgcccggcgaggcggccacccagtttctcagggagacgaaccggctgttcgtctcgaatctgctgaaggagtgcatacgaaactgcacgctggagaccagcaagcagattctggtcagatccacggtggccaacgagagcctcgttctggactggcccaccgacgagagctacgccctggtggtgcgaaccactgaaacggccacctttgtggacatccaagcgacgacggtgtacggtgcacgtcatgccttcgagacgctgagcaacctggtcaccggcagcctgtccaatggcctgctgatggtcaccacggccaacatcaccgatcgtccggccttttcgcatcgcggcgtccttctggatacggcccgtaactttgtgccgctcaagtttatacgcagcaccttggatgcgatggcggccagtaagctgaatgtgctccactggcatgtggtggacacgcacagttttccgctggagatcaccagggtgccggagatgcagcgttacggagcgtactcctcatcgcagacgtactcgcgccaggatgcactgaatcttgtgaaatatgcccgactgcggggcatacggatactgatcgagatcgatggaccctcgcatgcgggcaatggctggcaatggggtcctgccgccggactgggcaacatgtccgtgtgcctgaatcaatcgccctggaggagattctgtgtacagccaccgtgcggccaactgaatcccctgaacgatcatatgtacgcagtgctcaaggagatcttcgaggacgtagccgaggtgggcgctcccgaggagaccctgcacatgggcggcgacgaggtgttccttccctgctggaataacaccgacgagattcgggatgggatgcgggcacgtggctacgatctcagcgagcagagcttcctgcggctgtggtcgcaattccatcagcggaacctcaatgcatgggacgagattaacgagcgtatgtatccgggcatcaaggagccgaagtcggtgatcatctggtccagtcacctcaccaatccccggtacatcgagacctacctgcccaaggagcggttcataatccagacatgggtggagtcacaggatgccctcaatcgggagctattgcagcgaggctaccgactgattgtgtccacgaagaatgcctggtacctggatcacggcttctggggcagcacatcgtactacaactggcgcaccgtgtactccagtggcatgcccgttggtcgcagcaaggatcaggttctcggcggtgaggtgtgcatgtggagcgagtatgtggatcagaactcactggaatcccgaatctggccgcgagctggagcagcagccgagcgaatgtggtcaaatccaaagtcttcagccctgttggcccaaagaagattctaccgctaccgggagcgactcctggcgcgcggaatccatgcggatgcagttattccgcactggtgcgtcctccacgaaggacagtgcctctaa

SEQ ID NO: 2259 - protein, 128 aa, DROSOPHILA
MRFSGYNRYQCFCSAVGSLLLLSLLSFAVGAALTRADDVGSDADAGSASRKWLCSRTDICTAEGEMVAGLQYAPEIFESQRDCRLSCGKYGAIWPMPTGKECVSMLWRPARRPPSFSGRRTGCSSRIC

SEQ ID NO: 2260 - DNA, 2915 bp, DROSOPHILA
caatgctcatccataccaatattaaaatgattaaagttgtaaattacaaagcaggaatgtagttcgcttttttcgcactgtaaaattcagtaaatgggcataaatcataatttacgtactaccttttagtctaaagtgaaggtgaagatccatccatccggttgatgtttccatttggattttcaagttcagattggataggatcggatcggttggccggagacagtttgggctattgtgtgcgggagtttgattaacacaacatccactggccgaatctttattagtgaccatgcactaattaagccctgtcgtgtgatttggtctcctcgcattcgcattcgttcgcgtttgtcactcgatgcaaatgaatcgcgtctctgtggagcagaagatcataaaagccgctaaaaggtgtgggtgaaaagaaaaacaaaaccccggccagccagccagcggattcagttcttttgttgatcgaattgattagagctgcggccgagatcgatacgtttgtatatttcggatgtgcgttgctggccagcgagggtgtaattaatcacaacactcaagttcgtcacttgaccgaagtgttaagtgcgctaataacgccaatttgcatagaccgacttttacccatcaacacgattacaattaaagtgtatttcaaatagtgctgcgttgttgctatatatatagaaatattttgtttaaataatcaaattggattggaaaatttggagttcataatttcaaatcgaaattcacttgtcggacatgccgcatttttgtaccctgcaatggtttgaaaccgagctaaaatttatgtgggtcaaaatggattgaatccatgttagcattgtctggagctgccatcctgatttctacacatgtaaagagttgccagtctggtttctacactactggattctattctagtcgataagttgctttctattcgattatcttgtcaattatcgtcgatatcgagtaggcatcgacacaagtaccagctctaattcgcacggaatttgtttgtcattcaagaaacaattataattcgccgcatttttattctaaaagcgcttacgaatatggtaagtacctcgccgagtgcatttagtagagccgctaacgaaacgaaaacccctcgcaatacagtatcagccatcactgaaagtccagcccgccgaggtgtccgtgctgaacgccaccggccgtgtgggaatgcccaccgaggccaactgcctgaaccaactggcccacgtccaccggctgcgcgactcggagctgaactacaacgagcaccagtacaaccgcaacatgcagatgctgcgcaaccacgagggcctcggcgtgcccctcaagatgggcatggagcgcttcgccgcacgtcaggtgggccgcctgcccttcctttcgtccaggtgagcatctagcccggtctgggagcttctcagtctggacaggaatctctgcaagggcggaagcattcagaaatcttctgtttccacattataagaatcccggagaaacctgagatatcctacaatctagaaaatctaaacttcttgcctaataatggatacctatatacgtacatacatacatacgtgtataccaagtatacctgtgattcccatagtaccattattaccgaaaacccagcaatgactacttatcttctatattaattctttcctttatattgcagcaacttcatggacgatgtcctgactggccgctgtgattccattggcttcgaggacttcatgaacttgcccgagaacagcgagcatatgcgtcagccccacgctgtggtggagaaatctctgggaatttaccaataagtccctgcaaatgaagttgctaaatgcctggcattcagcctttaaactctaagacactcttaagatcagcaaataaaatatattttggtgcgaccagctagaggtaaacaaaattcaccatttctttgagccaaatttattcgtatttcgtttgtttaactccacatcaatacatttaactagttcgttaaacttacacattttattcaaacaaatctaaaaactacacgaaaatattggcagaaggttgttgtactgaggagattcgttaaaataataaactgaagagatatgcgttgacatcattcattatttgtaaaaataaaacaagagatggtaaaatggacgaattcgtttcgtaaaattaggcttatacttaaggaaaactgaattgtaaacggagggcgcatttcaacttatacaaacattgcatatatacatgatttatatttaaagaggaaaatgacagtaattgagataaacatagttaataaaacgcattacattcctcaagcaaaacacgtctaatcaacaataaatattgaaatcgctagcgttttaaatgctcttcgctaaatttgtattgtgttgcgagtttaagcttcaattactggaattatccctttaattgtgatgataggcattcgatttttatagtatatattcttcaatatgcataaaggcgcaattgcaaagggtcatgggattctagtagatccagttgacaggcacccactgctcctcgtggctcatctgatccagcgtttccaccacctggcggaacgtctcatcgaagtcctcgttcacgatgaccatgtcgaagtatttctcatacttgcgctggacgaagctgctctcctcgacggtggcgacaaggtcgtcgtcctgttcggaaaagtcatagaaagcgaatgtgttaagcaatgtttgggtattcaggcagagatctaacagggctactagggtggcctaggtgcgccaagcggatgattgagttgagcacaatttatacgacactgtaattaaggataggtcagggcacattacctcatacaacgacgctag

SEQ ID NO: 2261 - DNA, 564 bp, DROSOPHILA
acacaagtaccagctctaattcgcacggaatttgtttgtcattcaagaaacaattataattcgccgcatttttattctaaaagcgcttacgaatatgtatcagccatcactgaaagtccagcccgccgaggtgtccgtgctgaacgccaccggccgtgtgggaatgcccaccgaggccaactgcctgaaccaactggcccacgtccaccggctgcgcgactcggagctgaactacaacgagcaccagtacaaccgcaacatgcagatgctgcgcaaccacgagggcctcggcgtgcccctcaagatgggcatggagcgcttcgccgcacgtcaggtgggccgcctgcccttcctttcgtccagcaacttcatggacgatgtcctgactggccgctgtgattccattggcttcgaggacttcatgaacttgcccgagaacagcgagcatatgcgtcagccccacgctgtggtggagaaatctctgggaatttaccaataagtccctgcaaatgaagttgctaaatgcctggcattcagcctttaaactctaagacactcttaaga

SEQ ID NO: 2262 - protein, 134 aa, DROSOPHILA
MYQPSLKVQPAEVSVLNATGRVGMPTEANCLNQLAHVHRLRDSELNYNEHQYNRNMQMLRNHEGLGVPLKMGMERFAARQVGRLPFLSSSNFMDDVLTGRCDSIGFEDFMNLPENSEHMRQPHAVVEKSLGIYQ

SEQ ID NO: 2263 - DNA, 4289 bp, DROSOPHILA
aaaattgtcttttcctgttgtcataacataaattttatctcttggcttacgaacactcctttttttaatttagtcaccaatttagacctttattatcaatctatatctctcaaagatagcagtttattatttttcttgccaatttccatcgctatgtcaaaaagaaaatcgatcttcctcgtgtgcactcgtactagccgagttacgggtatctgatagtcgactatagcgttctctcttgttttattcgtttaagtgcacttgccaagtgcgtcatgcaacgcaaggaagcgacgtacagagcacctttccccatccgggcagatatttcacgcagtccacccgccgacacactcattaataatgtattgtctgcaagtcgtaaacatgccttactttttcgtgggggcggttccttctgttttatgagcaactttaactttgtcaacaattaagtccgactctattaatgataatgccaggcgacagttgctggagccgaattatgcaaattttagcgatttattacattagggaaaatatttttggaaactgagaattgctgttgaatttacattcttcataaattattgctgattatagaatccagaggaaagtaataaacatcagagaaaactagctacctgttgctcaactagtaggagcaactgttcgacaacaaggttgcgcttctctacaattatagttaccttttactatacgagtaaggaagttatcggactgttgaggtcgctaaagaaaaatgtcccacattattagcatggcttcataaattgaaaagataacgtttctgcgcccgccgcttttaagatattaaaatatatatgttctcgacaaggatcagtagcttcgcttgtcgaacttgccatggccgtcggccggtatttttgttgatttccaatccaatacacatttacttcaactttaatacagctgataacatcgttatgtcccacaataatagcaaaaaagcttttttaattatctggttaaataacgtgttttcttttttgaaaagcaaaacagtataaatatctgagtggaattgcttagtgaaatgttcaacttattagtaccttaacataacatttgcactttaaaacagagggagacagaagtaaaatcgaacaagaatttttgattttcatttgtctaaaactgtaatacatctaaatacggagaatggtgcaaagtccgtgctattatactggccgctattgaaccaaaactgtatcatgctcctgtacagaataaaagtccagtgttttagcattgttatccaatggtaccacaagatccggatgcaacgcatcaacgtagcaaagctgcgggacgtcaccgcttaaccggaatcgcttcataaccaatccctgcagcgtctgcacagtaatcattcgcgggactttcttctcccaggtttcgcccgtcagctgatgtcttatggaaacattaatcaaattcgactgcttcgcttgactacgcggtacaaagtctgccggggaaccgtactctgtaaacatatatattaaataattttggaatgtccaaggcagatagtagcttacttttaaccagcagggggtaggtgcgatgtcttcggcaaaactcccgtaaggaatctgtccccccttgcgtcgcctgcatccaatctagagcatactttttccaaatatcgtactcggctccacgtctctgttccgctgtcacctcggctttattaatgaactgcaggctggctatgctagctacagctttggagaacatttcatcaaagtttgactttaagtgcggagtcttactcaggcgtttcagctgtggcagcttgtccagctcgttaaacgcatcagcctgcgaggataacattatgacagtaaattttttagtgccaaaaaaacgctgccctacctcattccaaatgggattgtgaagcaggttcagctgctccagcgagacaaaaatattaagcttttcttgtgaatcacagtcgggaagttttatctcctcgataccattctccatgatattcagtaagcgcaaagtcgtgaggttgcccaactttgtcacctggtcaaaatccataatgttcgtgcggtgtaagtcgagttcatgtagctgcttaaatatctttgttcgatcgacttctgctagctggccgagtgaattctcctgtaagcccagtgacaaaatatttggccagagaagcgctgtgtgcattacatccttccagtcggaaaagccacaactgcgaaggttgatgcgtttgagctgccgaaatgagggctcaagctcagtgatttgggatgacgtgggcaggaccaatcggttggagctaaaaggtttggcaattaaagtggcacattttacttatttttacttacctcaggttcaggttggttaaggagggtagctgttgcgctatgctggccacgatctcccaattccagattaaggtatggcttacgttcaacgttgtgaggtgtgtcaactccttcaggtaaccggcagcgtttaccggcgtctggtctacactcacctcctccagttgctcgaacttgctttgcttgcgagcgatcttgtccatgcccacgacttcaaaaagcgacgcctgcaggctggcctgagcttcccggataagagactcgtcgacgttgctcgagtcgtagtttaggtaccgctcccgagcagcgtcctccagggtggcacacggccctacctttcccggtcggatgaagctgcctcccgtgggtgtctgcgtctgaaagtagcgcttgccgtccacgatgccgttgtgtttgccacgcagtccgtcgtcccattctattcccagccagctacccatatggccgctcacctaaaaatacggatagcaggttgggattaagtcttatgcctgcggaagccaaaccagccaacggctcacctctcccacataacgcactgtgccgtagttgtccccaattttgatgcgggttcctaggggataaaaaagctgcacctcatcgataattcccaccatcgctttggctcttgtttgtagtttcctcggcgcccacacaagtatacacggctgttacacactcgttcacacctttgtctgcttattcgcagctgctcccagaatgtgttcagatatagctgtaaacgatttctcctggatttacatcaacattacagctttgatgaagaggaaataaagctttgcgtagctcctgaagcctaaattctgagtcacaaactattatttatatttagtgtttagtcaaatgtggctgtaagcagatatcaatgaaatacctattcattacgcggactggtcacacttcgaggggcgttaaatgagcaaaacgtaaggattcgttacgtccaacgtagggtaacaactttttttttaaaaaatgataccttaaattgcttcctggttttttttacttttccaatgccatctcagtcaatcagacgattatatcaagttcgatctacgttcttgttaaaggtatgtaatattagccattaataacaattaaatatgtcaaagtcgctgataagtcctatttcatgaaccgaaactgttttgtgtcacattctaaatgacttttttgaaaaatacaaaagattgaaatctagctaaatgatatttgctacagagaatttcagcaagactttatgaataaaacattattgaacagctttgcgcgcaagtgagttcgcagcgattgattgaggaattgcgaattttttgtatcttggggcctttaatattaacatgtttcttcattgttttgacagatctatttatatacgactgtttaaaagctacatgaaaatatatataaaataggaagccaaaatcaatacccgattcatagatgttctaaaatgcgagtttcataaaaagtcttgtaatttataaactatttatgagattattatttatttgggattttcaaggagattgtattttctacatgtagtgcagtaactttcgtggtaatgcatacatcgatagtcattctgatagtgcgccattttcaaattcaaatgttgtactaagctaacagcttgttaatgtgtttaccactaatgccccttcgtagctacttattttagtaaatattttatcaaattgagttcgagatattctctaattttaataattttagaaaaaaaaaatacataatttcattagcaacccgccgtattttaattgtaatgttaatttggattctttgattttgagataatttaaattcggtgttttcaagtgcggt

SEQ ID NO: 2264 - DNA, 2116 bp, DROSOPHILA
cacatttgactaaacactaaatataaataatagtttgtgactcagaatttaggcttcaggagctacgcaaagctttatttcctcttcatcaaagctgtaatgttgatgtaaatccaggagaaatcgtttacagctatatctgaacacattctgggagcagctgcgaataagcagacaaaggtgtgaacgagtgtgtaacagccgtgtatacttgtgtgggcgccgaggaaactacaaacaagagccaaagcgatggtgggaattatcgatgaggtgcagcttttttatcccctaggaacccgcatcaaaattggggacaactacggcacagtgcgttatgtgggagaggtgagcggccatatgggtagctggctgggaatagaatgggacgacggactgcgtggcaaacacaacggcatcgtggacggcaagcgctactttcagacgcagacacccacgggaggcagcttcatccgaccgggaaaggtagggccgtgtgccaccctggaggacgctgctcgggagcggtacctaaactacgactcgagcaacgtcgacgagtctcttatccgggaagctcaggccagcctgcaggcgtcgctttttgaagtcgtgggcatggacaagatcgctcgcaagcaaagcaagttcgagcaactggaggaggtgagtgtagaccagacgccggtaaacgctgccggttacctgaaggagttgacacacctcacaacgttgaacgtaagccataccttaatctggaattgggagatcgtggccagcatagcgcaacagctaccctccttaaccaacctgaacctgagctccaaccgattggtcctgcccacgtcatcccaaatcactgagcttgagccctcatttcggcagctcaaacgcatcaaccttcgcagttgtggcttttccgactggaaggatgtaatgcacacagcgcttctctggccaaatattttgtcactgggcttacaggagaattcactcggccagctagcagaagtcgatcgaacaaagatatttaagcagctacatgaactcgacttacaccgcacgaacattatggattttgaccaggtgacaaagttgggcaacctcacgactttgcgcttactgaatatcatggagaatggtatcgaggagataaaacttcccgactgtgattcacaagaaaagcttaatatttttgtctcgctggagcagctgaacctgcttcacaatcccatttggaatgaggtagggcagcgtttttttggcactaaaaaatttactgtcataatgttatcctcgcaggctgatgcgtttaacgagctggacaagctgccacagctgaaacgcctgagtaagactccgcacttaaagtcaaactttgatgaaatgttctccaaagctgtagctagcatagccagcctgcagttcattaataaagccgaggtgacagcggaacagagacgtggagccgagtacgatatttggaaaaagtatgctctagattggatgcaggcgacgcaaggggggacagattccttacgggagttttgccgaagacatcgcacctaccccctgctggttaaaaagtacggttccccggcagactttgtaccgcgtagtcaagcgaagcagtcgaatttgattaatgtttccataagacatcagctgacgggcgaaacctgggagaagaaagtcccgcgaatgattactgtgcagacgctgcagggattggttatgaagcgattccggttaagcggtgacgtcccgcagctttgctacgttgatgcgttgcatccggatcttgtggtaccattggataacaatgctaaaacactggacttttattctgtacaggagcatgatacagttttggttcaatagcggccagtataatagcacggactttgcaccattctccgtatttagatgtattacagttttagacaaatgaaaatcaaaaattcttgttcgattttacttctgtctccctctgttttaaagtgcaaatgttatgttaaggtactaataagttgaacatttcactaagcaattccactcagatatttatactgttttgcttttcaaaaaagaaaacacgttatttaaccagataatt

SEQ ID NO: 2265 - protein, 542 aa, DROSOPHILA
MVGIIDEVQLFYPLGTRIKIGDNYGTVRYVGEVSGHMGSWLGIEWDDGLRGKHNGIVDGKRYFQTQTPTGGSFIRPGKVGPCATLEDAARERYLNYDSSNVDESLIREAQASLQASLFEVVGMDKIARKQSKFEQLEEVSVDQTPVNAAGYLKELTHLTTLNVSHTLIWNWEIVASIAQQLPSLTNLNLSSNRLVLPTSSQITELEPSFRQLKRINLRSCGFSDWKDVMHTALLWPNILSLGLQENSLGQLAEVDRTKIFKQLHELDLHRTNIMDFDQVTKLGNLTTLRLLNIMENGIEEIKLPDCDSQEKLNIFVSLEQLNLLHNPIWNEVGQRFFGTKKFTVIMLSSQADAFNELDKLPQLKRLSKTPHLKSNFDEMFSKAVASIASLQFINKAEVTAEQRRGAEYDIWKKYALDWMQATQGGTDSLREFCRRHRTYPLLVKKYGSPADFVPRSQAKQSNLINVSIRHQLTGETWEKKVPRMITVQTLQGLVMKRFRLSGDVPQLCYVDALHPDLVVPLDNNAKTLDFYSVQEHDTVLVQ

SEQ ID NO: 2266 - DNA, 3058 bp, DROSOPHILA
aggaacttccctcttgggtcttgcgcaaagccgtcttagggaagcgcatatggttttggagaaagagcaagaatcagttgccggcaaaaagctaaacgaaaaattgcagatggaaatcttcgagtgcgaaaaactaattttagctcttgcctataatcaagatcacgaagccaatacaaaataattttctagatcggcgaaagtggtacaagtgaacattttgaacaccggatgctgttaggtgctgttaaaacaaatcacactttgttaaaatccaatgaagcgccgttcaaaagaaattgtaaaacgagactaggaatcttttcaaaatacacatttttgttgggttgcttataaaaactataagatatatataaaataagattttaaaataaaaacatgtgcgctatttttgattctttggaaaaatccgctagataaccgggaaaacagctataaatatctatttcctactgaacctaaatgtctttgtagagctataattatatagcttattttcaaattttacctatttctctttaaattaccaactgcgtgaccattgaaattcacaaggtttggtatatgacacatttcctgaaaaaaatcacttcttaatgatattgagcaccgaagaaattagtttacataatttggaacaactgacccttcgatgggtcgaggttatcaactatagcaatctcccttgtttttagaattaattcaaaaaaaatttgtgaaatgtatggtttttggctaccgcttctaataagatcacgttttaaacatcttacttttactaaactagagtcttacgttttttttttataaatgacctattttgaactgtaaccgtcaataaactatgctgacttaaataagcagatattctgcatattcttatcaaaaattattaccagaattattgacctgattgactgctttatagtttatctgcctatatttatttgactatattcaattacaatgaattcctaaattaatctgtagctcgcagttccactcgctgttgtcgcagaagctgtggatgcgccctcaggatgtcacgttgttgacggaggttcttgataattcctggcaagtgccaggcgtgtctgagcagactatctgtcacatcaaaatgggcatgccgcacgcagcgtagttgggagcagtgcgccacggttcggaggtccaaagccatatcgtgcactagcgtagctaagtactcctgcgtctcgttgatggcgtgcagttccagggtgaagtgcggtcgatcgaagtgaatcagcttaatgccgtagacgacgggctgactgtcgtccgctgggcgtaggagacccctacaggccagttcataggcctcctgggtctgcaaatcgacaccgcagagctcaaacatcttacgctgatgggatgcctgcatggaggcggctagactgctgatcctgtctgcggacacgtgtcggtgattggagcgcattatgacccgtgagtctggtaggttattttcggttgcgatgcctaggtgcccgattagatggtagacccgcactggtcgatttttccgaatagaactagactggcctgctcccctgttgatcccaaagactacaaaagtatggttagatctggatttaaaatgttttacatgacttacgcaggactccgctggtgtgatcgcccaggctggacactgtggtgcagatcaagtctcgcggaaggtaccgcggtccggtggacagaaggtggtcggatagatccgtctgctctcctatgttatgtagtacgtgatctgctgcagtgcctgtgcccaggaggctaatgttctcttgcaacttgcgtggtttcctctgctccatttcgttgagtccttttgcagatctgtttttaatttcaatttgttctttaaatggcgctaggcttacccttgcaaatgttgctcagaatagcattgcgcacgtgtttcaccttcataccggatggcttgtacacatttagaatgccattcatgtgcttaaacactgtggcggcatcataaactttggtgagagccatttctgctttaagttacgtatgtgcgctatttgtttttaaattcacatgacagtgttggtgaacacacacgaacagctgagcacatgtgctgcccagtactgaatagggtatagacatgcacttgaaacttaatttataaaatttacatataaaatgttgttttcaaatatctctttaattttctaaaaaaaagtttagttggaaataattctcaaaacgttgtggtctttatacccgcaaaaaaacatgcttgtatcactgcaaaacaagaattaagtccaccgcacgaaaaaacaagaaacaaatccgattgggctaaaattttctataaattttacaaatttcacgggaatattctcactgtggcttgcatactatttgcttgcatttaaaatgacaacaaaactgcacttaaagaagttataatcaaataaagtcttatgcgtatcactatattctcacaagagaagtggttttcaacgaaaaaaatgttttaaactggtaaacagcaaactgaagcctagtgactaccctaaatgttattaaaatatcggtggccgttagatatcgatataaacgataacatcgattattaagcatatgtcttttacatctctattgcacgtgtaggatttgttttgaccgcacgaatttgtatagccgcataccattaattcacgttttaatcgcaagtattgagagaaaccgcgtcttgagatgaagtggactactgcaaataccaaacatgtaaactacacggcgaagcacgaactgtatgtgggaacacacacgggctcctttaaacgtacgtccgcttgttctttatcgaacagcataataataatgacttcaactttttagacctggtgcctgcatccgagaagaccccttatggacaaagcaacctgagtgatctgtgcgccctggataaggattcccgcgtcacatctctggcctttggcaacgacgatcagacggagatccttctaggccgggccaa

SEQ ID NO: 2267 - DNA, 741 bp, DROSOPHILA
atggctctcaccaaagtttatgatgccgccacagtgtttaagcacatgaatggcattctaaatgtgtacaagccatccggtatgaaggtgaaacacgtgcgcaatgctattctgagcaacatttgcaaggtctttgggatcaacaggggagcaggccagtctagttctattcggaaaaatcgaccagtgcgggtctaccatctaatcgggcacctaggcatcgcaaccgaaaataacctaccagactcacgggtcataatgcgctccaatcaccgacacgtgtccgcagacaggatcagcagtctagccgcctccatgcaggcatcccatcagcgtaagatgtttgagctctgcggtgtcgatttgcagacccaggaggcctatgaactggcctgtaggggtctcctacgcccagcggacgacagtcagcccgtcgtctacggcattaagctgattcacttcgatcgaccgcacttcaccctggaactgcacgccatcaacgagacgcaggagtacttagctacgctagtgcacgatatggctttggacctccgaaccgtggcgcactgctcccaactacgctgcgtgcggcatgcccattttgatgtgacagatagtctgctcagacacgcctggcacttgccaggaattatcaagaacctccgtcaacaacgtgacatcctgagggcgcatccacagcttctgcgacaacagcgagtggaactgcgagctacagattaa

SEQ ID NO: 2268 - protein, 231 aa, DROSOPHILA
MNGILNVYKPSGMKVKHVRNAILSNICKVFGINRGAGQSSSIRKNRPVRVYHLIGHLGIATENNLPDSRVIMRSNHRHVSADRISSLAASMQASHQRKMFELCGVDLQTQEAYELACRGLLRPADDSQPVVYGIKLIHFDRPHFTLELHAINETQEYLATLVHDMALDLRTVAHCSQLRCVRHAHFDVTDSLLRHAWHLPGIIKNLRQQRDILRAHPQLLRQQRVELRATD

SEQ ID NO: 2269 - DNA, 22341 bp, DROSOPHILA
ctattctattctatctatgcgtgtatcagtgtgctgtcgtatttgccagatcaccacattgagatcaacccagatgctgtcttgaaaaaaccctcgcaagaactgaaacgaaaaacacttgatgatggcgcgtcggtgggtgtggacggcgggggcgggggcacaggtgtttctttctgctctttgtggcgaggggggagcacaggtgagctatgctcggtgccgatctattcaatttcacgtccacgttgcgcgttttttcccccaaaaacagccccaaacaaaaccaaacaataacaaactagagctggcattaaatcgataggcgccatcgatacattcggaacagcgaatttatgttaagatcaataattgtgaagatcagcggtattaaattatttagttcacttaatgtactaacattaaacttaggattcgaatatgttgaccacaacgtcgtcgaaaatatcgatacttagctatcattgatactatttacgaaacgatattaccaagtaatatatagtttataccgtccattttcgatacactcaattatattagaaatttgattttgtgcttttatttaggttcactgatataataaaatcaacaagctgcaatattaatcgatgttccaagagacttatcgattttccaattctacgaccgtatcgatagtatcgaacagatatcgatgtggttccagctctaatagtcgtggatttcggaacattaatttgtattttttgcgtcgcgtcgccccagaaagtccaatccaacagcaaatcgcgcgttttccaaagaacaacaaccccgaaaaattcgaaaataataattttcttgttttttttttctgttttcctgcggcaaaaattccaatttttttcgtaacatctaaacaacaacaacaaaaaaagtgcgtgcgcgtgcagaagcgaaaaaaaccgaataaattgtgggcgaatcaacaagcaaaagagaatgagcgatgatgaggagaagaggcaaaaaaagcagaggcagttgtcgtagtactagtaccaaaaagaaactgcgaaaactgctaaagtgacaaaaacaacaacagcaagtaacgaaagagaaaagcaaaagaaggtaaaaagaatgaaggcgaataaaaaataagcgcaaaaatatacgtctacaaaaaagcagcagcaacaactacacaaaaattaacttaaaaaagtcgtgaattcatcgttcagtatatatatatatatatgtatatatatatataaatcaacacacacacatacgaagagtgagagcgagagagcgtgcgttatttattttatattttcgttaatcatttttcgcattttgtgaaacaagttggaaaagcgacaatacaaaatacagcaacaacaatagcagcagtaagcagtttgcaccacttggaagaggtatttatgtttgtttgtttgtctttgccccgtgtattcttattagcagtcgttgagagagggaggaggcacagcatgttcttattagatcagccagacttctttttcgtctgtcttgctcctcactcgattcgccgttatttatgtaacaagtgtgtgcgtgctaaatgaagtgctcgcgctctcttcttcccccctctcttcatacggtttctgttgctctctctctcgctcgcactctttgcatttgatgatttgattttgttcacttagtaaagttgctgtaatgtggctgccacccaaaaaaaaaaataaaaaaaaaacaagaacaaaataatgaaaatgaagcaaaaataaataataaaagctccaccgcaaagcgcattgaactggtttatgttgtgctcgcttcttctgctctcctcattcttcctttactctatgtttcttctcctacttctgcttcttctctcttcttggttatcaacatgatgccagaaaaaaatatataaaacagtaacaagaacaacaacaaccacaaaagcaacggccacagaatggaatttgcggatcttttgttgttgtttcgtttgctttgagccgaacttctcattcttcttcgggatctcccttcgcctgcccctcttaagtatttgttctcctttttattcatttacccaactacagtgagcacccattaatcgaagtctttgtttatcccttattttgattatcaaatttgtaggcaaattaattgtttgtattaattcacaaaaaaaaggttggaaataatcgtaaaataattccattttgtactggtttttaaatttataattttcaggaaaatttacccacagaatttgtatttctttatgatttaagtgcctctgtcgtctcagtgggaaacacgcatttctagctcacaatgcaacccactgatgactataattaatttaatatgactggccacgataaatagaggctgccaacttactcttctggctacacgccgccccttaaattaatttgtttatgctgtatattaaatttaaggcggaggaaagttttctttttgaacttagcaacaacagcgatgcgaatttacaagttaaagttattgcgcgtggctacaattttattttaccacaataccagtgtgaccttgcttgtgtattttcttgcagttatatttcttaattaacttaattccattaaactctggcttctaatttactctggtttgatctattcccccggcgttattgtctattgttttaataggggaatgtacaagagaacctaaaaccacacagctattttctttgttttttataggcttttcttatgattcattgtttggcttaattgaaactccccgcaagatgacaatgtggttattacatcatacatatgttttaccttacgtatacatacatacatatgtatgtacgtataaccaaacgtttcccgccaattaaattgaccgaactcaatttataaaaactttggccagtgtgaccttgattttatttttgttaccgttgtttacgagtttgatggaatccttcttactttgattctttaattccatgtgactttatgaaaattaatgcttgaattatttatgaatatagtcgcatggttttgtagatagaacttaattggaaccgatttaacggtaatttatttacaatgcaatttctgccatttggttttctggttgctggtggcttttgttctatttgctcgtgtaattagtgaacggaaattgttttgtgcgtcacatatgtacgcatgtgtatgtgtaggtgtgtgtgtgtgtgcgtggtatttgtgaaggtcaatggggcaacttgttatctttccttttttgttttttaaatttatttgatcgaccacgcccccaatgaggcgcacctagatagaacatttaaattatttccgatcagtaaaaattcccctatcaagtgctttttcgactgtaaacaaaccaaaaataaaaacaaggagagacgagacgagagaaacaaacaagaattcatttttatatatgtatgtacatattattatcggagttccgaaaatgacaacaaaaattttccaaaaaattcttgccttatcaggaggcacttgtttttcggtttatttttccatgtttatctcattctgcgaatttattttgaatgaaatttttgttttgaggtctctgacagaatcattcatattgaaaacatgcacacacacacacacacgcacatatgcatttatgtgcaatctgctatttgtgtttgtttaaggaagtgcggcatttccccatgggaaaagattcttcaccaaatgactcagaatcataaagttgagataaagcggatctttaagttttaagattacaacgaacaagtggtattgtgttaatttgcttttgttttataacattattgagaaagaaaatctcattttggttgtagataagtgtcgacttcaaaggactttatgcaaatctattttattttgtgtttttcgagtatttattattgatgggggactagatgttgcacgggctacaagactcttctactagatactaaagcaaatctctgtgaaaatgttggaattaattttttttgaatattgtttaatttgtttttctgatttgttgcaggttccgccctcccccaattccatatgcaaaatgtctagtcccgacgatagaataccaatacacggtaagtgggaatgaaggaccctggagaatcctagaaaatcctatgcccctttttcatagttaaattgggttttagtttagggcagcattatggtggttattatatgaaattatactcaacatttttggctgtgctcgtatgtaacctgcatatagctgtagctatggctatagcattaacaacattcggaatacataactcaaaatgtacacagaccaggcacgcacacatgctcaaacaaaagcttacacagtacgcgtgtgtgtgtatttgtgtgttagtgtgtgttgccttccaaaaataactgtaataagcacatacacaaaagcgggacagaactgcgctgtcaatggatgatgcacattggtcgaaagctggcgaataacggtatataaagccggaggctaactggttgagaattacaaggcaggcagtggctcttcgaattgcccaagctgatcacactaaacgaagttgaaaggtaacaacagttacagttggccacattttaagttcgatattagatgccaactttggcacgtgtttacaccaaagaatcaattcggcttttcctattcactattttattgatttaagccattcagcctgcgagaatgtaggcaaatgtttaggcgccctatttaggtggagaacaatggctcaaactattcactaaataatcaacattgaatttccatgtatactagtccatgtggcagatggtgtatccaaattttgaggaacacaaagcacttctttccatctcgagagaaacttctttgccagctgtcaatcaaatcagttaaatatttgcacagcttgaaccactgtgcgtttgttgctcctctcattgggccgaaaagtgggggggtataatgggtgggttggtgggtctgtacagtgggatctactgacttttgtcccgggcaggcccagaccaacaacaagaacattgtccatggtcgtcaacgttgctttcgtctctttcacggcaaacagaactgaactgaactgaatagatatagatggtgggaaattgtgggggatgtggggggtgcttgggattaattttcaccagagctgacgcattgcccacattaaagtgaagcagatgcatacctttatatctaaatcttttgtagaatatattcctatcagcggttaatattacatatttaactcaccaaaagcttcggtttcttatacatatcacaagtattcttatttttgaataaataataaattattcatcagcattggcaatagcatcttaacaataattgaataaaatgaatttttggttaaatcagagcgaagacgatgaacatcacctataactattttattattactattactattttgttttcatgaaaatttttttaagctagttttcctaagtttttcctaagtagctgataatagccaactgcacagcactaatctcgaccgtttttctttttggccatccatcgaaaccactgccaatgccaagcacgtggatggactggaaaatgggtggcgaaagtgggtagaaggagagaaagcgggtggccgaataggcagtgggtgggcctggttggtggttcgtcgagatggtttggagccccgtaatcttcgcttcgtgctcagctctctcgctccacgattctcgtgctcgttgctgctctccccgtctgtttgtttgcaacagccaaaaagaaaaacattcgtttatcgattttcgtctatttttagacacaaaagcaacagcaacaacatttacttgcctttcaaatggatggtgtaagtgtgtgtgtgtgtgtgtgtgtgtgtgtgtggactgttgactgacggccggacccggagaccgaccgacccgtaaagcccatgaaacccggagacccgggccacgtctttcctcctctcctattttgttttgaatttcttttccccgccccgttttgtgttttgtgtttgccacgtgcaatctacatagaagtccggggattccgggcattctccattgctccataaccattttccaatgcctcaccaggatatgggtttaattgttgtggggacaaggccggagagtgagagtgaggcactttgccccgtcgtccacgtccagctgtttgacatcgatatgccattagaaattcacgaaaattacatttcccttggaacggtcgggaaatgggtggtggaaaaaagtagttgtaaaaagaaaaaaccctcacctattgcgttttctccggtgccagtggatcatttattgtaatggcattccaagaataaaacttgcttcgccgtttgggctctgtgtgtgtctcagtgtgttcgagctgttatataaaatcgttagggcttatgtatcgcccttgtaacaccacccacccccctaaccatacacccaaaaccccccaccgcaaaacgtcgccacaccactgtcttcactgtgcggtaatcatatcgaaagcagcgtcgctgcgttatttattcatttcattcacccacagtactacaatgctacagtctacttagtcggtggagagaatagtgtaccttgtaggttctgcattttgccacaaattggatgagtcatttcaggaaatagatctaacagttctgttgtgccaggattgcaggcgaaaaactaactatgtagttaaatcgtaacttttcgaaatctaaactttacctacattttgaagcctaattgattgaagtaatcctattatccgatcctaaactttacatatttctgtaataattttcttccaaaattcaatgttttccaagtgttgttatctattctttggctaactttggctaatgggtaggaacttcaagtcagttctctgaaggttttaatttttcataatgaagttaagtaagttaagagtcgatgaatttctaaccgtatcctattagtaaaagtaactaccacacaacagcttaatattgttattgccactgctttttgacttttcaaattgtcaaggtaagcccataaaattggggtgttttcatgttttggtgggatttttttttataagttttaagtggtgtagtagcctagaactttacgaagcaacaaaaaaaaaaaaaacagaaaacaaggagaacgttttgtcggcgttcgcattttttttcttgttggcctggcccaaaagtttagctgttgttgtttctatttttagaatgcgcgcgctggaaatttacccacacaatacaaatgcaaaggcatacacacacacacacacactcgcggaaaccttgctatcactcaaaacaaacttattgaggaaggaagaagagaaagagagagtcagtgtgagagaggagtgggtgttcgggtgctgggggtggagtgaatatcaagctgctctctcgttctcactctctgttgttgtcgtatcaatttccaattgaatttcagtttcaatttcaatgacagcagtaccccctccataaaattttataccgtttttcgtctttttttttctgttcccctccacctttctgttttgcggccacacacatacacgtgcttttgtttttgttgtgccatttggttgcctggtttctatgtcaacacacaaattgaccttgaagttgaaaaaacaaaaaaaaatgtccagaaggggagtttctgtggaagtgggaggaagacagacagaatcggagagggggagagaaaaaaagagtgggagcgtgctacgcattttacttttatttaaacggcattgccaaaaaagagcaaaaacagctgattgcaagccactcttttcctatcgctctcccacctaatgcacctgcactgcactctggctatcttatttcatcttttatactgtaattctttggtagggcaagctctatgggcttacaaataccctacaagtatgcgaagtggaatttgtaccgaaagttttaacttgagtaagattttctgttttttttttatttatagtcagcgaaagagaatcacatagtcgtcattgctcttgatattttctttcatttcgcatgaaatttcaattttgtcttcacgttttaagttcacacgacacagtgcacaaatgtacatacatacacacatatgcaatatcgggttgtgtgtttgttttccttgttattttatcttgtttcacattttgcacttgtttttctgagctttgtgcaatatgcactgctgttatttctgtgcctgcagttgtagttgcagtatctgtgtgtgttgccacttctaaatatactccccaaagccatgcacgatttataaaggcggctaaaaatagaacggctaagcagaacggcaagcagcgcagcaagcagcgcagcaggtcacggcctgttcagttagatatgcaccggcacacacacacacttgcagacacgcccacagcagcggccacagtgatagtgcccagcctgaagtcctaaagcagtatgagcatggaaccattacaatttctatgggaatcacaatattttattgggttaaatacatatgtacatgctcatttacttatagcaaatgtaaatggatagttttatttgattggataacattgatttagatttatgtgtagcatacataaatacttacttatgcatgcatgaaaattaaaaattaaaattatccacatgcgtttcgacttttgttttgttgctgattttgggctttgctctttattgttctatttttagcatcgtcacatagcctaatattcaattggaatcaatttctagaccaaaaaagaactcgactttgctgattagatcaacactgtatagcaaaatagagagagagagagagagagcgagaaaatcagagagaagaatcattactaataggacttttcggttagtcatctctgcattcttattggcgcgcaattagtccagtgaaagaaatattcccgctctttccctctttctcctctctccgttgcaaaaatttatcaatgaaattattttccaaccgttttttcgtgattttcccaacgctttttcgtcatttttctggggtagcagcaaatcatattaagaaagagaggaagaaataaaagttatgttaagcgtcacgtgcgacaaaataacaagaaaaggctgatgtaaatgtctagaggaaatcgttgtaatcgctgttagcatatacggtacaaggttactaaaaatagtcgatgcactgagagaaaaaacacaattttagttccgtatatcaatctaattgattgttgtctaaaaagtgtatttaatcttgtctatgtcatgtcctgtaaatgaataattttatataattataataatagttaatgtgaatgaagacgtttgataaatttttgctatgtgtacacagatacgtttaaaaccaacaacactcggggtccaacgcgttgactaaatacgttttagatttatttttaaaagcgtctgataagcgcggccttatctacataatcggttcggagagcgagtcacacctcctccagatctaaatttatacatatgtgcatatacttttacttatgtacatatatgtatatagaatttataccaatctatatccctctccaaaacgattcaatttcgctcgctcagttgtgtgtttacattgtcaattcgcagatctgccatcagaagccggaagcgatgagcgattgctgcacataacgccggccactctgacattggacttcaagccccatcccgccgtggatatcgatcagcagatcatggaggtgagtgtacccccacatcgattgaaagcccccaaatcgagggcttcgtgatgaaatggccacctatgtatgtgtaatgtatgtaggttttttcacatatgtacatcatacgtcatacgtcacatcacatcatttgaagaaccagaatgttaatcaaatcattggaacataaccaactggttttgattgaaatatttgcatatgacattacgtagtttgaggaatgattttgaaattagatcatatggatcgttgtttccatgggaagatatagaaataaagtcaaagaggttatcaatatttcagagcccgttagagttatattatcgtcattacaagcgtcattagtacatttttataacatttgggtgactaaaacaatatagttattttggaaattatttttactttaataatcgcttatgcaatttttttttgtatcttacactaatatatatagttaatctataatttggtacaaacatttggagaattataagtaccgaattaagaaattctgtaattccgaacccataattcaaatcgctggccagcttttttggtccagtctctccagctggttttttcatattttccctttttctttcatcttgttttatttttgttgagctttttcgccttccgctttatttatacattattcgcctggctcttctctcttgtatgagtgcgtgtgcgtgtgtgttgtgtgcgtgtgtgtgagtgcccatgcgatgcttgctcctcttgttgggagtctaaatttaaatgcgtgtacaacttaatgattctatatttattgttttcactacgaaaatatgtatgagtttttgcgcattttttaaataaaatcctctaaaaatagacagaaaccgagtcaagagagccgcagagagaaatgtgggagaagatatgccagtgcagaggatatgcaggtatcactggctataatggactatatttggctttcaaagtttgcttagtaaatataaagggatttattgaaatgcaaagtacattatgacaatgaatatggttggtttaataaagtactaaagtagtatcatgaatttaaaaaaaaacttataaaaagttttagttttaagtggttgtatgataatctaatatatattctagagatatgtactttgtagctaggtatatatcttatatgcttttacgaggtccatttttgtgtaagtcggattttaaatccgctactagcgggtgcttactgtaccgcgccaatgtgattgccttctgctttgtgtctctccaagttgggcacactgtagccgggcatgttggccagcatgtgcatcggggcccacctgccacgccccttcgccccaacgtccccgtgctttgtgggctgcttttgcttcttcttgcttgtatttctggtactgcttgcattcaatttatagtctcggggatttatttatgcctcgatttttggctgcagtttgccttcttatttttgtcgtaatttgtgccttttttttgtgtgtgtgtgttttgttttttttttatctcatcgcgtttcgtttgttttgttttcgtttgaaaactttatttttagcgtttaagagcattttatatgcagcattatgttcggcgtgttctgcttcttcttcagcctgccacaccccgccgcccacagtttcgttttagtctcagtctatacacggaaagaaattggaagtttaattatgaaatacatatattttttcgttagttaaaaattctatagccaaggaaaggtattaatatcgtgtttagtgttctctaaaattaaaatattccatacctttaaattataaaatttaatgcaatgccatatttaacagttaattaggactttttttttgttttttaaattatcaatattttttttttctgtgcgtattgcccattttcatccgatttgagagctgccttggtttttcatcaacgcgttcgccgttttgttattttcggttttttcgtttgaatttatttttgttcttttataaactcagcggtctctatttttaaaaagaacacacaaaaacacttggctggtttggatcacgcacacactcacaaaattgccaatcagtgaaaatgttttattgaattcctcagactattttccttaagcattttgtgttctgttttcgttttccgtttttcggtggcacgagcaaaatgcaaattagcaaaaattgatgggggggagtgggtggttaggtgggcggtgggaggtgggtgcctggcatctctttgtagtaggagggttgacaagatcttaatgaagatgatcattgatctttgatcttcgcacacaaattaggcaagaatagttttgaatttttgggctaaaagaacgtcaagattggaattcgatggcgatgggaaggcaagatttatagaacatacatatatcccatatattaagatcaattaggatccagttcctagcaatattatacaaatcgaagtacctacattgtatatgtttctctaaatagttgcaaattttatatcttaatatggctataacgtgtttctgatttgtatcatttgcaactttaattatccatccacttggaaatcaaaacaatctaagaatagatcatcaagctgtgatcgattactaatgcgattccactgaatctattttcctttcaatatccggaaattcttcgttcacacgtggatgagcatttagtttagtgatttatagagaatgcatttttttttcgctttaatttaatttgtatttgtgtctccgcccttttttcgtatttcccatttcgtatttaatcttatttttatgcccgctgcgaacggcagtgcttctatttatatgggcgtgcctgtgtgttgtcttttgccccgctataattatagcgcaggtatttataattatagcatcggccatagcaactggcgaatgttgtgcaagcggtcgtcactgcagggggtggtgggtgcctctgtggtgttggtgggggggggggcattggctttcggaggggattgggcagattgcagtttcctagaaatcaatgtggcatatggtaaagattcttcttctgtacagaacacaaaatgaagtccccttttggctgatggtgaaaatggtcatcgtctattttctattttgatgtttatgtctagaaaaacccataattatctatttctttgttaagaatttttattcataaaatttttgtatttcacatttatttcaaccaattggttaaatttgcaaacaatacttaccaaatgatagataaaaatgcatgtgaatgtttcaaatcttatgtttaatattatatttttttaaaatataaaaaaatcaatctaatttttggtatctttgtgatatctctctgcctgaagcggacgcaatatcaattgcagttcgattttgtgcagtgtaagatgcgattgttgatatgtttgagtaatgatgttgttgacggttctctatcgcagaagccaaacgcccatttgtctacccaagttttgcgctctctacgcgttcccctttctccgttctccgttctccgtgctgcttacccctttcttcatcgctcttccgctttgtgctcttctgcgctctttctctgtcattcacatgcacattcacagccatcgtaacagtttcgaaattttgtgtttatatttgattttttcgccagttgggccagtcggccgagtgaaactgaaatgaaagcgcctccctcatttcccagcgaatgccgaggccaaagcaaacgcgccaaataccaaagaaaaaatacaaaataatcataaaaaaaataaatgaaataaataaataaaaaaatcacaaaaaataaagtgaaaaactttgaaaaaccaaaacattattcgaagttagagaccaaacacgcagttttcggaaatccaacaaagtgtatagtcaaatatcgaaagtaaacagcacaaaaaaaacaacaaagaaatctatgtaaaagaaaccaaagtggcaacagaaaccaaagattatttattgagtgaagtaagctgaaaagtgagaacgccgtcttttccacctgaaattcacatttaaacaaggcagaccaaataaaacaagagataaacatcatttgctttatttatttatgtattttccgcttatttttgcatgtgtgactgtgtggggggtgacacacactcacacacccgcacacacacccgcgcgcacacacacactcacagagtgaaaagtagagagtggaaggcatattgctaaggtcatgggaaatatgcaaatattatgacacatcctagtggaacacaagtgatcaggaagatggaaaaccaaaataatcgaagccaaaaatatattccgtgaaaatttgcaaattaatcgaacgttagttatcggcgatcgtcaacttttgatcgcaatttgtatatgttgtgttgggattatggggaaacagccaaatattatgataaattcaaacagcacatgtttttgtatttatctatgttatggaaaccaataaaagcatataatttaatacatttctcttgagtcaatcgaagatgtgttatcggtcatcggcgcgctttatcaaaatttcaaataaactcgatagatttcaagaatatcttcaacttagtggagaatagtgtttaaattaagatttgattggcattcacgtacaaatcgtttttcagtttgattgtttgtatgtacgttgacggtcgacaagcaaaagaagttcttttgcgtcacgtttcctttcaaattggttgtgtcaatttcgttgcgaacactctaattaattgtaagatttgttaatttgttgttctgctttgcagctcaagaagagccaggagctgcaaaagcagcggcttatcaactcgtttcaggagcaatcgaagcaaatggaattggagcataaacttcaattggagcacaagtatcaagtgagtagtcgatgcgatgcagctcagtttttagctgttcgacaagtcgttgtcgttgtgtattgctgctagttattcgattctaaatgattagaatcataataataataataataataataataataataataataataataataataataataataataattataaaatgatgatggtgacgatgatagtgtgagcatgctaatggcagtgtgggcggcgtcaggcagaagtacgaaacaaaaagtgaaaaacaaaaatgagaaataaataaatcacaacagacgactaagtaaaagagaattgaaatgaaatgaaattatatatgtatgtatgtggttaggtagtatatgtatgcatacattatattatcgtgccggaagtgtcggaagcggcttgtgcgatgactaaggccatcatcgttaacactatgtatttctatatagccatgtcgcacaggtctttttaatgttccagaaaacgactatttcgccaggcactcacatatgtacacatcatatacatcaatctatgtcgttatagcagctagatttggaattagtcattcggtatctgtataactttgaaatgcgcatagataaatcagaatttgggataagtaattaatgccttattatcaatacaaacctatctgcattacccatatatacatatagcgtctctgattctgtgcaatttgagatttattcactagcagcagcaacaacaatcgatcttggctctattaacttaactattgctccacctcccttctccaccacgataagaaacaaccaacaaacaaacgattctctctcgaacttattgtaattattcagtttgcggtgaattcacatggcgctttccaggaattgcgaaacgagagcatggtgacagccgccgctgctgcggtggctcaggagcaacatcgccaacagttgcatcaacagcagcagcaacatcagcagcagcagcagcagcagcaacatcaacagcagcagcagcagcaacaggcacgcggcagggatggcatgaaactcaagcagaactgtagtgccaatgccagtcccgaggtcaaacagattctcaacgtaagatatagctcgatctcgaataggtagatccaaatctcaacgtatattcctcctaatcctttgacagtgcttcatcctgagcagaaagtcccaggcggcggcatcgaatggcacaacgacaacgtcgccctacaggaatcggtgaggaatattattgaatattgaatgcaacaaggaaataatgcagaattggaaatatttttaaacttgtgcagtaaataagtgaattgtatcgaaagaaattccttagtaactgaacacagagtgcataacttaaatagaaaaattccgcaaaattgtatttctaatggaatttcgaaagcaacaaaatataacaacttagaaaccaagcagtaattccttgaaaatacatcttatgtagattatatgccactaataatcccaatcgcaatctgcccttccttgcagcggcgtggtgaagagctcctcgggcgaatccctcccagctggaaccgtgaccagtgcgcatccgtacaaaatacctcagccgccaccctcactgctcaaatatgaatctgattttccgctgaggaagacaggtgagtgaagtattcaatattgaatgcaaatgttatattgccagcagatgggatgaggaaaatctttctctcaatcccagttcgcaaaaccgaatcgcagtgaatgaaaagctcttgccgccgcctgaatttcatattaaaaccacccattcgttatttgcctgtaacttcgacttattgtctaaccgcaaaaagcaaaaaaaaaaaaaagagttacaacaagataagtgagcagagacaatgaattttccattaaattggcagataaaagtatatatttttttctgttgggtcatgtaaccaaattgccacaggatgaattgtttagataaattccgttgggtaatggcagcatacacaaggggttccttcggattgggtaagattgctttagataagagatttgcttaggtttgagttcacttaggacacacacagttcatgcataacaagcgtgggttgtccaacgcagaaagagaggagctcttaaaaaaagtccagaatagttgcaataacatacgaaacggggagtttttaagtcaaactaactagctgcacttaatatattcgtctaaaaatagatctaaatgaatagagatgacatctcaataaacgtcatttatacgtcaaggtttttttctttttttttgtttaactgcccaataaattgcgatagctgggaaatgtagtgtgtaattagtaaaagcagttgggtaccataaatttccttcacaattgccaggcgaaatagattttgtgtcaatttatatgatagatgaaataacatcgatgaaatgaagcagaagcagcagcatggctttcaccttgtgaatatccacacacccaaaaataactaactgcaagtttgtttcaaaagcagagcttgaattcgacaaattccgtgtgttagtatataagccaagaccaattgctcttaacctatacccaactaacccaacacacatgtgtgaaccgcccccggtatagcatccgaaccgaacctgctgaagatccggctgaagcagagcgtcatcgagcgcaaggcccgcatcggaggaccggcgggagcccggcgccacgaacgactcctccaggcggcgcagcgtaggcagcaaaagaactcggttctcacaagtacgtatcatcatcatcatcaacccaaccagagcccatcagaaatcagaactcaagtcagtcaagataaagggattaatacacttcgaaaaatttcattttgaataaaaatattgaaaatatatagaataattgtcaatattattttaatctgtatagaatagatcataatatgatcatagtactttgaaacgtttataactttccaattgctgattgtttattacgacaactattttaacttttattaattgttattgttatcgttgaattgttgttctcgctgttgtacttaatgctgtttgttcaattaacccttttaagacgccgcaactgaccaaatcgctcagccagctaacttaacccatgcctcttaatttaatgattacaatcttagttaatctattttcaaaatccttcaacatccttagactgcaacagtacaccggattctggacccaattcaccgccctcggcagctgcgttggcggtgggcgtggtcggtagccgtggatcaccgacaagtgcacccattcaggaggaaaacgaggagggcagccaatatcagccgggccagaggagcagcatcaacgatttgccattgttcagttcaccatcgctgccgaatatttcgctcgggcgaccgcatttacccaactcggcgcaggcgcatgcccaggtgaatgcccaggttgctgcccaggctcaggcacaggcccaggcacaggcacaggcgcatgccatgttcgcggcactggctgccgcccagggtggctgcggacagccgggctactataatccactgggcatggcattcgttggccggcaaccagcaccgctggccatgattccggccacggggatagcaccgcagcaaccgtcgccggtggtgcgcagtgcatcggccacttcgacatcgtcgtcgcaggcctcgctggtgggcgatgtggcgccaccgcaggctcatgccgcctccaccattctgccctcgtcatcgtcctacatgcagcaactgggcagtgtggccggttcgggtgttaatctccatgccgccgccgttgctgcagcggcagcagcagcagccgccgccggttcactgccaccgaccaatagccatggtcacggacacggttcccacgcacatccacatccacatgcccatggacacgggcatggccatggccatggtatctacgctggccaccagcacaatgtgcccataacggacgcccaggtggcgcaggtgcatctgcacaaacagggccatcggccgctgggacgaacgcagtcggcaccactgccccttggacatccgatgctaaccggagctgtgcaactgaatgtggtccaaacgcactacgagaatagtgaggtgagtgaagatacaaaacctttagatacaaattatatttataatttcttgtttcacaattatttaggcggagcgccaggcgtacgagcaccaggtggtgaaccagaaagtccgccagaccgtcctgactcgcagcggagctgctgcagcagccgctgctgccgccggcgtgagcgtggtgcgtgaggcacagttgaaggaggaggatgacgactcggccgccgaggtgatggacctcacagataagaaaaaaccgccgaagacggtgctaaccagcacgatagccaccagtacgtcccagaatctgcccgaagctttggcggcggcggcggcggcagccgcctaccgtgccccgcacaacgcgtccagtaactccgcctccgccacaaagtccggtattaagctgcgggaccaggagtatttgcaacagcagcgggagcaactattgctccttcagcaggaggaggaactggcgaagagcctaatgcgtccgctatcgcgaacgcttagcagtccgctggtgccgctggggccacatggtcttagtcagattcccgacactggacaacagccggcaccgatagccacatcctcgtcggccgatcatataccgcccgttaacctctcgctgccgcatcgccagcaccgccagctaatgagcacactatacgccagccaattgcgtaaccaccagccatcggcgagtggttcaccgccgcacaaggtcaccaccggtttggcctacgatccgcttatgctgaagcattcgtgtatttgcggagacaatgcccagcatccggagcacagtggtcgactgcagagcgtgtgggcacggttaaatgaaacggatctggtgaagcgttgcgatcgcctgcgcgctcgcaaggcgacacaggaggagctgcagactgtgcacaccgaagcgcatgccatgctcttcggttcgaatcagtgccagctcagcaggcccaagttggaaaacacgttgtcggccagctttgtgcgtttgtcgtgcggcggcttgggtgtggatctggataccacgtggaatgagcaccatacggcaaccgctgcacgaatggcagccggttgtgttatcgatttggcactgaagacggccaagggtgacctgcggaatggctttgccgttgtccggccgccgggccatcatgcggaggccaatttggccatgggcttttgtttcttcaattcgatagccattgcggccaagctgctgcgtcagcggatgcccgaggtgcggcgcatcctgatcgtcgattgggtgagtttgattttcgaatttaaaccaatttccatatattgactaaattactaaattacgttataaactactcattttgcaggatgtgcatcacggcaatggcacacagcaagcattctaccaaagtcccgacattctatatctttccatacatcgacacgatgacggtaacttctttcccggcacaggtggacccacagaggtgagtttctctgatatttcgcttaatccatgtcgtaaataaacatttttttgttttttttgttttatagtgcggctccggtgctggtctcggctttaacgtgaacatctcatggtctggggcacttaatccgccactgggcgacgccgagtatatcgctgcattccgtaccgttgtgatgcccatcgcgcggagctttaatccggacattgtgctggtatcctccggcttcgatgcggccaccggccatccggcaccgctgggtggctaccatgtctctccggcctgctttgggttcatgacccgcgaactccttcagttggccaacggcaaagtggtgctggccctcgagggcggctacgatctggccgccatctgtgattccgcccaggagtgtgtgcgggcgctgctcggcgatcccgctgctcccattgccaaggccgagctggagcgcccgccttgccagaatgccatcaatacgctccagaagacgatagccatacaggtaaatgggagaacttagcatgttccactggtcgcctagctaacttttggtttcctttggtttttgtagcaaacgcattggccctgcgtgaggatgctggagcacacggttggcttgtctgcgctggagacgctcaaggtggagcacgacgagtccgagacgatcaacgccatggctggcctctcgatgcagtcgatgcacaggtgggtttatggtcaagttcattagcccatggttttttgtggatactttgatgataggaatgagtaactaacctgtatatttgtaatttacagaactctatcccgcgatgattccgaggagccgatggatcaggatgaaaccaaatagaaggcgatgcagacgtatattgcggaagaggaggcggtgggcgtggcgaggtttttgtggacctggtagagtgggaatggcaggagggggcgtggccgcaagctgctcaatgcacatttagttatttgttgtagttgaattgattgttgttgctgttgttgttgtggcgctcgcttgcaattgttgtcgttgtcattgatcgtctatagccacatctatctctctcactcgatcgattatagcatcccaattccccgccccgccaaaaaaaacaaaaagaagagaaacatcgaaaatataggggaacatgtctaaaagaagcagaacagggcctaaagttcaaaatggtggctgtgcctccaaaagaagaaataattataataattagaaaagaatcctttcaaaaaaaaaggagattttatatgaatatatatatatatgaatatatatgtagcttaagctcagaatttagttgtagaagtcatcgagattttttttttttgttttaaggtgagagcagaggtattttaacgcacacacaaacacacgcaactcaatgtatcttattattattatttaagtaagtgtgtcaaaaggatatagaaccactaacgtactggtgaacatcatcagtaagctataaagataatgtttaaagaggtcgggtgcaagaagcatgtgtttttttttataaggtaaggttcaacctcaaagttcccaagtctagaccccaccacgcccacttatccgccatcgcttacagagatcgagtggggagttgattacatgttatgtagaatgctttagttgataataagatatgagaaaaaaaaaacttaacaactaactagttggatgaaaagcgaaaaaactgagaaatctttttgtacaatttatagtttagtgcaagtttcaagtacaacatgctattatttaaagaattctatatatatacatatatatatatatatatacaaaaaaaatatatattgtgcaataa

SEQ ID NO: 2270 - DNA, 3894 bp, DROSOPHILA
agaagaggcaaaaaaagcagaggcagttgtcgtagtactagtaccaaaaagaaactgcgaaaactgctaaagtgacaaaaacaacaacagcaagtaacgaaagagaaaagcaaaagaaggttccgccctcccccaattccatatgcaaaatgtctagtcccgacgatagaataccaatacacgatctgccatcagaagccggaagcgatgagcgattgctgcacataacgccggccactctgacattggacttcaagccccatcccgccgtggatatcgatcagcagatcatggagctcaagaagagccaggagctgcaaaagcagcggcttatcaactcgtttcaggagcaatcgaagcaaatggaattggagcataaacttcaattggagcacaagtatcaatttgcggtgaattcacatggcgctttccaggaattgcgaaacgagagcatggtgacagccgccgctgctgcggtggctcaggagcaacatcgccaacagttgcatcaacagcagcagcaacatcagcagcagcagcagcagcagcaacatcaacagcagcagcagcagcaacaggcacgcggcagggatggcatgaaactcaagcagaactgtagtgccaatgccagtcccgaggtcaaacagattctcaactgcttcatcctgagcagaaagtcccaggcggcggcatcgaatggcacaacgacaacgtcgccctacaggaatcgcggcgtggtgaagagctcctcgggcgaatccctcccagctggaaccgtgaccagtgcgcatccgtacaaaatacctcagccgccaccctcactgctcaaatatgaatctgattttccgctgaggaagacagcatccgaaccgaacctgctgaagatccggctgaagcagagcgtcatcgagcgcaaggcccgcatcggaggaccggcgggagcccggcgccacgaacgactcctccaggcggcgcagcgtaggcagcaaaagaactcggttctcacaaactgcaacagtacaccggattctggacccaattcaccgccctcggcagctgcgttggcggtgggcgtggtcggtagccgtggatcaccgacaagtgcacccattcaggaggaaaacgaggagggcagccaatatcagccgggccagaggagcagcatcaacgatttgccattgttcagttcaccatcgctgccgaatatttcgctcgggcgaccgcatttacccaactcggcgcaggcgcatgcccaggtgaatgcccaggttgctgcccaggctcaggcacaggcccaggcacaggcacaggcgcatgccatgttcgcggcactggctgccgcccagggtggctgcggacagccgggctactataatccactgggcatggcattcgttggccggcaaccagcaccgctggccatgattccggccacggggatagcaccgcagcaaccgtcgccggtggtgcgcagtgcatcggccacttcgacatcgtcgtcgcaggcctcgctggtgggcgatgtggcgccaccgcaggctcatgccgcctccaccattctgccctcgtcatcgtcctacatgcagcaactgggcagtgtggccggttcgggtgttaatctccatgccgccgccgttgctgcagcggcagcagcagcagccgccgccggttcactgccaccgaccaatagccatggtcacggacacggttcccacgcacatccacatccacatgcccatggacacgggcatggccatggccatggtatctacgctggccaccagcacaatgtgcccataacggacgcccaggtggcgcaggtgcatctgcacaaacagggccatcggccgctgggacgaacgcagtcggcaccactgccccttggacatccgatgctaaccggagctgtgcaactgaatgtggtccaaacgcactacgagaatagtgaggcggagcgccaggcgtacgagcaccaggtggtgaaccagaaagtccgccagaccgtcctgactcgcagcggagctgctgcagcagccgctgctgccgccggcgtgagcgtggtgcgtgaggcacagttgaaggaggaggatgacgactcggccgccgaggtgatggacctcacagataagaaaaaaccgccgaagacggtgctaaccagcacgatagccaccagtacgtcccagaatctgcccgaagctttggcggcggcggcggcggcagccgcctaccgtgccccgcacaacgcgtccagtaactccgcctccgccacaaagtccggtattaagctgcgggaccaggagtatttgcaacagcagcgggagcaactattgctccttcagcaggaggaggaactggcgaagagcctaatgcgtccgctatcgcgaacgcttagcagtccgctggtgccgctggggccacatggtcttagtcagattcccgacactggacaacagccggcaccgatagccacatcctcgtcggccgatcatataccgcccgttaacctctcgctgccgcatcgccagcaccgccagctaatgagcacactatacgccagccaattgcgtaaccaccagccatcggcgagtggttcaccgccgcacaaggtcaccaccggtttggcctacgatccgcttatgctgaagcattcgtgtatttgcggagacaatgcccagcatccggagcacagtggtcgactgcagagcgtgtgggcacggttaaatgaaacggatctggtgaagcgttgcgatcgcctgcgcgctcgcaaggcgacacaggaggagctgcagactgtgcacaccgaagcgcatgccatgctcttcggttcgaatcagtgccagctcagcaggcccaagttggaaaacacgttgtcggccagctttgtgcgtttgtcgtgcggcggcttgggtgtggatctggataccacgtggaatgagcaccatacggcaaccgctgcacgaatggcagccggttgtgttatcgatttggcactgaagacggccaagggtgacctgcggaatggctttgccgttgtccggccgccgggccatcatgcggaggccaatttggccatgggcttttgtttcttcaattcgatagccattgcggccaagctgctgcgtcagcggatgcccgaggtgcggcgcatcctgatcgtcgattgggatgtgcatcacggcaatggcacacagcaagcattctaccaaagtcccgacattctatatctttccatacatcgacacgatgacggtaacttctttcccggcacaggtggacccacagagtgcggctccggtgctggtctcggctttaacgtgaacatctcatggtctggggcacttaatccgccactgggcgacgccgagtatatcgctgcattccgtaccgttgtgatgcccatcgcgcggagctttaatccggacattgtgctggtatcctccggcttcgatgcggccaccggccatccggcaccgctgggtggctaccatgtctctccggcctgctttgggttcatgacccgcgaactccttcagttggccaacggcaaagtggtgctggccctcgagggcggctacgatctggccgccatctgtgattccgcccaggagtgtgtgcgggcgctgctcggcgatcccgctgctcccattgccaaggccgagctggagcgcccgccttgccagaatgccatcaatacgctccagaagacgatagccatacagcaaacgcattggccctgcgtgaggatgctggagcacacggttggcttgtctgcgctggagacgctcaaggtggagcacgacgagtccgagacgatcaacgccatggctggcctctcgatgaactctatcccgcgatgattccgaggagccgatggatcaggatgaaaccaaatag

SEQ ID NO: 2271 - protein, 1235 aa, DROSOPHILA
MSSPDDRIPIHDLPSEAGSDERLLHITPATLTLDFKPHPAVDIDQQIMELKKSQELQKQRLINSFQEQSKQMELEHKLQLEHKYQFAVNSHGAFQELRNESMVTAAAAAVAQEQHRQQLHQQQQQHQQQQQQQQHQQQQQQQQARGRDGMKLKQNCSANASPEVKQILNCFILSRKSQAAASNGTTTTSPYRNRGVVKSSSGESLPAGTVTSAHPYKIPQPPPSLLKYESDFPLRKTASEPNLLKIRLKQSVIERKARIGGPAGARRHERLLQAAQRRQQKNSVLTNCNSTPDSGPNSPPSAAALAVGVVGSRGSPTSAPIQEENEEGSQYQPGQRSSINDLPLFSSPSLPNISLGRPHLPNSAQAHAQVNAQVAAQAQAQAQAQAQAHAMFAALAAAQGGCGQPGYYNPLGMAFVGRQPAPLAMIPATGIAPQQPSPVVRSASATSTSSSQASLVGDVAPPQAHAASTILPSSSSYMQQLGSVAGSGVNLHAAAVAAAAAAAAAAGSLPPTNSHGHGHGSHAHPHPHAHGHGHGHGHGIYAGHQHNVPITDAQVAQVHLHKQGHRPLGRTQSAPLPLGHPMLTGAVQLNVVQTHYENSEAERQAYEHQVVNQKVRQTVLTRSGAAAAAAAAAGVSVVREAQLKEEDDDSAAEVMDLTDKKKPPKTVLTSTIATSTSQNLPEALAAAAAAAAYRAPHNASSNSASATKSGIKLRDQEYLQQQREQLLLLQQEEELAKSLMRPLSRTLSSPLVPLGPHGLSQIPDTGQQPAPIATSSSADHIPPVNLSLPHRQHRQLMSTLYASQLRNHQPSASGSPPHKVTTGLAYDPLMLKHSCICGDNAQHPEHSGRLQSVWARLNETDLVKRCDRLRARKATQEELQTVHTEAHAMLFGSNQCQLSRPKLENTLSASFVRLSCGGLGVDLDTTWNEHHTATAARMAAGCVIDLALKTAKGDLRNGFAVVRPPGHHAEANLAMGFCFFNSIAIAAKLLRQRMPEVRRILIVDWDVHHGNGTQQAFYQSPDILYLSIHRHDDGNFFPGTGGPTECGSGAGLGFNVNISWSGALNPPLGDAEYIAAFRTVVMPIARSFNPDIVLVSSGFDAATGHPAPLGGYHVSPACFGFMTRELLQLANGKVVLALEGGYDLAAICDSAQECVRALLGDPAAPIAKAELERPPCQNAINTLQKTIAIQQTHWPCVRMLEHTVGLSALETLKVEHDESETINAMAGLSMNSIPR

SEQ ID NO: 2272 - DNA, 5598 bp, DROSOPHILA
agatagaaagagagcacgagagtgaagcttccgaaaagctcctgccggtaggaggctgagcccccctccccatccccacccccactctcttttcggggcctttgttatcctgcacacatgtgtgtcctttatgcagacgggctgtagcgtcgggtcaaggctgccacccccagctgccactgccgaatgccacgtccaacatgcaacatccttatgccagctgacataaatgcgctataacagatgggtatctcaaatcaatgcagtgctttgtagtctgtaaatctgctcttccaaaaggagcaaagtactcttctatctgctacttatttcatttgaatgatatgtgatggtcgcttcatttagtatgctatctgtgtgggcaaacaaatcaacttcaaatgcagagtatttcaaggttcgattaaactgtcgttttgtaactattccgttgtagagggctcagacgagcatgtgcagccatttggaggttgggttttgattgagaacaacgagctttcactttttgaaggacttaatccgttttggctttagttcaccgctggctacgcttcgttcttagtatttcgcttagttcgtggctgaaatgcatatctgggtcagctgttgtttggctgtttgttcgacttgcataagccagtccggcggcatgaaaaaccccccatttcagccccaaacccaaactcaaacccaaccccgtttttcaaccctgccgtgtttggttagctgctgcaaatgaggaagcctaaaatagcgagccaaacgcgttacgtgttggcgtcgcactgcacaaagttgcagcagcggcagcagcaacagcagcagcaacatcagcgcagcagtagcagcaatcgattgcaggggtccggttaccaacattttccttctcggctcgcagtttttagccgtttgttgcgttgataagaacgtcgacgaaagcgaaagtcactgtgctataagatgtgagccacaattagcgaccagctgcaacactcttaccacctcagctgtttgaaggaataatacgaaacacagctactctccagtgatttgcatctaaaataagaaataacaagatattcactactattagtgtgcttcgtctgtgttaatatatagaaataaaatattagttcaagttgaagtgccacttgagagcaggctgcacattaccaaaatgcagcgaccctcgtcgaatatctccagtaacatcatgaaccgcatgtccatctttgaaagtgagtcaagacaagaggctgccgcgtgaataattcattcgcttttatattcacacattcgttcatttattcattgctgtttgaagccattcttgtaggcagacaaaagaggtgcacacttctcccagtcagtgaaatcgtgtctatttctatttgtttggctttttccaccgactcggctttcggcgatggtgtaaaatgattaggtacatccactgaacacggataaaagtgtagaaaacacacggttgataagcttgtctttcaacagcaggagttaataaagttttgaaaaaacttaaaaaaaaatccgtgatacggtttgattcgatgtgagaagtgctcagtttcttttgaaaggaaattgccctttgcgatgcgtatcgcccgatctgagccagttaacccctccatgacaatggtttgcctttaactgtactgtcatggcttgttggtcccttaacccggttaaacggataggccgcttcgaagaaagctttcgcttggagaccagaccgcacatgataataattccagagccctatgccatatcataaattgtgcccacaatgcgctgcaatgttgtcttgatttatgtggcttagagtgggtcgctccggtcattcggtgaaaacaaattgcatataattagcctgggtggagcggagtggagtggtctgtccacggggctgtggggttgtcttcgacttcggtcccttacggagttcccgccgattatttcatttgcgttaatttcacacccaaaccccacagcacatgtgcagctcattaacccacatggaagcgtgttgcgcacaattttctagccgagtgtatgtatggcgtgagggggttaaggcgggggtctggcgaggcgaaccactcgattgcgcaagtgaaaactcgttttacgacgatggacatcgtaagtgaagtgaaaccttgtctggaactgattaaaataccctcgctatttggggtattctaattcaaggaaatggttaagatcttaacagttctgtagtatgtctatgttttcgccatggttgtcttaaggttcaaaacctttggtattgtattgaaactatttttgttaaataatttatatgatatttcaacgctagtaaacaatgggtattcaaatcttgtatacccgtcggcccaccttcgtgatttttccgcatttccttttttgttgccattgggtcaaatcgagccaaactatcagaataacccggaccagacatcgctatataaatggaaatgcaaattacgagttcggcatcggcgattgcagtttcgtatttgatgtcgaaggaaaatcaatcaaaacggatttgctagcgatttccgattgggccacatatgggacatcatgattagcataatgctgtcgctgacaaagttggttttgtcatattttgcccgcggagctcaaaatgttaaaggttgaccaccatggtcacaggttttcatggccattagaggcggcaaacatgagatttgtccgcggctgtacaaatcttgaatgtttttcctttgaatcagccataatttagttgaattgtctgaaatggctgatgaaattgattgattgattgttgaacgcgagctcagagcggggatggcaattaagattggttaacccttgaagaaatgttgagactcgtgtgaactagtttgccaatttatgtttggctttcggaatgattgggaagcaaatagtttcgcagatgaaaaattaaaaaaaaaacctacaaacgaatttcttcgttatgagtgattcagtcagtagactatgggttttaacaatgatttatgcaattagatatttggatgtccccgtttgcatttggaaattatctctgattaacacaaattaaacccattttgattgtgagtttttggcacagttccctgttgcaccagtcagcacattcttgcgaaaattgtacccactgaactcattgcgattttcatctcagtcgcgaagccatttcagccatgtcattgccctttcagcgctacttttttttttatttatttccactctgtcccttatcatcggctattaatctagtttaggctttgggcttcgagcgactaacttgttcgccgcgatgtgggttaatatgatgggtgaacaaaagaagttcatcgctggtgacggctcagtaaaaaatttacaaaaagaacagcacaaccagaacaagaggaatacggtcggaaagaactttaccgctgacttgaatcgaatcgagtttcttttccctgcctctcatattttttcgtacggttttacagctgttgttgtacgctgctctttttcatttatttatttatttattttttttgtaataacaaattgacaatgacatgaatggagagaaatatttaaccttaataaacgacgaagacaacgcagctttagacgtcttttgttgcttttcttgggttctcgagcggttgttgtgtgcattgttgggtggctatggtccgaactgatttgtgaggagaaggccaagtgccaattaaactttggcacagtggaacggagggacatcgaccatagacacacagaaaacatatagataattatgaatattttcaggtttttacaagtaagaccaaacagttggacatttggaatcaggtttatttgactgttaaccataacacagagtataatgaatagaaatcaatttgtttcagtgtatccagcaagtggaaaagaatgcaaacccattcactaatctttgaactgtctgcatccatctttcagatacggcattcaggcacagtctggcggacgctgacaacgcggccggaacgatgatgtccatgaccagctccccgccggccacacccactggcgtccagacggactccgacgggctgatcctgcctaagaagctcatcaatccctgcatggagaacatcgatcgcaaggagttgcaccgggagctcaagttcaatgccagagtgtgagtagctacgcacattgtataatatttatagaaattgcttatctaatgagaaatggtttttacttattccaggggaaagagcgtgctgaaccagaaatcagaattgcaacgtgcctacgacaagcagaaggagcggcatgccgcggccgagcaacattcgccggatgcggacattgtcggcggcattccaggactgaaaggagaactcgggcgcgtgatcatggagcgggcgcagaagcatgaggcggcggctcagaagcaggatcaggaggacgccgaggagcggcagtacgtaaatcccgagtatctgaacgtgcgggccaagctgcgcacggcgcacgccaacaattaaggagcagcccactcggatacccctcatcctgtaatcctcagcctatttaatgtttagttttagtaagagacctaaccaaattatgtgtaaggaaaccatgtgttttatatgttaactttgtgagcggttttcattttgatattatgcaaaactagagttgattattataattaaaaatgtacacctagactaagccatttacttgtttagtttgttagtccttatctctaatctaagttgaagctttcttgcgctaaattcgttgtgtataaaccaagtgtataaagttttagtttctaaaaggaccccatttcttccgaaaacaacaaaaaagaaaacaaaatggaacataatgtatctagtgtagagttattgtattgtatatgtatatctaaagattagtgagaccgaaaatgctgtaaacagggcaatgtgttagaaaataagacagagagacagacagaacttgggcggaagatatttgatctacatagaacaactattttatgtcaagcaaagaaatttaaacagattacaaaactatatacaacatatatctatatacaaatttagtttctggaattaataaattttattgtaggcgaaaagttataaaaccaatttcaatgtataaacattactgtatttttcaaaaagggacaatggatttttaatcgtgaatcctttgggcaggaataatactattcttgagattttttgttttgtctggccagctttttgtccagttttgcctgctgtgcggcagccttcttctcctccttctgtcttgccaatatccgggacattcgtttagaaactcgtgcctatcaatgggaaaatgtggtttcaattattttatctgtttaaagtggcactttcatatttataactcacagctgacaaacgggcacgctccttttccacttccttcgcaatcttttctcgcacctcttctattttcacatggaactcctcaactttttcctggcaggacctcagg

SEQ ID NO: 2273 - DNA, 741 bp, DROSOPHILA
accagctgcaacactcttaccacctcagctgtttgaaggaataatacgaaacacagctactctccagtgatttgcatctaaaataagaaataacaagatattcactactattagtgtgcttcgtctgtgttaatatatagaaataaaatattagttcaagttgaagtgccacttgagagcaggctgcacattaccaaaatgcagcgaccctcgtcgaatatctccagtaacatcatgaaccgcatgtccatctttgaaaatacggcattcaggcacagtctggcggacgctgacaacgcggccggaacgatgatgtccatgaccagctccccgccggccacacccactggcgtccagacggactccgacgggctgatcctgcctaagaagctcatcaatccctgcatggagaacatcgatcgcaaggagttgcaccgggagctcaagttcaatgccagagtgggaaagagcgtgctgaaccagaaatcagaattgcaacgtgcctacgacaagcagaaggagcggcatgccgcggccgagcaacattcgccggatgcggacattgtcggcggcattccaggactgaaaggagaactcgggcgcgtgatcatggagcgggcgcagaagcatgaggcggcggctcagaagcaggatcaggaggacgccgaggagcggcagtacgtaaatcccgagtatctgaacgtgcgggccaagctgcgcacggcgcacgccaacaattaa

SEQ ID NO: 2274 - protein, 180 aa, DROSOPHILA
MQRPSSNISSNIMNRMSIFENTAFRHSLADADNAAGTMMSMTSSPPATPTGVQTDSDGLILPKKLINPCMENIDRKELHRELKFNARVGKSVLNQKSELQRAYDKQKERHAAAEQHSPDADIVGGIPGLKGELGRVIMERAQKHEAAAQKQDQEDAEERQYVNPEYLNVRAKLRTAHANN

SEQ ID NO: 2275 - DNA, 5295 bp, DROSOPHILA
gaatatattcagttctaaccagtaaaatatttgattactccttacacgtagacgtaaagtaatttagtattttgttttaagtttctgtgccttttgtcggaagttctagctagttaattcgcgcatcactgccagcgacgctaacgccaacgcgaacggttcttgccgccgctttcacacagacgaaaaagcgcagtgtgcgttggccaacgctgtgcgcctgctgttctgcggacaaaatttgagcagatccgctcacaaaaaaacgtacttaactgcgaaatagtgctggtcgtgtaggttccacgttccaaccgactgcagtgctttggctccatggcaccacggctaaatggccaaatggctccactgctccggtggctccaactgcggtggtgcccattccagttggaaattgcatgcgagcacatgggaaaagtccccaactggtatttcgagcaggcgcacagctttcccaactgctcactctcccaaagagttccgtctctgtctcgttcgcaccgataaggagcctttcgagataagcagctggaaagggacggactgatggtagcggcaaagcgcagtgtgcaacgacagaaagggatgcccaatgatggtctaatcggagggggaatcgctgatcgctgatagtactggaatctggttgatataaccccaatattatgttaaagagtgaactacatttttaactgagattttagtgagtttccggcctttaaggggtgtatttttacgataataaaagtttgttagatcgcatattgttttaaatatttcatatatgttattttattttaacgaatttatacaattgacttcaaaaatatctgtgcaccattccataaaatgtaaaccgaattaatatgttgaaaattactctcgtattaactcttttttgggaattgataattcatttgcgatacgatatgagttctatataaggcttaagctttggggccaatacttcagtcgtgcggcaaacgcaaagctgaaaagtattctagttctatagatctcacggtaagagaaagtataaagtctaaataagagaacataaaaatgaaatcggattgcgagcttttattgcatagccaatggaaaaaagttttagttaaattttcacgtcgggtgcgtttggaggcagagtgtagcatagtgtaaagaacaaattaataataatataataaagtagttctcttgtgacatttggtgtcgtaaacagtttggttaagagagtttttaagagtgacggtttgttctttggtgacattgagtgtaattaatatcaaaatattactgtgggtttttccattccctcccacaaacaaacaaacaatgctaaaaaaccatcaaattgtcaaaagtgttgagtggaatgagtcgtggaaaaatgattagatgcgaacatatctgaaagtttttgctcgcggaatttcgccataaaaatctcgtgcgtctgtgcggagatagcgaccgtataaccgcgaaatttaagtactttaaaaaacatgggagatagatgtattttagctactcgaaattattgaccgcagtatataatcgtatttccactgaaataattgtctctgttttttagccaaaataattggctcttagtctttgataaattcatctatgtttcgtaattttttcattacgctccacatgttaagtaaaattaaacttaattttagaatgtttatttttgccaaatgttattgttattaacccagaaataatcttgcaccgttcctgattattgaatccacttcgataaaactccaatattataccttagttctcgaaccagcaaaccagttgtgcgtcttatacatacgccgtaggagagactgagactcacatcagctgctcggcggcttgaacgcctacagacatacatacatacgtacatacatatatagggagagatttagagcgcggattataatgctaaacaggttcattggtttatcggctgcgatcgtgggtcggagcagtcggatcagcggctttccgttctcgccgctccttaaagctgggtgcgtatgccgcttgagagttcagtcgctcgcgaaacacgacttcgatcgcaatacttcgagatgagatcgattgccaccaactccctgctgccactgattgtggccttgctgatcgccggtagtaatgcctccctcccacgcaggggcagcagaaatcaaagccagaatcgcaccatgtccgctggcaaggctttcaaggtcctggtgacacatcccgaggttccccaggagggcattgatctgctgaaggagaactgcgagatcgtccaggtgcagagtgttcccatcaaccgggcggagctgctggagaaaatccgtggcgtggatggcgttctctggggtggacacgaacccctcaatgccgaggccctcgatgctgccggtccccagctgaaatccatctccaccatgtcggcgggaatcgactacgtcgatgtgccggaggtaaagagacgtaagatcccgctgggacacacgcccaccgttctcaacaccgccgtggccgatttggcagtgggtctcctgatcgccgccagtcgccgttttcacgagggtcgcaagaccatcgacaagtgagtaccactagttggttagttgtgtttgtgatgattcatatacttacagaattaatttgagcaatgacaaaaatagagtaaaccgaaattataattgtcataattattattataattaagctaaactagggacactttattttcaacttagtgtggccgtgaaatgtatacgcatgaattctcgattaaaattgcaagccggttcttaagaataccgcctgtccgctcgtctgtcgcttgcacttttgctctatagcgctcacaagtggacaaagcattatcatcaataggttttggctcctcacatgcataatgtaaaattctaaagtattgactttcgatttatctacaaacaaaaggtacgagcagtttatgtaaccgccgctaggtggcggtgcaataaaaaaaagttttttttatcttcatcttagcttagtaacaggcatttatcagtatctcgagtatctacaagtatattatatattttggaaatattcatatatctttcaatttcttaatttgtatcttttgcgttctaaaagtgacaagtgggaaaactaccatcttaactggctgttgggccaggatattcgtgattccaccgtgggattctacggctttggaggcattggtcaggctattgccaagcgtttgtctggattcgacattgacaaggtgctgtacaccacccgtcgtcgtgttcacaaggagatcgaggaggagttcaatgccaagaaagttgacttcgatacccttctggccgagagtgacttcgtagtgatcgcttctcctttgacgaaggacacacagggcgtctttaatgccaccgccttcaacaagatgaagcagactgctgtgctggttaacattgccaggggcagtaagttaccagtattaattgggattctcgaccgattttaactatttattttattcctcagaaatcgtcaaccaggatgacctctacgaggctttgaaagccaaccgaatcttttccgccggactcgacgtcacggatccggaaccattgtcgcccaaggacaagctgctgacgcttgacaatgttggtgagtgggaaaatgaaaataatgttgtagtttattgatatcagtcctcaggcccacacctagcaaatactcgtatttctggccccttatcaatataaagattttgacttatctcttcagtggttgacaatgactaaaagtattttgaaattaatggaatctttaaggtttcttgaaggttacaaataaatagggtaacgtttattctttccatgttttatctaatttctgcgtccttgttgacctctataattcccttcttttgttgatttattaaaacattgttatcttggtttgtgtaatcgtatcttgaactaaccacttgatgtgttcttttagttgtcctgccccatattggatccgccacgaagcgcacccgtgccgacatgtccaccattgctgcccataatgtgctccgcggtttggctggggagcccatgttgtcgcccgcctactagtaaattcaaatgggaaatatggctttctaccgctaaccagtttggaatgtccgccaaacaaagtgcgaaaggccgccgatgaccttggcatgccagtagatgtgaaaataaaaaaaacaattaaaaaacaagtatttgctgttgcaaatttattaaattaaatatgtgggaatctaatctataccgtaagattagctcaactgattaatatggaataggtaaagcaatagaataattggtgctagagaatgagaaacataatttaaatactaatatagtatatcgtaggaaataatattgtacgttttaagaaatgagagcagaaaacattgatttagtaattcgcaaagtttagctctgcacaattgcaaaacctaccacttttccccaaaatgtatcgaggaccttcaaactgctgatttcgcatccaaaagtcccaggaacggctgcgggagcttgtcggatcaggatcggaataggatcatcgcttcttaaaactgggtgcttatgccgcttgagagttcgctcgcgaaacccgacttcggttgtagtttttcaacctgctcccactgattatggctttgctgatcgaatataataattgaaggcccctgggcatggcccgttggtttcaaggtgctgggggcgaatcccagggattactatgtgggcatttatctgcagaaagagaactgcaactgcaactgctgcaaccagcaagaaagcagaccggcgactgagcaggacagtagccccataaggcagtggctctaaatgaatactgcccccagctgactacgccgatgtgccggaagtcaagaggtgcaaagtcccctgtcaacaacgacgtggtcgatttggcagtgggttcgagtcgtcgtttccacaagtgatccaagaggatgtacaccatgttgtacagtaaaggatgtagtagtatattaaattgaacgattaatcagtatacctgttactccaaaagtaaacggtatacttctttcaaaaataagtaacgggaagaagaaaacgttttcattgcatacaagtatatgtctgtcctttcgaacaactcgatctcaggacataaagcatttttaatttttcaaaaatatgtatgtaacagttgtgg

SEQ ID NO: 2276 - DNA, 1373 bp, DROSOPHILA
gcaaacgcaaagctgaaaagtattctagttctatagatctcacgtcggatcagcggctttccgttctcgccgctccttaaagctgggtgcgtatgccgcttgagagttcagtcgctcgcgaaacacgacttcgatcgcaatacttcgagatgagatcgattgccaccaactccctgctgccactgattgtggccttgctgatcgccggtagtaatgcctccctcccacgcaggggcagcagaaatcaaagccagaatcgcaccatgtccgctggcaaggctttcaaggtcctggtgacacatcccgaggttccccaggagggcattgatctgctgaaggagaactgcgagatcgtccaggtgcagagtgttcccatcaaccgggcggagctgctggagaaaatccgtggcgtggatggcgttctctggggtggacacgaacccctcaatgccgaggccctcgatgctgccggtccccagctgaaatccatctccaccatgtcggcgggaatcgactacgtcgatgtgccggaggtaaagagacgtaagatcccgctgggacacacgcccaccgttctcaacaccgccgtggccgatttggcagtgggtctcctgatcgccgccagtcgccgttttcacgagggtcgcaagaccatcgacaatgacaagtgggaaaactaccatcttaactggctgttgggccaggatattcgtgattccaccgtgggattctacggctttggaggcattggtcaggctattgccaagcgtttgtctggattcgacattgacaaggtgctgtacaccacccgtcgtcgtgttcacaaggagatcgaggaggagttcaatgccaagaaagttgacttcgatacccttctggccgagagtgacttcgtagtgatcgcttctcctttgacgaaggacacacagggcgtctttaatgccaccgccttcaacaagatgaagcagactgctgtgctggttaacattgccaggggcaaaatcgtcaaccaggatgacctctacgaggctttgaaagccaaccgaatcttttccgccggactcgacgtcacggatccggaaccattgtcgcccaaggacaagctgctgacgcttgacaatgttgttgtcctgccccatattggatccgccacgaagcgcacccgtgccgacatgtccaccattgctgcccataatgtgctccgcggtttggctggggagcccatgttgtcgcccgcctactagtaaattcaaatgggaaatatggctttctaccgctaaccagtttggaatgtccgccaaacaaagtgcgaaaggccgccgatgaccttggcatgccagtagatgtgaaaataaaaaaaacaattaaaaaac

SEQ ID NO: 2277 - protein, 248 aa, DROSOPHILA
MSAGIDYVDVPEVKRRKIPLGHTPTVLNTAVADLAVGLLIAASRRFHEGRKTIDNDKWENYHLNWLLGQDIRDSTVGFYGFGGIGQAIAKRLSGFDIDKVLYTTRRRVHKEIEEEFNAKKVDFDTLLAESDFVVIASPLTKDTQGVFNATAFNKMKQTAVLVNIARGKIVNQDDLYEALKANRIFSAGLDVTDPEPLSPKDKLLTLDNVVVLPHIGSATKRTRADMSTIAAHNVLRGLAGEPMLSPAY

SEQ ID NO: 2278 - DNA, 6365 bp, DROSOPHILA
tttgttgatttattaaaacattgttatcttggtttgtgtaatcgtatcttgaactaaccacttgatgtgttcttttagttgtcctgccccatattggatccgccacgaagcgcacccgtgccgacatgtccaccattgctgcccataatgtgctccgcggtttggctggggagcccatgttgtcgcccgcctactagtaaattcaaatgggaaatatggctttctaccgctaaccagtttggaatgtccgccaaacaaagtgcgaaaggccgccgatgaccttggcatgccagtagatgtgaaaataaaaaaaacaattaaaaaacaagtatttgctgttgcaaatttattaaattaaatatgtgggaatctaatctataccgtaagattagctcaactgattaatatggaataggtaaagcaatagaataattggtgctagagaatgagaaacataatttaaatactaatatagtatatcgtaggaaataatattgtacgttttaagaaatgagagcagaaaacattgatttagtaattcgcaaagtttagctctgcacaattgcaaaacctaccacttttccccaaaatgtatcgaggaccttcaaactgctgatttcgcatccaaaagtcccaggaacggctgcgggagcttgtcggatcaggatcggaataggatcatcgcttcttaaaactgggtgcttatgccgcttgagagttcgctcgcgaaacccgacttcggttgtagtttttcaacctgctcccactgattatggctttgctgatcgaatataataattgaaggcccctgggcatggcccgttggtttcaaggtgctgggggcgaatcccagggattactatgtgggcatttatctgcagaaagagaactgcaactgcaactgctgcaaccagcaagaaagcagaccggcgactgagcaggacagtagccccataaggcagtggctctaaatgaatactgcccccagctgactacgccgatgtgccggaagtcaagaggtgcaaagtcccctgtcaacaacgacgtggtcgatttggcagtgggttcgagtcgtcgtttccacaagtgatccaagaggatgtacaccatgttgtacagtaaaggatgtagtagtatattaaattgaacgattaatcagtatacctgttactccaaaagtaaacggtatacttctttcaaaaataagtaacgggaagaagaaaacgttttcattgcatacaagtatatgtctgtcctttcgaacaactcgatctcaggacataaagcatttttaatttttcaaaaatatgtatgtaacagttgtgggcgtggcaacgatttgaaacaatcttttgcagcgtagacgtaatctgtatgcctaatctaaagattacagctttttatagttcctgtaggctattgatatcagtcctagttgcttttagggcccccacctaacaaatactcgtacttctggccccttatcagtataaagatttttgtcttatctctttagtggttgacagacagtgtctaaaagtattttggcaagatttcattaaggtttcttgaaggttacaaatgagtaggttaacgtttttgctgtttagttttatcatgtttctgcgtaaatgttgatctttaatgtcacctttttagttgatttatttaaagatcgttatttttgcataactttcagttgtcctgccgcatattgtggcaccattactacctataatgtgattcgtggcttggctggggatcccatgtacctagttgcccacctactattacatttaaatgggtttagccgcatcccagtaaatgtgaaatagagtaaaaaaacattttcctgatgcaaattgattaattaatgtggaaatctaatctaatggtatagtttgactgattactacgaaatatgtatgaaaatcgctcatagaaacgtaaataaataatgactttaattatataaagctatatataaataatcaattttataattgtaaacttttctttttactgtaatactttaatactatccctaaaaattgtataggaacgcgcaggaaatagtaatgtgaatttcaagagatgagagcaaattaaaatgtaaaagcttaagagaaccttttaagcctaagagcggggcacagaaaaagcttgaattgtcatttcgaaaatttccacttagttcagccctgcaattcgccgctactagttgatattaagtgctatattttcccccgaaatgtctcgtgcgaccagggcttttaaagtgctgatttcgcatccaaatgtcccagcaccggctctggaactgctccgatcccgtggagcggagaccatcatctgccagagtgtgccgccctcgagggatgagatcctgcagaaggtgcccggcgtggatgccatctattgggcccattaccagcccctgaatgccggaatcctggatgctgctggatcccagctgcgttgcgtgagcaccatgtcctccggaatcgattttgtggatattccggagttccagaagaggggaatcccattgggccacactcccggggtggtgaaaaatgcagtggccgatctcgccattggcttgatgattgcagccggtcgtcactttcatgccggtcgcaccgaaatcgagaggtaagaaaagctgatgggcgcttttttctcagaagcttttaatattgagagcttttcggatgagggttgccaactagttgcacatgccctatatacggctctacttctacactcttttggaatatcagatacttaagtacacctaatacttaccaatcattaatacgtttcatatgaaaacataatataatataaaaatatttacaggtcccaatggaaaatcgagcagatcaactggatgatgggtcaagagattcgcgattccgtcatcggtttctttggctttggcggtattagtcaggccatcgccaagcgattgcagtgctgggatgtggccaagatcatctaccatactcgcacccgaaaggaaaacgatggcgacttcaaggcagagcatgtgtcgtttgaacaacttttacaagaaagtgacttcctggtggtagctgctccacttacaaacgaaactagagagaaattcaatggaaaggcatttaatctgatgaagaggagttctgtgtttgtcaatgtggccagaggaggtaggattttaactacataactgtatgaacgctattgcatacccgtggattttttcaggtctggtaaatcaaactgaccttcatgacgccctgacaaatggtacaatttctgccgcaggcttggatgtgaccacaccagaaccactgcccgccaatagtcctcttctcaatgtgcccaattgtggtaagctagaacatttatttctcttccctgagtgaactgaaatattatttatatatttccacagttatccttccccatatgggcactcagacaatgaagactaccattgaaatgggattgcttgctgccaataatattttgaacgccatcgaagggaagcccatgataaggccagcctactgagaacatgcaaaatttgaatggaagaaactttacctgtatcctactcggatcggaaaatcaatattaaaaaatgatattaaacatataaatgtcgaacttgttaaccgcaactataatggattgatattttttcttgtttaattgaataagtgaataattatgaaaattatgaacgtaaccataaaagctcttcatgcgttttgttgtcagctttttctgtgatagggggatctggtgctctataaaagtccggcgacaaagccaaccgtttgtcagtcgtttaagaaacgcagggaatataacgtcggtgctaatagactccgatttttgagcatttaagagcttcagagaggaagagcaatcaaaaagcttctaactgctcacgaaaaaagagaatattcgaaactctgctctgtgtcagtgattatctataaagtgtggcacttgtaattatttttcctatcaaataatatcttttcgtcaccagaaggacttaaaatgtcaacaacaaagccgtttaaagtgctgatagcacataccgatgttccgccagagggaattgaaatcctgaaggagcaatgcgagatcctgcaagtaataaatgaacctccaaaaaatcggcctgaaattctagaaaagatcaggggggctcatgccgttatttggggtggtcgggacatactcaatgccgagattctggacgccgctggtccgcaattaaaggcggtatccaccatgtcgtcggggataaacaatgtggatgtgccggagctaaagaaaaggggtatccccttgggaagtactcctgcgatgctgactgttgcggtagccgatcttacggtgggcctgttgatcgccgctgcccggaggttccaagagggtcgaaggaagatagacaggtaaagcaaaacaacctgtcattttttattaattactctgatatcgcaaagtttcgtatccttgattacagtgataaatgggataaggaccatcttaactggatgctgggtcaggatatccgtgattccaccgtgggcttctatggctttggaggcattggccaggcagtggctaagcgtttgatgggattcgatattaagcgcatgttatataccacccggaatcgcgttagccaggatatcgaggagcggttcaatgccaagaaggtggatttcgaaacgcttctggcggaaagtgatttcctcatcattgcatccccattgaccaaggagacattgggattgtttaatgccaccgtctttaataaaatgaaagaaacggcagtactggtcaacgttggcaggggcagtgagtatatccgaaaaaagcaaactaaaatgcctaatgcctttcattctagaaattgtcaaccaagatgatctttacgaggcgcttaaatcaaaccgaatttttgctgctggactagatgttatggatccggagccccttccttccaacgataaattacttactctagacaatgttggtaagttattatgtatcatctacatagggtcagaaactatttatatttttatctcattagcgttttttggtatttttctcaagaatgataagaactgccattcaaagaattcttttgaaaacctgacactttacgttataatctatagttcccttaccattaggcacttcatttatctcgtttgtttcttttcatgaagtggttactcctcatgtgggctatgccacccggagaacccgtgttgatgcagccaatttggcttcgcgtaatgtgctcaaaggattggcaggagagccgatgttgtcacccgcctactaaaatctatctaatcggaaacagaaatcaatgattgaaagtatgtgatttaattacaaaactaacttgtcgaaacgttattcacttgtattgtcagcctcttctttagccaccaggggcagatacagtggatcccactcctcccgctgcagggcctttagatacttcctcctctcctggaggactcgcggcactaactccggctgctcccccttgtgtttctgtgatatttccagggcccgccgccagttgtgcatccgcagggctagtccgactgcctgttcgattttcttgccgtgcagcaggatggtctctgcctcaagcatcctgcccagcattagtgagttttcggccatctgctcggcactcgagggcgtcagggccttcaggtgctgcaggtagctcaccttgtcgatttgcagtgctgccgagtaggcctcctcgctgatctgcaactggtgcttcctggtcgccaccgccgcaagagtggcccacaagctggaatgctggcccattcggcagatcttcaacgcctgttgccactgcccttccaaaagcgcacgatgcaggatctcgcagtacatgttaacattgacggggagtagggcgccggcggaacggaatgtgagcacggattcctcaaagctttcgatggtaatgtgtttgccaaattccctaggtgaaagagatttttaagcaatttaaaaaatagtacaattaatctggattaacagatagcattaaaagtacaatgaagccttgaagtgatttcaatttaaaataaaacccgacattctaaaacaagttgagttagtaagtacatctatgttccttacgtcgtatccaatgtaatagtggtcagggcaatgatcgtaggatcggaggctccttccccgggacaataccagatgctgtagcacgagtcgtgtactcccaccagaatatttgtttcgctggcccacataatggcggtgagttgggtgccgatcttgtagatctcatc

SEQ ID NO: 2279 - DNA, 1797 bp, DROSOPHILA
atgtgccggaagtcaagaggtgcaaagtcccctgtcaacaacgacgtggtcgatttggcagtgggttcgagtcgtcgtttccacaaggcttttaaagtgctgatttcgcatccaaatgtcccagcaccggctctggaactgctccgatcccgtggagcggagaccatcatctgccagagtgtgccgccctcgagggatgagatcctgcagaaggtgcccggcctgcgttgcgtgagcaccatgtcctccggaatcgattttgtggatattccggagttccagaagaggggaatcccattgggccacactcccggggtggtgaaaaatgcagtggccgatctcgccattggcttgatgattgcagccggtcgtcactttcatgccggtcgcaccgaaatcgagaggtcccaatggaaaatcgagcagatcaactggatgatgggtcaagagattcgcgattccgtcatcggtttctttggctttggcggtattagtcaggccatcgccaagcgattgcagtgctgggatgtggccaagatcatctaccatactcgcacccgaaaggaaaacgatggcgacttcaaggcagagcatgtgtcgtttgaacaacttttacaagaaagtgacttcctggtggtagctgctccacttacaaacgaaactagagagaaattcaatggaaaggcatttaatctgatgaagaggagttctgtgtttgtcaatgtggccagaggaggcttggatgtgaccacaccagaaccactgcccgccaatagtcctcttctcaatgtgcccaattgtgaaggacttaaaatgtcaacaacaaagccgtttaaagtgctgatagcacataccgatgttccgccagagggaattgaaatcctgaaggagcaatgcgagatcctgcaagtaataaatgaacctccaaaaaatcggcctgaaattctagaaaagatcaggggggctcatgccgttatttggggtggtcgggacatactcaatgccgagattctggacgccgctggtccgcaattaaaggcggtatccaccatgtcgtcggggataaacaatgtggatgtgccggagctaaagaaaaggggtatccccttgggaagtactcctgcgatgctgactgttgcggtagccgatcttacggtgggcctgttgatcgccgctgcccggaggttccaagagggtcgaaggaagatagacagtgataaatgggataaggaccatcttaactggatgctgggtcaggatatccgtgattccaccgtgggcttctatggctttggaggcattggccaggcagtggctaagcgtttgatgggattcgatattaagcgcatgttatataccacccggaatcgcgttagccaggatatcgaggagcggttcaatgccaagaaggtggatttcgaaacgcttctggcggaaagtgatttcctcatcattgcatccccattgaccaaggagacattgggattgtttaatgccaccgtctttaataaaatgaaagaaacggcagtactggtcaacgttggcaggggcaaaattgtcaaccaagatgatctttacgaggcgcttaaatcaaaccgaatttttgctgctggactagatgttatggatccggagccccttccttccaacgataaattacttactctagacaatgttgtggttactcctcatgtgggctatgccacccggagaacccgtgttgatgcagccaatttggcttcgcgtaatgtgctcaaaggattggcaggagagccgatgttgtcacccgcctactaa

SEQ ID NO: 2280 - protein, 598 aa, DROSOPHILA
MCRKSRGAKSPVNNDVVDLAVGSSRRFHKAFKVLISHPNVPAPALELLRSRGAETIICQSVPPSRDEILQKVPGLRCVSTMSSGIDFVDIPEFQKRGIPLGHTPGVVKNAVADLAIGLMIAAGRHFHAGRTEIERSQWKIEQINWMMGQEIRDSVIGFFGFGGISQAIAKRLQCWDVAKIIYHTRTRKENDGDFKAEHVSFEQLLQESDFLVVAAPLTNETREKFNGKAFNLMKRSSVFVNVARGGLDVTTPEPLPANSPLLNVPNCEGLKMSTTKPFKVLIAHTDVPPEGIEILKEQCEILQVINEPPKNRPEILEKIRGAHAVIWGGRDILNAEILDAAGPQLKAVSTMSSGINNVDVPELKKRGIPLGSTPAMLTVAVADLTVGLLIAAARRFQEGRRKIDSDKWDKDHLNWMLGQDIRDSTVGFYGFGGIGQAVAKRLMGFDIKRMLYTTRNRVSQDIEERFNAKKVDFETLLAESDFLIIASPLTKETLGLFNATVFNKMKETAVLVNVGRGKIVNQDDLYEALKSNRIFAAGLDVMDPEPLPSNDKLLTLDNVVVTPHVGYATRRTRVDAANLASRNVLKGLAGEPMLSPAY

SEQ ID NO: 2281 - DNA, 6028 bp, DROSOPHILA
aagtgtttagagtggattaaatcaccttagcagtgtcgttgaccgatcgtggcttagtttattaaaaaggcttcttgtaatctgctgaaattttccatttgcaaatgaaaaattcgggaggaaaagctttttgtggctgacgttgtgtcaacgcttagcgaagttgcaaaccactctgttttggggtgaccatgccaccattcaattggttcatatcacagctattcaaatgtttcaaactacatatgtatataaactaagtacttttttcttattattatataaaattactttaagtattactttaagggttgttcaatcttcttgcttgcatcataaccctatttcgagcattttcggggtagccaatgaaatttgaaattcaataccccgacatgagcgtagatgtaacaatgttgttgatgtacaattccttgtcagcttggttatgaactaccaaaattatgcacaatgctagtatcttctatgtatattttatttgtatttgatatatgcttatggtaggtattaatatatatgtttaaaatttccacttttatatacaagttatagtaatttaattacattacatccggatacttataaataaagacgcacaaccatctaagcctgtttacgttgcttgttttcccagcaaacaacgagcaagccacacgctgccaaaagaaacgtcatcaattgagctgcactgtgtgctgtgccctcaatgaaatcgaaaaaaaaggcataacgctggccacgaacagagccgccgaatgcgtgagtctggctggctgtctggtgggcatccatttgatacggcaggaaataaaaaagtgctgtggcgactaagggtttccccagaagcaaggcaacaacaacagctgcagtgcgggcagcgacgcgactgcgctgccagcaacattcagtagcaagactttggcactctggcgaagaagcctcggcaacatccacagtcgttcctcggccgagcaaccgtctgcatcgcgcgcactctcgaagcgatttgaagcccatccatccaaccctcggaggacctagtattcgccacccagcagaggcgccaccaagtcgcgttccgcatcccccaaaagattcgcattaacattccaaggaagccatgtcagcggtgccgatgaaagcctttctggctggtctcttcttgctggccaatgcctggcacatcacaggtgagatgtgttaaacgtcgaaaataataaagtgtcgatcggcaaactgaaacgctcttaagtccccttgtaaacataaagccccccagaagttggtctaattatccagtttttccaatgtgcgtggtgcacagagaaaattgtaaaagctctgtggttttaagagtaaacactatgcttaattacaaaatgtactcgaaatccagcataattttggaccgcaattttcttctgtgcacctgtaattccatctggcccacaaggtcacggatccgcataaagtttggggtgtgttggttttcagacccagagcccatgaatgaaatttgtttccaattttcgcgcaatttgtttatgtagtttttccgccggccatttagcgcttttcccttgcggtgtttataaaaattctcaaaatttggcttacaactaaaaaagtttcaggtgaaatccataaaatatacttggcaatttatgtttcgcgcgattcgaaagcggatttatggacgacacttaaaatgatgggtctgtttttatctgtcgtaaacaaattaataaaagatgggtggaatataatgaaatattaataggaggctatgtgggcttaaatatagaagcgctcacttgtatattttgcattgaacacgtgtagaaagagaaaagacatttgaaaattatgagcactattatttgttgcgtgcagttaggccagtttaaaattatacaataaagaggctttattttcaagtgagaatttgtatagctatcccgatttgtaagtaaatgcccgaagttaggtaaaataatttctgttgatccattttcataatatactgcacatttcctcatcgcgtatggaacaagttcgtgggtcattgcttccttgatggacatcggtttctatatatacacgtgcatattcgcgtttcgagaattttcacgcttttcaatgattggcaacctgcatgccctataaatacaaatattcgcccgactgccagacatttcgatatttatttccacagtcatttcggaacggcccacatgatttgccaaacagaatccaaacgccgaatgcattttcaacatttccatggcccgttgaatgcctttgaatcgctcctgattttaatgagggtgattgagaaatgggcattgtgattgggtcattaggcggtgaatcgaagcagcagctccggccccctgttgctctcaattagccattcccggtgtcctgcaattatctaattgctctatttttgcttgcgtttcaatctgggtttacgagattcggggagtgcgcatgtcagagtggcgccaggatgtcgcctgctccagtttcccgctgtcttcgacatctggcatcccgcatcccccagaaatctctagccacacttggcaggaaactatgtcaaagtctggccgccagtttgggggttagttctctgcgcttcccgacttgaattgcgtaatttgcgccaactgataatgcaggcagataaaagtttcggagtaccttcggccaggaagttgagattatcctgacacacatccgatccgtatcgtattatatttgttattctcgcgctacatttctatgggggtgcttttgctgatgcaaaggcagagttgtcggtcctcagggcggaatatttccaaaggaacccaggcagggccgttgagtgcaacttccttcaaaacaagtctcagctttcaattaccccagaactgctttaaaagaagccacaccaagtcgggccatgtgcgtgacctcagcgaatgcttttagagtgttaagcgtgggcgataaaaaaccattggacggcgaccttggatgacactggaaataaaaattgttaggactatttaaagggatatttactgaggatataaacttttgcaatatccattatgagccttgataacagaatagaaagcctaagaactttttctgtgtgtagctgtgggaaacaatcaattacccacactacaccaacttagaactgtgccaattacctgaaactgttctaaagacccctgaacaaaagagccgaaagaatacaaacggtgtggcaatggattttgcatatgtccagtcaatataagactgccaaacttttccaccaactggcatcccaaggtcactgcaactggagccttcggagcgtatacgtaatatcgccacctctagtgtaatattataatttagctgggaaaggaaaattataaatatgttatagtcaatatttgacagccaccactcctttaagaaacccctttcaaaactgtttgccctcaaggtgctctagttgagcaactgaactcgtggcatgtttgccttttcctgtggtaaacaggcatgtcctggcattttcaaagggccggacatgcaaaactctttcaaggacacgaccgacgatcttgatttactgtcgcgccaaatcacgcaaccttatcaacacaattagaggagtttcccttcccatttcccacatcatctaggctcttggactaattaaatcatttgtctaattctataaatagttgagactcatccgaacagtttgttatatgaattcttatgttaaaggtgtgaaaatttattttaatgtgcgaaatgaacgcggtgaactgaagaaaaacaaattattatgaaacaaaaataaacagaaaccgaactagtaatatgttcacaaaaggaaaaaatattaaaatgacttccaggctgcaaaagcttaacacatttaaacaaactttttgtttgtcgttcattgtgcttcaaatctatcacatacctctggcatttaattttttcatgtgaaaagtactaatatcactggtaaactatggtactttaccatacaaacttgactcatcttaccacttttctaaggcattgtgcatatatggtacaaaaagaacaatttacttagttatttagtttattatttaaagtagtggttcagtttccactcactacttagcaagagattctttattctccgctccacaaatttcgaattaccccgcactttaacaactagaattcggttacgtatacgtaataaaattcgaatgaggcgccacatcgactggccccacgcattctccgttttcgcagtgggcgacccaaaaggggcggcacatgaagatgatgatgtcaacctcggactggagtccacagaggaaagccacaccaaactgtgtcaccctcttttgtgtttatttgtttcacaaacaaagtttccttttcggtggaaaatatgaccccatgaaaggtcaactgaagtcaaaactgatggagttacttcccctttatttacagccataaatgagcagcaccagaagcatcacctgcagtgctggcactgtagctcggacacaattggggcggaggacttctgcgacgtgaccttccaggaggacaacattcccactgacctgatcaaggagcggaatataaatctgctaaggagctgcaacggcaccattaactccgatcacgagagggccgtttgccgcaagaccgtggaggaaagtgagtaatcagaccgaggcacttccgcatacacattgaaagcaatcttaacaaattccagataatggcaagctgatcaccaagcgattctgctactacaccaacaaatcagatcccgtggagctgtgcaacatcaccagtccggagaagaacgtgcggcggatattctgcgaggactgcctcaccgatcgctgcaacggagccttagcaggtgcatccattttggagatgctgctgctcctgcccatcgcgggcctcatccaacagtttgccatctaagcaaaagatccccaggtcgattttcagttggaacgtgatattttgcctggctctcgggccgagctgttgctgatttacatttgcgtttagctcgaattaacttagtttcggggacacttgccccccactcattagcttacattcaaatggaagtttagggttcgattataggtttatagtttgcctggccgagtgccgatgtttgccaagctcaaagctcaaattccgaatgaaatccaattcaaacatttaccaaacaacacaataccataacgaaagaaattataaatagatgaaacaataatcagtagagattaaacccccaagcacagtaaatactcacttattagtctatgtacaacatgatattttaatgtaaagaacacaagccctcacctatgtaattatctcagaagctagacaaacagaaacacacacttaaaatcaaagtattaaagcactcgaatatacaaaaccgaatcaccgaataaagttcgcacataaatgggttggacttagaggaatttcagaaggtctataattgcgtcaacaagtcgttgttttgtgttttgatccaaccccggatagaactcctcaatttggatactttgccagagtttagccatgtatccgctgaattcttggctatttttttcaccactcttatatcgctcgtaaagcatcaactcggcttcgaccattgcagcataggactctcgattgccgatatacagctggtagagaagcgcagccagcctggtggatctctccagggtgtacgtccgacgaatcactgccttcaggatccttgtcagttggtctggcttaaacacacagtggagtttacgggaatgctgtcctatagccaactgccacttgcccagctcatgatcctcggattgcaatgcttgctggaacagatcagagcagttgagggtctccagatgctcgcggatctgttcgcggatgagataaccctgcaggtgatgacgaactgtca

SEQ ID NO: 2282 - DNA, 642 bp, DROSOPHILA
ctgcatcgcgcgcactctcgaagcgatttgaagcccatccatccaaccctcggaggacctagtattcgccacccagcagaggcgccaccaagtcgcgttccgcatcccccaaaagattcgcattaacattccaaggaagccatgtcagcggtgccgatgaaagcctttctggctggtctcttcttgctggccaatgcctggcacatcacagccataaatgagcagcaccagaagcatcacctgcagtgctggcactgtagctcggacacaattggggcggaggacttctgcgacgtgaccttccaggaggacaacattcccactgacctgatcaaggagcggaatataaatctgctaaggagctgcaacggcaccattaactccgatcacgagagggccgtttgccgcaagaccgtggaggaaaataatggcaagctgatcaccaagcgattctgctactacaccaacaaatcagatcccgtggagctgtgcaacatcaccagtccggagaagaacgtgcggcggatattctgcgaggactgcctcaccgatcgctgcaacggagccttagcaggtgcatccattttggagatgctgctgctcctgcccatcgcgggcctcatccaacagtttgccatctaa

SEQ ID NO: 2283 - protein, 166 aa, DROSOPHILA
MSAVPMKAFLAGLFLLANAWHITAINEQHQKHHLQCWHCSSDTIGAEDFCDVTFQEDNIPTDLIKERNINLLRSCNGTINSDHERAVCRKTVEENNGKLITKRFCYYTNKSDPVELCNITSPEKNVRRIFCEDCLTDRCNGALAGASILEMLLLLPIAGLIQQFAI

SEQ ID NO: 2284 - DNA, 3836 bp, DROSOPHILA
taataccatcaaaactgtcaatgtgtaagccaacaccaccagacgggtcttccaaagagccagtcccgtggagagctactgttttgcttcctgtttaccacaatgacgggaaacactaatccgaaatacatagaagttgaatccaattagacaacctccgtacgagacaatggaaccctcacagttatcctgttgtccttgttcctcacagttccaacacagccttccgttcagccattctgagccccatgtctgcccagccggccacatctaattaaatttatgcaaattattggccgtccttgttgattagtgacaccccatctcatccgtgcctcattaggtttcgatcgtgctcaatgagattaggggccaaaagaatgtttgtcagccttgccaacgtaaaatcgttctacttttggtgacatacttttgggcggatgctgaaatggctagcatgagttagctatcctctagaagcactcaattgtctggggtataataatcattcgccactttgtactgattccacaaatagacgtgtagtttctgtcactttagagaacgaatgttaatgatgaatctacttctgactcattacacgcccagatcattctcaaagatgtagtatatttaaaggtaagatacatttcaataacaagtaaatgtgaaaatacaaagctgtgagaatatttattttttttacaatattaatatgcctgcatataaaggcaatgcatatgaaacaaacaactgacgtcacatccaaaataaaaaaaaacaagtaagaaaccgaaatcatagcttacaaccggttttcttgggcgtagaaacaataatagaaacaagcaccaaattccactcaaaacaaaaacagagaacgcattttgagacccaaactttgagtcgatttcattatttcagagggattttgctgctggagctgcgctattgccgttgttacaaccaccaacgccacacaatttcagacgtgcagcagacatcgttgacggcggttgataatcgtgcctgactttaaaaaaaaaaatcgttttcgaaaagcaattcccacactcgaagtattcgcgaaaatggtgtccgctctgaaatgcagtttggccgtggccgttatgatcagtctggcttgttcgggtgcgttggttgcgaaagtgttgggctgtggaaaatttgtatttaacggagtgctcaaggagagccagctgacggaaaactaagaaaatttattaagacaaatttctaacggctattatatgtagaaccgttctattaaacatttttttctatttatacatttttttcttcgatccttttttttatacaaatattagcagaaatgttagatttaaaataattacaaatattgtttatcacctaactgaagtctattcctgggaccgaccaaagctcctttcttcttgtccttcaaagttctttagactgtgattatattaaaggcgttttatatctgtagtattttatccatatacttaatacatatttaatccatgcctatatcccatagcctacgccatcaagtgctaccagtgcgagtccctcacaatgcccaagtgtggcctgaagttcgaggctgatgagacgttgctgctggactgctccaggatcggacccccacgctacctgcagaacttcttccccctgcggaacgccactggttgcatgaagaagaccctcgaaagcggtgagttcacagtccctaggactatcatattgtagtactataacatataggaagaaaacacaatcttaagatttcataaatcagcaaaactgagaagaaaactctatgattcctccattattaagctagaaatagcgcaattaagcaatacaagcccctgagatcatcgcagaaaatcgggttgtattagtctctgatgtcatgcgtgaatatttcgctacctgattttcagacgttacttttttccctttcgacgtgatttctagtcacttttatttgcgtcttattttccagcaattacatcaaattgagagcttaattcgttttctcgtaaaaataataatgacagggacgagagagaatgccgcaagctccgagctattcgacttatcaaacttagcatttctgaatttatttacaaggcagatcgcccgataaattaatccgtcacaaatattgtgatcgtttttgatcgtttttgaacgccaagccaaatcagcttcgtatctagtcaatttattcagaggaatcaaacaaaaagtttgtagaaaaatacgacatttgagataacagggcaacgaattatgtttcatcgaggtgtgaagcaaattgttgatctttgtttttcttgacaataaactacagtgttttgacttgaataaataagcaattaacaagtatccgaagccaaaggtacaatgggttcattcagcaaccccaaccagagaaagttgttggcccaattgctcatccaaaccaaacaatttgctctcattccagtggccggacatccgcagatcgtgaggagctgctacttcggggacatcaacaatatccaagctggctgccagtcggatccctctatgccgttcgttaagcagctgggctgcgatgtctgcaccaaggacgagtgcaacggatcctcctccctggcccccatcgccggagccatcctgctcttcttcggcgtggctcgtctgctggcctagatcttaactagctagtaaattacctgtgcgtagtatttaacgatcttgttctctggaaatttcttctaaatttgttttaataataaatgcacgacgaatggttgtcatagcaacatgccaaactatatcgcattcttttattaacagctgcagataaacaaacaaacagatagaaaacaaacaaacttactttcttgggaaataacatttcagtgcttctacaaaagcagttgcctgaaagccccccattacccacacatatgtaaatcatccagtacaacaatgcaattaaattaaatttaatacttcgcgtaaaaagaaaacttaccatgacaaatcagctaaatgaaaaagaaacaactgttgattgtttacttttcaacttccctccacccatgtaaatcatcagatgagtaactccccaaacagtgtatttatttttgaacaatagtaattctactaatcgcaatttttacggggactcgccgtaagtagagtcacattgaaactcgaaagcagttcaatgactcagagcagagcagatactgaatccaatgtatgtgaaacacctgggatctaattagtgtgcacccacatgagcaaccaaaatttgtatgatcgtataaaaggtcacttaaatgtgcccctttttaagcgggatgtgggatttatgtccgtctgccttcttaattacgtttaattgagttctgtttcatttgcaagttaagtttcagtaattcttctacccttcggattcgagtttacaaagtgttaaatgcagcccggcagagttcaagaaactccaattgagagatccgagatcacttctgcagatcgaggggctttggaaaactgaaagatgccatggatcttctctccaccccgcgtgccccaattaacccaaactcatttggcatcatttcagaaattacttaattgaagaaaatagaaatttgtgggaaagccacttaactgagtgtgtgtccatgtttgggcaagattaggaaacgaaatacactacacttaatatgcttataaaccaattaactgaagaactttcagcaaggcgttggctgcgtattgaaatttttaaatctatataaatgtataatgaatactaaattaaa

SEQ ID NO: 2285 - DNA, 665 bp, DROSOPHILA
acatcgttgacggcggttgataatcgtgcctgactttaaaaaaaaaaatcgttttcgaaaagcaattcccacactcgaagtattcgcgaaaatggtgtccgctctgaaatgcagtttggccgtggccgttatgatcagtctggcttgttcggcctacgccatcaagtgctaccagtgcgagtccctcacaatgcccaagtgtggcctgaagttcgaggctgatgagacgttgctgctggactgctccaggatcggacccccacgctacctgcagaacttcttccccctgcggaacgccactggttgcatgaagaagaccctcgaaagcgtggccggacatccgcagatcgtgaggagctgctacttcggggacatcaacaatatccaagctggctgccagtcggatccctctatgccgttcgttaagcagctgggctgcgatgtctgcaccaaggacgagtgcaacggatcctcctccctggcccccatcgccggagccatcctgctcttcttcggcgtggctcgtctgctggcctagatcttaactagctagtaaattacctgtgcgtagtatttaacgatcttgttctctggaaatttcttctaaatttgttttaataataaatgcacgacgaatggttgtcatagcaacatgccaaactata

SEQ ID NO: 2286 - protein, 148 aa, DROSOPHILA
MVSALKCSLAVAVMISLACSAYAIKCYQCESLTMPKCGLKFEADETLLLDCSRIGPPRYLQNFFPLRNATGCMKKTLESVAGHPQIVRSCYFGDINNIQAGCQSDPSMPFVKQLGCDVCTKDECNGSSSLAPIAGAILLFFGVARLLA

SEQ ID NO: 2287 - DNA, 3982 bp, DROSOPHILA
tatgatcggaatctacaaagaatgctgcattgcaagttgcaatttgcaaccatctgaatggaattaatgcaccctctccaaggataacttgctaaaaatacattaacaaacttgcaatagaaaataactgaagctgtgaatatttgtcaatatgaatatagcaaaatcaaagggagcgagtaacacgataaataagtcaagtccaataggggacagctcagagtgttgttaattgctgaaattagcaaaacaatgaaaatgagtaacgtatccgaatgtatttcaaactgcgcattttgctaaaaagggcaacggatttacttgaagtcaataattccagagattcgaagaacctctttgacatgcagagcccataagaacttttttttggcaattccgggagcgccgaaactgagttcatcatagtgccaaaataaaacaaacataaataatttacaaaaacggctgacatcaccctaaacaagtccgaaaaaatgcttgatatttatgtatgcatgcgtctcgtttgtgtgtcaaatgatgggaaaaaaacattgcggcagcttttatacaaattcaacgagagagaacggtatcgtcgagttcctcgattatcagttacccagtactcagacaaataatacagttaaaacatttttaagagcgagttgtcgttctgtgggtatggtagaatttcgttctagaattttcaacctaacatttgcagtttatttagttccctataaatccccgagcagttgctagtgatcgtgatcggatatactggctcctatctgttacatacgttccatcgaatctagtacaccctttcactgtacgagtaatgggtatacaaacacagaattgaaacacgcaacgtacacacgtttacttcgagtggaagcttgatttcgagtgagtggaaaatactgagtgaaaaaattggaagcggactgaacgctttcgctttggacgccagcatgaatcttacaaacgctcgccaactgccgtgcagtcaaggtttgctttaagtaattttccaaaaaagtagtttcaatccctgaaaatggtgtcgagtgtaaaaatgatcttggctctcaccgtcttggccaccgtagcctgcactggtatgaaagttaccggaattaccaatccggagtaatctacacattctacgatttctaggctacgccatcaagtgctatcagtgcgattccttgactaattccgagtgtggaaaggacatcaagtcagacagtagcctcgttttggattgcaccaagatggctccacctcgattcctccagaacttcttcccggttcgcaacgccaccggttgcatgaagcagaccatcgacagtaagtaatctggtggggatcggccatagccatgatctcatcgtatcgattgcccacgcgaaaccatccccatttaagcaatttaggttgataaattaactgggtcttagtgctcacaatgagaataattgagttttcactcttacctgaaaatatgattgattctaaagcaacgaaataacaagaaatatttgttcaaaacaaattaattaatagaatatacctctgacacttcttaatgaaagagaatgagagaatctaggcgtttagcatcgaaatatatttagaactgttcaagatcagcgacttgctattggaattaaatatatatatgcatatcgtgtgtagaccatggaaggaaccacatatgatgaatggggcatactcataaatatgagaagaaggttcagataaggtagactgtactgactatcttacatgtataaaaacaatatctattgtatatatgtacttcctcatttattatactataatgataaagtgcgtttgctcacaggcaagtgcgttaatctcacaacggagattagtcgctgtcccacagcaatatgtgcccttcattaaaaatgcatcatgacaatggacataaacgcagcagtacctttttaagtgatttgttcacaatttacttgattgtccagcgattcccaagcataaatactccctagggctatatggtattgagaataattggaccccattcacttttgctacggaattatttatgttcggtgaccgcaacatcgcctcagtcaattgtttgctaattacattaacattcgaccacgtcttgcgttttattgaatacatcatcgtcagttttaattaaacaccagacaattggcatcccattcagctcaaaagttcgtcacatctatattagaactttaaatgtgttctaccttttgtgagatatacatagggaattaataataattatggatttattttaatgattacaatttgtaatttttggatttaaatatcattgtccgaatgtaaaaacctgaatagtctgaccaaaaaaatattatttatttaaaggaaacacacttaaagtcagaatatactttatagtttgaaaaagctgcatacaaatagaattgagtatcagagaaagtctaaaaatgagaatttttgaatatttctctatacatttatctccgaacacattagaacacacagcacgctttaatgtcgtaatttctgaatctaattgccgaatatatgatttgaatttataatatatcaaaaagaataacaaccgacaaagcatttccatttacacttaaccaaataatttgtaccaacttctaaaatgtttacttgcagttcccggtaacccgcaaatcgtgaggtcctgctactttggcaacatcgccgacacgaaggttggatgccagaccgatcccagcctgacgatcaacaagttgctgagctgcgaggtttgcaccgaggacgagtgcaacggaacctcctccctggcccccatcgccggagtcatactcctgttctttggcctggcccgtctgctagcctgaacgaggagcagtttgtagtaccgctgagctatcccaaacatatcgaacttgctgttgggaagccagacccatggagctgctttagtcacctttgaatctcttgtaattgttacacccttttaaactgttttcgcccacattaaatgtcgctttatttatgtgaagatattttatggttattcgtagattaattgctagctttaactgatagccttccagttgggcaagcagaaaatccatgcgtgtctggcacacttcaagaactggccccatccaatctacgtctcttctgcagggctctctatatgctgggctgacgattatacgaacagacggaaaagcggaaaagttctctctgtgattttactcgcttcgaccatacactcccagttttccttttccatttccatttcccacagggtcgctataagttcggcgcgtcaagtctccacccgctaaatgttcattaaatttagacaaattaaaacgctgagcgatgacgccaggcgaaatggccataaaatgttttcaccacagaaaaaagagagcgataaacggaaaagagaaaaacggcaaggagttgaatttggaaaatgcttttggcattcttttagttcgatttcgtgtgcggacgtcgactgacagacggctccaagaatttagccgggaaatcggggaaaatcaaaaaacaaaactgagggaaaattggcaacgcgtgtttacatttttatttcctacgtgctgagacccaaataaatataaaataaaagtcatttatatagttgaaaacacacatttatttatattcaaaatatatactatatttgcttatacaaaacatacagttttgtatgttcaaacctcgtgcggatcgtttcaattgcgccgagcagagctataaataagcccgccacttgaattattttccataaaaccatcaaatacaacaaattccaatcaccagcgagaaaggtggcaaaccgattttcctcccatcaacaatgcagcattatttacttttgtttggcgcgctcatctcgctactggcctcaggtttgtttttg

SEQ ID NO: 2288 - DNA, 574 bp, DROSOPHILA
ccaactgccgtgcagtcaaggtttgctttaagtaattttccaaaaaagtagtttcaatccctgaaaatggtgtcgagtgtaaaaatgatcttggctctcaccgtcttggccaccgtagcctgcactggctacgccatcaagtgctatcagtgcgattccttgactaattccgagtgtggaaaggacatcaagtcagacagtagcctcgttttggattgcaccaagatggctccacctcgattcctccagaacttcttcccggttcgcaacgccaccggttgcatgaagcagaccatcgacattcccggtaacccgcaaatcgtgaggtcctgctactttggcaacatcgccgacacgaaggttggatgccagaccgatcccagcctgacgatcaacaagttgctgagctgcgaggtttgcaccgaggacgagtgcaacggaacctcctccctggcccccatcgccggagtcatactcctgttctttggcctggcccgtctgctagcctgaacgaggagcagtttgtagtaccgctgagctatcccaaacatatcgaacttgctgttgggaagcc

SEQ ID NO: 2289 - protein, 147 aa, DROSOPHILA
MVSSVKMILALTVLATVACTGYAIKCYQCDSLTNSECGKDIKSDSSLVLDCTKMAPPRFLQNFFPVRNATGCMKQTIDIPGNPQIVRSCYFGNIADTKVGCQTDPSLTINKLLSCEVCTEDECNGTSSLAPIAGVILLFFGLARLLA

SEQ ID NO: 2290 - DNA, 2459 bp, DROSOPHILA
ttcctatggacggatagccgtgcaggctcaacagttggataagcgggcccagatatggcagaatttgctcaacggccgcaatgagcagttggagcgccgtttagctcgggacatttcactcccatatcctcctgcaatagatgcccgcatgcgcatttcgaaaagttatcaagttatcaaccatatgcgcacttggcgtttcggctaaggtcagcaaattagaatttggtcgaatttgtttgtatatcaatatggtcactaaagatgctgctgtgatattttaccttgcttttggatatatatacatttctttggatagcatctacctggactgagacgttctactgtcatagtgattctgatgtcgtatgacttctatattaactttaaattaatcgagtgcaacgcatgtcgagattaataaataacatatcaacaacaaaacacaaactttgacttacctccgcgctgcccgaattgcaaacaaagagaatgatgttatccagccctctagtgtagtggaactgcttgtgcgtctgcttgctatatgtttgaccactgcttgcacagcgcacatgtatgttcgaaccatgttcgaaccatgttcgatggtagctcagtagcttagtgtagctcttctgtgcgaagcattttatttttcgtttgcccgtcgaagaaggcgaagcgaagagaaaatatctgccgcttcgaacgcacgctatcaatgtctaattctttacgtaataatcatttttttttttgctgtgtgactgaaacgaagaaatatacgagcaaaagtgaaaaatacgtggactacctgttgatccaaagatctcaacggatttagtgtgtgtgtgtgtgtgtgcgtgcgtgttttttttcggttcattgttttgtttgcaatagtgcaaaggaaaaagtaatcactttgccgtgttcggtgcacgtgcacgaaatatttataaaatatatattaaaaaaaaaaaacataaaattaacgatgttggagctaccgtttaccaccatacggcccaactgccggctaagacagaatcttggtattctgataatcctgcaatgcgttctcacttgctacaatttcaacctagaacagcgattgcccattgtgaagtacggacatccgcattcgcatttcggctactcggtggccacccacactattggcgaggccaatgggcccaacaagaccaacgtggagacgcgggcctatccggagttaaggaaccaacagcgcgacacatcgataccgtggctgattatcatcctgggcatcgttggtggcctgctcctccttgcgctggtcacctatgtgctgtggaaggtaggcttctttaagcgcatccgacccaccgatccgacgttaagcggcaatctggagaaaatgaacgaggagaagcccttcctggcgccatcaaagaatacgcatcacgttttctaacaagagggcaccgttggctgggatttggtgcgccgtcggaggcgtcgacgtcgtctaaagctgcgacttcctgttaccgctcagccacgacatggttggcgaaaaactacggataagtccattaacaacaataataacaacaatcacaacaacaacagcagcaacagtagaaacgacagcgatgtggacgtactttcgctgacaccaccgccgccccctcttagcatctttagctggggaaacgatggctattaccaagccagcgcagcctggtggggtcaccacatgtgatcaaatgggtcaccgtggatcaagtgggtcatgtgggttgtggttcaatgtgccatttcacttacttaatacaaatgggttaagttcagttcggtggatgcgatcggatggaattgatagcccggattccgtcactggaatcagctaaatataaattcaagttcaatcctaattcccttaaagtaaaaagtatatttagacaaccccttttcctaatggtgcttttaaaacatctgcaactaattaaagaatgctaaacacttaagaattagacccaacaaaacaaaacaaaaaataatgctggggattgccttttgattgtaatgtcttgaaacccaaaaaaaatataaagaacctactttatatctagctgatgtcagtactgagcttagatttaaagatttagctaagcccaaaacgttgataatctttgtgaaaaatgttattgtcatatatagatttaagccttacaggctaagttgtagggaacgacgagaaaattccgaatatagaatatatacttaaccactgccaacaacaaattaaaagtgcctcgaaatcgaatcgaaagtccaatttaccggacacgagttaggatcaaaagaaaataattaaataaaaaaaaaagaaatcgaaagtattagcactaacttaatgcattactataaataatccacgcaactaaatttagcacacaccagcaagaata

SEQ ID NO: 2291 - DNA, 3318 bp, DROSOPHILA
atgttggagctaccgtttaccaccatacggcccaactgccggctaagacagaatcttggtattctgataatcctgcaatgcgttctcacttgctacaatttcaacctagaacagcgattgcccattgtgaagtacggacatccgcattcgcatttcggctactcggtggccacccacactattggcgaggccaatgggcccaacaagaccaaccgctcagacttcgacagcgaaatcctttcaccgcccggcaatgacgaaatcaaggaggatcaatggatgggcgttacggtgcgttcgaatcccctacaggccaacggatccggcggaaaggtaatcgtctgcgcccatcgctatatgtacatcgtccgagagaatcgttatggacagggtctctgctatctcctaacgaacgatctgcaattcgaagaggtccacgagccctgcaaaggacgacctgtgcaaaggcaacacgaagattatggactgtgccaggcgggcacatcggctgccctactggacgatgacaccatggtgttgggttcccctggaccgtacacatggcgcggatccatttgggtgactcaggtgggcggggagtacctgcagcgcgacaagacgacctactacagtgatcattcggacttgaattcgccggtggacaagtacagctatcttggtatgtcggtgaccggtggcagattctttggtcacatgtcatatgcggctggagctccacgatccgagggtcatggacaggtggtgattttcgacaagtccaccgataatccaataccggtgcactcgatcctggatggtgagcaattcggttcgagttttggctatgaactggcaaccgccgatataaacggagatcacaggccggatttaatagtggcagctcctttgtacttcacaaaaacggaaggtggagctgtgtatgtgtaccagaatatccaggatacgttgcccatgaagtacacactcaagttgacgggacctctggagagtcgtttcggtctggcgttggccaatatcggagatctgaacaaggataactgcgaggatctggccgtgggagcaccatacgagggcaacggcgtagtctacatctacttgggctcgagtcagggcctgaattccaagcccgcccagaagatccaggcctcggaactgggtggaaccatacccaatggtcaaccgattcgtacctttggcatctctatatccggcaacacggacttggatgataactcctatccggatgtggtaatcggagcattcaactcctcggcagccgtaatcctgctggccagacctatcatcagcattcagacgagtgtacagcgcaaggagctgcataacatggatcccaatacgcccggctgtttggacgatccggccagtaatctaacatgtttcacgttcagagcatgttgcagcattgaaccgtacgatgagaagaacaaggaactccggttggcttatagcgtcgaagcggaaaccttcgatcacctaaagaaattctctcgcgtcttcttcttcgatcgggaaaataagcggacgaatgtgctcagtcgcgtggtgagagtgcatacgaatggaaggacagaatgccaggcagtcacgggctacatcaaggccaatacccgggatatccagactcccgtgcgtttccgcttgaagtactcgctggtggaacccccattggcggattctgctttggtacgcctcaatccgatattggatcagacccaggcgcatgtcgatttcgagggcaccttccagaaagactgtggcgatgacgatctctgtgagagcaatctgattatccgggtggagccgaacatcactgagtcctcaggcaacgaatacacactgattctggatgaaacggaactggaggtccgcatcaatgttagcaatctggcggattctgcttacgaagctcaactattcatcgcccatcaggcgggtgtttcatatgtggcaaccaagaagccgacgaatgccacgtgcaatagctacaataccaccctggttgcctgcagtcttggtaatcccatgctgcgcgacaccaccacatttgtgaccatccgattccagcccaaaggattggagccaagtgagaagatcatgctattccacatattcgcaaataccacctccaagctggtgggacccgaacgtcccgagcgggatcttcgcgtgaatgtggtgcgtcgggcgaagctcaacttccgaggttgggccatacccgagcagagtttctacagtggatcgagtgtggctaattcggttgcaaatactgccgccaccgatatagaaggacatggtccgatgggtatggacgatgtgggctcccaagttcatcacatgttcaccattttcaatgagggaccatccacggcgccgaaggtacaaatggtcatccattggccatactcactgtacagtgatccacagagcggtcgaccggttcagtatctactctatctggagcaagtacccactgtggaagttagccagggcgaatgccatgtggccaaagaatatgtcaatccgctgaatttggccagcggttctagggaaaatccagcctacttgagtgctcccgcccagatgagaatgttcccctcgcagtcgcgtcattcgttcaacaagagcttgatccactcgcagagaagctactactccagcagccaccgggatgatcattcggatgacactcaatcgaaccgcaatcgtgtccgtcgcagtttcctagaacgggtgacgcgcctggagaggttaatgtacgatcccgagagtagcaatgcggcgaatggcaagaagcaggacatcgtcgagctggactgcaataagggcgcgaccaactgcgtgcgcatcgagtgtgacatcctaaacatgcccgctttgtccgaggcccaggtggtggtcaaggcgcgcctgtggaactcgacgctggtcagtgagtatcctcgggtggaaagggtcaggattttctcgacagccacggctcaaatacccgagagctatggcgtcgaggtgatggatcacaataacatagaggtggagacgcgggcctatccggagttaaggaaccaacagcgcgacacatcgataccgtggctgattatcatcctgggcatcgttggtggcctgctcctccttgcgctggtcacctatgtgctgtggaaggtaggcttctttaagcgcatccgacccaccgatccgacgttaagcggcaatctggagaaaatgaacgaggagaagcccttcctggcgccatcaaagaatacgcatcacgttttctaa

SEQ ID NO: 2292 - protein, 1105 aa, DROSOPHILA
MLELPFTTIRPNCRLRQNLGILIILQCVLTCYNFNLEQRLPIVKYGHPHSHFGYSVATHTIGEANGPNKTNRSDFDSEILSPPGNDEIKEDQWMGVTVRSNPLQANGSGGKVIVCAHRYMYIVRENRYGQGLCYLLTNDLQFEEVHEPCKGRPVQRQHEDYGLCQAGTSAALLDDDTMVLGSPGPYTWRGSIWVTQVGGEYLQRDKTTYYSDHSDLNSPVDKYSYLGMSVTGGRFFGHMSYAAGAPRSEGHGQVVIFDKSTDNPIPVHSILDGEQFGSSFGYELATADINGDHRPDLIVAAPLYFTKTEGGAVYVYQNIQDTLPMKYTLKLTGPLESRFGLALANIGDLNKDNCEDLAVGAPYEGNGVVYIYLGSSQGLNSKPAQKIQASELGGTIPNGQPIRTFGISISGNTDLDDNSYPDVVIGAFNSSAAVILLARPIISIQTSVQRKELHNMDPNTPGCLDDPASNLTCFTFRACCSIEPYDEKNKELRLAYSVEAETFDHLKKFSRVFFFDRENKRTNVLSRVVRVHTNGRTECQAVTGYIKANTRDIQTPVRFRLKYSLVEPPLADSALVRLNPILDQTQAHVDFEGTFQKDCGDDDLCESNLIIRVEPNITESSGNEYTLILDETELEVRINVSNLADSAYEAQLFIAHQAGVSYVATKKPTNATCNSYNTTLVACSLGNPMLRDTTTFVTIRFQPKGLEPSEKIMLFHIFANTTSKLVGPERPERDLRVNVVRRAKLNFRGWAIPEQSFYSGSSVANSVANTAATDIEGHGPMGMDDVGSQVHHMFTIFNEGPSTAPKVQMVIHWPYSLYSDPQSGRPVQYLLYLEQVPTVEVSQGECHVAKEYVNPLNLASGSRENPAYLSAPAQMRMFPSQSRHSFNKSLIHSQRSYYSSSHRDDHSDDTQSNRNRVRRSFLERVTRLERLMYDPESSNAANGKKQDIVELDCNKGATNCVRIECDILNMPALSEAQVVVKARLWNSTLVSEYPRVERVRIFSTATAQIPESYGVEVMDHNNIEVETRAYPELRNQQRDTSIPWLIIILGIVGGLLLLALVTYVLWKVGFFKRIRPTDPTLSGNLEKMNEEKPFLAPSKNTHHVF

SEQ ID NO: 2293 - DNA, 7336 bp, DROSOPHILA
taataaaagaatggtagcttaagatacctgattgatttgtttttacattttaaaagtaacccgtcaatacacatttgaatgcactttaactaatgaacgcaagagcaaaatacttataggtgtaaaaataatatttaacgtgctaaacatttgaaatgtggctttcatttgttaaacgttgttgtttgtcatacctatgtgattatggtgtacttccttaatttcgtttttattcctaatctaaactagtaatcttgatgatatttatattacgtgaccttaaattctgtatgttcgtattaggtttttgttgccggaatgaaaaaagtacacatacttcaccttaagatttaaattgaggagtgtgatttttcaaatcacttgcagtattgttattccgagaatactttgttttattaaaactgtacatttaaatgtgttggatttatgggagaagtcaaaaaaaataattataaaaagtcgtctagacagtagaattcaaagaaatataaccagattttctagcttcgccgagttgcaaaagatattctaatattagcttaggcgccatgtttatcaatactaagtaggtatacgatttattagctttagtttgagtgttccttatatataaatttcttattgaggaaatcagtatatttatagacggagctgcagtaaattcaaaaataaagtacattagctatgcaaaacgattgcacttgtgcaactctttcgagtaccaaatgcagagaccctccgcattttccaccccacccaacccactttcccatttcccatttcccattttctcaccaaagagcagaaggcaggccaaccaactgtaaacgtaaacaacgtccactgcgcaggacagtattgaattgaatccgaatctttatccgattccgaatccggtggacagctgtgcgtcggaatcgggcgaaagctgtttgggcggcggaggaaaagcttcaagtgaacattcagtggattgcggccaatttaagcgagcggttacgcgttacctgtgcacttcccccatattttaccaggttacgtgtcaagagcagaagttacctctcaagcgtgttggctaattaagggctaaagctcaagtgctgaagtgttggagtatctaatataaattttaataaaagatcactacaaaatggcagtcattgttggccaagttctgccacaagatgagcagcaaatcacattttgaacctggccgattgctagctgagtgaaaaccacagtaacctttgctacaacaacgacaatgtcgagtggcaggtaggattctctagcccatatccattcatacaataaatacatttggcctatactcgacagccatttcgaccatatctggcagttgttatggctgatatttgtcatgtaatcaataaattgatttttgattggcatgtgtgtgggtattcttcctcgttcttggtctcctcgttttagtttttctgttgtcttctgactggtatttgctttcctttcgttcttcctctggcggcgtcgcactgactggctttttcgctgcgatttaccttggcccattcaagtgcccgaccactgtgcgtatacttgatatattcaagctgtgcatgaattctaattctatgaagatacggagacaaacagagacacaaggacataggaaaaaaatcttgtttatttagttatgtattcaaatatcattcttgggagctcaacaagttcgatacgaacggataattttacatatacaagaaacaactataaacaaacctaagtgtaccgcaaagtgtaccttgactgttttaaagcatctcattctctaagctgggtcaaagattcgttcggaaaatgtggaaaattagattcacgaaaaagtgtcccccactattatttcactcccagcttagcaaggccaaagctagaaacctgatagcccgccagcagctggccatgtaattaggataatcgagctgcttaaaatatgcacacagagtacacataattacaagcagcagaaaattggcctgggaaagggaggaaaatagaagcttcaataccaatggcgtaaggggatatccccaaaaaacaggctatgactcatggcatccgagaggaggcaaagccaccagagcctcagagcaaacaggcgcgatctcctttcaccactctttccctgtttgttcttgcactgcaaccacatataattgaaaattgcttgatgaaatgtttatttaaatgttgactgggaaaatatgtttattaatttcccattaaaattaaaatagataaaaatgatttaaaaaaatatatatttttcttaccttccttatgaaagaattttttgtgctgtaatccctcccaatgtcagtttggcgccaaaaactgtgcttgtaagcgtggttgtggttacttaaagttgtatggatttccgttcgtgtttctgtgggtgtctaaccacagaagtcatatcccgtcaaaggtgactgagtccttagttccactccgtcatgtaggcaaatgcaccttcgcaagtaaaatcagtcgaaaaagttaagtcaaaccatactcatttttgccagtatattgaagccaatggtattattatgggctttgcgaactttgatctaaaaataatgttttgcgcatgattaatcccttcaattaaaagtaagtgtgcaattaagtcttcataaatgctcagataaagttccgagtaaaaatgtcattaaaagacttccaaaaccatttagtattctgaccgcatatatatttaattatacacatcttttcgctacgattcttaagccaacataaaagtataaggaaatgagcagtctaatttgcacaattttgtattcattacgccagttcctcgcaggcaatttaatttaacttgcccccgtgcgtcctttgaattatccttgcagcctgctggacgtgctctgcagcggcagtggcgcccgtttggccctcggagcctcggtaatctcctatctgattgtctacaacgaggcttccgctcccagcctgctggttggcgttgtcttggccaccgtttatggcgcaatggcaggtgggagttaggtggaatacttgtaaatattccaaagtaagttaattctttgttccagcccgctgtaaaactagcctccgcagcctgcaaatgccgtatgtgcgggccacaaataaattcgactttagctgtttgtttctggccatctggctagatgctctggccaccgtgtgtgcctgcgctgccctggcgaggaccctcagtgcctgcttggacgccatgaccggaggtctggccaggattctcatattgggtgagtggtaacagatgcttgtaaataaagtagcacaatacattggttcaaggaataacaaaaccattagaaatacgagatacgacctaattagcaaactattatacatacatacttataagtaaagccacttcttcgaaaataattaagtaccatatggtgctctaagaaacaaacagaactgtaattattaaatatatattaatttcgtttttgtcataaaataataaacttgatgtatattatcatatcgcatatattttgttatgtatgcgtaatattttggcgtgaactgtgctggccgacctgttcaaatattatgttgcctactttcaggccgcaatgcacccgcgaatgagccgtggccggatgttcttggcgtgtcggttgtcttcctcgtcactgggatgttcatgctgggcctggaggtgggtactcctccgaatccgaagccgagtttaaatccaaatccacccacttatcgcgacactcactgcatttgcgtattcacagcactcgagggccttcagcctcatcctgactcttggcatgtttggcttgaacgccattttaagcgccgtcggctggtggcggggcgacatgttggcctggtctgcggatagctacttccagcccgatggcattagcagtgtaagtggccgtagacgttagaccccataccaactggaacttcgatagtgggtcagtgcactgtgccagtctgagctttgttttttttttttttgtttgccaagtcccatcgattttcgctgtcgtgaccgggaacatttgcgtgaccgcagctgaatccacaggatacgggcttttgattatgacacgtactgctgcgtttcgtttttgtttttttttggcctcctttcactggtattcgttcgcggaaagccgccagtcagacagcaaaaacatggaaaattttttggcgcttagtttgccggagttggtaatacttagagtattcgtaataaaagagctttgatttaaatacagcataatgtattactttttaagttattcagtccagtaatttaaaaatttgtagtgccttttatagaccaaaaaaatcatagagaaatcaaaaaatttcatagagaagtcaatttatacactagcaaccagcattggtggggaaagtctgctgctatttgcaaaattatccgtctgataactagttcaaaccaccacactcaggtcttcctgggtactgccctgctcacctactccttccccggcgattggccccaacaacttcgaggtggacgattcacggcgactctaattacgggattggtcagtacttcgctgctgctgacggccatttgtctgtcgacggtggtgcattataggtgagtctgacaatgcgataataatggaaaaagacatattgtacaactgttatcggctactgtacaaatgttttgtgaacttgtactagagatatccttaatgatgatgtatatttaaaccaatagcgtggcttgacatacatacatacattttatgtgttctttcagatctcaggaggactatgtagccgtgcccttgttcaacattctggatgaaaacggcttccataagttggttcctgcctcggcttgcatgttgcttttgacgagttcggcggcatttctggagctctttccggaactatatggtattgttgtgcgactggccacctcggagtggagaatactgtccaagcagatcagttatgagagctcggagagtggtaaccccgtgctggctgtgttcatcgccggcagcatgtgtgccatgttggccttcgcctgtccactacagcatctcagttacacattagccgctggccacatgggtggggtattcctgagggccctttacctcctatacatcccttacagacccaaatatatggcgcccagcagcgagtcttcactgtcgtacagtcgcctatccacagcaccgtttgccaagagcagcagctacagcagtgccgcaacttccagttcgagtcgcttaaagagaagtctctggaagatcggtctgcccaagcacagtaacttaaaaaagccgaagaccaagcccaggaacaaacaagagctggaaaaggagtggctgctcctgggtgaacccacctcgccctgtcctcaacgagagggcagggatgtggagtccaccattctttccgatggcgagccaccggtaagtgatttctgtgcttaattaagtttattaagggtaaatgtcaattaaaaatatatattctgacattttgcatgaagccatctgactttgagtacccagataaatttgacaaaagtgactcggacacctccaccgacattgatgccattgtggatgagtatcgtgaaaagattaaggtaagaactctccatgaatacacgtaaatatagacactacatgtaatcatcctccaactctccaggtaaccaccgccggacctttggagcgcagtgtgcgagtgcctacggtgagttcctggcgcgtgaccattttcgccattgtggtgattggattgggcattgccctatgcattgccgggctcatgatgcactgggctccggcagcgttgaccggagggattggggttcttatcgtgaccattatgatgggttttatacccaaatacacgggcagtgtgatcaacgtgagtcccgtgatctgtggaatgtcgctgctgatgggcgtgatcctattcagtggctgtgctatacattcctggccgggattgcttatctggctgatggctggactcattctggtgatcagatgcgataaatactgttgcaattgttttgagcacaccaccataatgaatgcccagctgatacctagtgtctcgggaaagagcaacatggggtcagcgtcgggatcggcatcaaatttagcgggtccctccaccagcatccggatacccagaccgcccaagggaatgggcgtagtcggcttgccacagcgcatcaacgagcacagatgacagtcggagtcctcggaggaggaaggcgaagacctgttccacgaggacttcaatgtgcgcgactttgacgaggaggatgacgaagattgctggactgattagcttgcgccttttaaaatccgtttagaaaactatttaattgctatgcggatccccaggacgatccagcttcgagccacatatgcctgaaattttctagctagctaaattgattgtcgaaatttacttatgtatttacaaatatatagctaggcgactctctgtacaactaagttcagaataaattaaatttttcaaaacgaaaatgtataatcaatcgttacatcattttacattgtaagagtttcgtagctgcatagaatgttatctgccatctaaatatataaattctcattctccatgaggtaatccaccagttccctgataggcgtcataatggtctcctcgtaaccaggttgaatctcgattaccctgagtaataactcactccgatcgcagttgaggtaatagtcaaacttctccggttcttcggatcgttatctatttgaaatactgggtgacatttttgtctgaggttcggtgagagcccaaataacaagggctgccaatcgagttctttggcactcttttctaaagttattttctgttatgagattcttgtccaaacccagacgatccaggtgatgctgtagattcttataatagtgctcgagacactcatcataaatcgcccttctgacttcagcggaggctacaatatagagtaggaataaaacatctaaggtgggagaacaatactgggtgagttgaaaatctacaatgcagcaggcattaggtaatactgaagattccttgttgaaatagtacacaatattatgatcccaagtgtctcgatgacagagtacatttcttatagtctttgagggggcgaccagttcttcagccttggttagaagattgtagagcttatcttgaataaagttctgagctttcattgttt

SEQ ID NO: 2294 - DNA, 2280 bp, DROSOPHILA
ccaatttaagcgagcggttacgcgttacctgtgcacttcccccatattttaccaggttacgtgtcaagagcagaagttacctctcaagcgtgttggctaattaagggctaaagctcaagtgctgaagtgttggagtatctaatataaattttaataaaagatcactacaaaatggcagtcattgttggccaagttctgccacaagatgagcagcaaatcacattttgaacctggccgattgctagctgagtgaaaaccacagtaacctttgctacaacaacgacaatgtcgagtggcagcctgctggacgtgctctgcagcggcagtggcgcccgtttggccctcggagcctcggtaatctcctatctgattgtctacaacgaggcttccgctcccagcctgctggttggcgttgtcttggccaccgtttatggcgcaatggcagcccgctgtaaaactagcctccgcagcctgcaaatgccgtatgtgcgggccacaaataaattcgactttagctgtttgtttctggccatctggctagatgctctggccaccgtgtgtgcctgcgctgccctggcgaggaccctcagtgcctgcttggacgccatgaccggaggtctggccaggattctcatattgggccgcaatgcacccgcgaatgagccgtggccggatgttcttggcgtgtcggttgtcttcctcgtcactgggatgttcatgctgggcctggagcactcgagggccttcagcctcatcctgactcttggcatgtttggcttgaacgccattttaagcgccgtcggctggtggcggggcgacatgttggcctggtctgcggatagctacttccagcccgatggcattagcagtgtcttcctgggtactgccctgctcacctactccttccccggcgattggccccaacaacttcgaggtggacgattcacggcgactctaattacgggattggtcagtacttcgctgctgctgacggccatttgtctgtcgacggtggtgcattatagatctcaggaggactatgtagccgtgcccttgttcaacattctggatgaaaacggcttccataagttggttcctgcctcggcttgcatgttgcttttgacgagttcggcggcatttctggagctctttccggaactatatggtattgttgtgcgactggccacctcggagtggagaatactgtccaagcagatcagttatgagagctcggagagtggtaaccccgtgctggctgtgttcatcgccggcagcatgtgtgccatgttggccttcgcctgtccactacagcatctcagttacacattagccgctggccacatgggtggggtattcctgagggccctttacctcctatacatcccttacagacccaaatatatggcgcccagcagcgagtcttcactgtcgtacagtcgcctatccacagcaccgtttgccaagagcagcagctacagcagtgccgcaacttccagttcgagtcgcttaaagagaagtctctggaagatcggtctgcccaagcacagtaacttaaaaaagccgaagaccaagcccaggaacaaacaagagctggaaaaggagtggctgctcctgggtgaacccacctcgccctgtcctcaacgagagggcagggatgtggagtccaccattctttccgatggcgagccaccgccatctgactttgagtacccagataaatttgacaaaagtgactcggacacctccaccgacattgatgccattgtggatgagtatcgtgaaaagattaaggtaaccaccgccggacctttggagcgcagtgtgcgagtgcctacggtgagttcctggcgcgtgaccattttcgccattgtggtgattggattgggcattgccctatgcattgccgggctcatgatgcactgggctccggcagcgttgaccggagggattggggttcttatcgtgaccattatgatgggttttatacccaaatacacgggcagtgtgatcaacgtgagtcccgtgatctgtggaatgtcgctgctgatgggcgtgatcctattcagtggctgtgctatacattcctggccgggattgcttatctggctgatggctggactcattctgctgatacctagtgtctcgggaaagagcaacatggggtcagcgtcgggatcggcatcaaatttagcgggtccctccaccagcatccggatacccagaccgcccaagggaatgggcgtagtcggcttgccacagcgcatcaacgagcacagatga

SEQ ID NO: 2295 - protein, 664 aa, DROSOPHILA
MSSGSLLDVLCSGSGARLALGASVISYLIVYNEASAPSLLVGVVLATVYGAMAARCKTSLRSLQMPYVRATNKFDFSCLFLAIWLDALATVCACAALARTLSACLDAMTGGLARILILGRNAPANEPWPDVLGVSVVFLVTGMFMLGLEHSRAFSLILTLGMFGLNAILSAVGWWRGDMLAWSADSYFQPDGISSVFLGTALLTYSFPGDWPQQLRGGRFTATLITGLVSTSLLLTAICLSTVVHYRSQEDYVAVPLFNILDENGFHKLVPASACMLLLTSSAAFLELFPELYGIVVRLATSEWRILSKQISYESSESGNPVLAVFIAGSMCAMLAFACPLQHLSYTLAAGHMGGVFLRALYLLYIPYRPKYMAPSSESSLSYSRLSTAPFAKSSSYSSAATSSSSRLKRSLWKIGLPKHSNLKKPKTKPRNKQELEKEWLLLGEPTSPCPQREGRDVESTILSDGEPPPSDFEYPDKFDKSDSDTSTDIDAIVDEYREKIKVTTAGPLERSVRVPTVSSWRVTIFAIVVIGLGIALCIAGLMMHWAPAALTGGIGVLIVTIMMGFIPKYTGSVINVSPVICGMSLLMGVILFSGCAIHSWPGLLIWLMAGLILLIPSVSGKSNMGSASGSASNLAGPSTSIRIPRPPKGMGVVGLPQRINEHR

SEQ ID NO: 2296 - DNA, 3269 bp, DROSOPHILA
ctcaacgaagctttaataagcaaccaggaggcgtaccaagaagcaacgagacaaatgacccaaaagatcctctctatccaactggcatccttgtctactataaaccgcgctccatgcaaagtggagttctttagatactcctctataactcggctaaatctcatggcgatggtgtcccgttgaagttcggtcgatgaatgtttatttagaaactattactgaaactttattcctcattaatgaccataatcggctgttcatctcatttgattccctcagctgttgattttcccagacttcaaacacgcaagtgtccaggaatcaaatcaacatttgcctaggcggattaaacactgtttgcccatacaaacagcttatttgaaaaacttaccaaattagctgtataagttatgactcccataaattcgagcaatttgtcgacaactggaaaaaggcgtcggctggcttagaaatgattatcaagtttaataatcatatttaaatgaaataatacaaaaagtgttcaaatgtaagtcgttattagtgaaaaaataaatttaaaatgttcattacataaaatttgccgacaaaggccaacctattatctgtacatataaacatatatgtactaatcatatacatatatgtacaaaatctgtaaataattttacacatcaaaatgagaaatgcttaaaagaacaacttagttacttagttagttagttaattttcacgaaataccttttggtaccatcagctaagcacctgttcgcctcaccaccaaaagctgacccctaatttcacgatccccagtctaggccaaaagcaaacaccccaacttggatttcagctaacgctttcagaggttagattgtacatacttctattgtatatttgctgactttatcttgggacggtttacagcagtaaagattatagccgcacagtgcggatataaaaggttaatgccaccttcggaagtccaacaggtgacttcgagatggcgactgctttggaactgagtccaaccgagattcgcggcctgtgccagcggtactttcatcaagatgtttccaattcggatacggggttcgatatagtcaactatactcttaagcccacctcggatgctccagccggatacttgggcagccacctctacctgcacgtcactctgaagcttcacaattccgaggaggtccggcagctcacattcttctcgaagtcggcgcccgtgggtaatgagtcgcgaatggaatacctagaggattttggagtgttcgaaaaggaaatcgctgtctaccagaacgttctacccgatcttcacaaggcctgtgcagaagtggcgcccaagtgctattacgcggacaagaatctactgatctttgagaacctcgcagatcagggctatcgaatgggtgctggacgggatggtctgctgacctatgagcagctccattgctgtctaaaaaccttggccgccatgcatgctggttccataatccaggaacagagaacgggacaaaaaatagcacagtctcagcctaaatcagtggtggagaatgcctatcccagtgatgtgtcgccggaacatatgaggatggtgaattttcaaaatgcctgtctggtgctcaaggagttcatcaaactaatacccaaatatcagtccaagttggattacgtattggaaaactttacagaaaagatgtcctttatttttgaggccgtcaagacctcggatgtgtaccagaataccatactccatggcgatttgtgggccaataatatcatgttccagtatggcagatatggcgaggttccactgcagtgccgccttgtggacttccagttggccagatatgccccacctgtcctcgatgtcctgaccgttctcaccattcccacttcaaaagagttcagggacgcccatctcagtgaacttctggcggaatactaccggttcatgaccgagttcctgaagcgtgctgacttggatatagcgcgttttattccagaacagactttctatgaatccgtgcaaaagtttcgaagtgttggcctgatcgaaagctgtttgttctgtcacctggttattctaccacctcactgcactcagaaactgaccagttctgtggatggctttaacgactttttcactaataaacgcatagagatttgcctggaggccttcaacacggatgagttgtacagaagtcggctggtcgacatgattgaagactttgtagatcaatttgttataaatgtttagaatggattggatgagttgtttgtacaggagtcgtttggtgaacactattcaagatactgtgactaaaaaatatatgtatatatatatatatatatatatatatatatatatatatatacgttctttttacaaataaaaatgaaagtgaattttcatgttcaactaaacagttatttattttcaaaactttaattataggcctatagtatttgaaagcgaatcccttcaacccctgcctacttagctttttcccatgcttcgttgagtttccgtttcgttttcatttggcctctcattttcagtttcaaaaactttcaagttgtgtccaaaacctgccagacgatctgcggcttcggccagtctctgattgttggttaactcgaattcaaattcagttgccatttggccgcgttcaagtcaacaagtgtcttcggctcttcgaatatcaaaacgggctctcggtcctttgattcaaaatccaaccgaagctgcttttgcgaatatctttattgaattttaacaagcttacaaaatgtgagttgtttaatttagtgcatgtttaattggataaatatggtcaattctatataaaatgtgtttcattatagtgtatcaatgtgatcaaaaaattaccgaaagtaacatcaattatttttagcattattctttcctgcaattggaggattgcacggaaaagatattaacataattttgagatcttaataaatatttcataattttaccgcatcattatttaaaaatttgttgtgcttgtcacccaaaggagcaagaaaactgacacaaactgtccgcacctcaacagaaattataagcaaaaaataaaaacacataaacaacttgacctatcacaagagcaaaagcaactacaacaaagactgacaagcataaaatgtaaaaaataccgaaagacgggagtactcaacacataatttagtttaacggtcacgtttttttaacaaatgcacaaaaatgtccaaga

SEQ ID NO: 2297 - DNA, 1269 bp, DROSOPHILA
atggcgactgctttggaactgagtccaaccgagattcgcggcctgtgccagcggtactttcatcaagatgtttccaattcggatacggggttcgatatagtcaactatactcttaagcccacctcggatgctccagccggatacttgggcagccacctctacctgcacgtcactctgaagcttcacaattccgaggaggtccggcagctcacattcttctcgaagtcggcgcccgtgggtaatgagtcgcgaatggaatacctagaggattttggagtgttcgaaaaggaaatcgctgtctaccagaacgttctacccgatcttcacaaggcctgtgcagaagtggcgcccaagtgctattacgcggacaagaatctactgatctttgagaacctcgcagatcagggctatcgaatgggtgctggacgggatggtctgctgacctatgagcagctccattgctgtctaaaaaccttggccgccatgcatgctggttccataatccaggaacagagaacgggacaaaaaatagcacagtctcagcctaaatcagtggtggagaatgcctatcccagtgatgtgtcgccggaacatatgaggatggtgaattttcaaaatgcctgtctggtgctcaaggagttcatcaaactaatacccaaatatcagtccaagttggattacgtattggaaaactttacagaaaagatgtcctttatttttgaggccgtcaagacctcggatgtgtaccagaataccatactccatggcgatttgtgggccaataatatcatgttccagtatggcagatatggcgaggttccactgcagtgccgccttgtggacttccagttggccagatatgccccacctgtcctcgatgtcctgaccgttctcaccattcccacttcaaaagagttcagggacgcccatctcagtgaacttctggcggaatactaccggttcatgaccgagttcctgaagcgtgctgacttggatatagcgcgttttattccagaacagactttctatgaatccgtgcaaaagtttcgaagtgttggcctgatcgaaagctgtttgttctgtcacctggttattctaccacctcactgcactcagaaactgaccagttctgtggatggctttaacgactttttcactaataaacgcatagagatttgcctggaggccttcaacacggatgagttgtacagaagtcggctggtcgacatgattgaagactttgtagatcaatttgttataaatgtttag

SEQ ID NO: 2298 - protein, 422 aa, DROSOPHILA
MATALELSPTEIRGLCQRYFHQDVSNSDTGFDIVNYTLKPTSDAPAGYLGSHLYLHVTLKLHNSEEVRQLTFFSKSAPVGNESRMEYLEDFGVFEKEIAVYQNVLPDLHKACAEVAPKCYYADKNLLIFENLADQGYRMGAGRDGLLTYEQLHCCLKTLAAMHAGSIIQEQRTGQKIAQSQPKSVVENAYPSDVSPEHMRMVNFQNACLVLKEFIKLIPKYQSKLDYVLENFTEKMSFIFEAVKTSDVYQNTILHGDLWANNIMFQYGRYGEVPLQCRLVDFQLARYAPPVLDVLTVLTIPTSKEFRDAHLSELLAEYYRFMTEFLKRADLDIARFIPEQTFYESVQKFRSVGLIESCLFCHLVILPPHCTQKLTSSVDGFNDFFTNKRIEICLEAFNTDELYRSRLVDMIEDFVDQFVINV

SEQ ID NO: 2299 - DNA, 3044 bp, DROSOPHILA
ctccaggacccagcgtcaaggacacagtctttttcagcacaccagctcgccagttccaacggaccagctctccggtactcgtacaccctatcagcagatctggctgcttcagatccaattccaaactgatcagcggcgccgtggcatcatccaggactcgggtaagttcgcccgtactggtggcatagacctgcacctttgtcaaacaccgcacgaacatgaatctgtgaaacaggaatcaggatgttacatacttagtactatatagtattagtttgaataataaccttccatcgggcgagaatacaggcgcatgttccacaatgttaccgccagccagaaactgcaactccaaacggtcctcgtcgtcgaaattcatgatcttacagtcgagcactcgatgctctcgtaatcctctgtgcttcggcactgtctgtatgcaggagtttatctaaactaactcttttttaaccacttttcgtgggttattctaccatcaaaattcaatcacatcaatgcacgtgtagctcagtgtgcccgcgcactgggcgccaagaaaacatactgctggcaatatactgaaacataccacatagtgttattggtcactcttgggtgctcatataaaacttggatttcaaagatatagaaaaaaaaaagaaataggcaattcaataaataaaaagaacgcacgcaatattttcgaattgcgtgacaaccttcaaattcggcgaataaagaaatactgttagatttgtattatgcgtataaaaagcatttagaaaataccactgcttcaaaaatactggttccaacgagcagttctctctagttctctggtacatgcgaaaaggctgcactgtatatttctatacgagtttgtaaatggatttattccggccccgaaaacctgtcagtaatagctaggcgacggaatttgccgaggattcaataccggaaaataaagcggccagaaaagaggcttcgcgaagcaagggaaatgcagcaaggcgaactccggcgcaaaaaaacaacaacaattgctgacatgtgcaacgtagcatgcaaaacggggattttccggaactacttgcgggcaagtggccaaaggacctggatgtcggtgctcctggtgctcgtccttatgggtaccttcacagccgcggaacccctgaaagttatatacgcggtcaacgctggcggagatgagcacaccgatcttaacggggtccaatacgatgcggatcctctcaaaggagttggaatagcttcggactacggcaaacacctgctgatgatcggccgggtacaggaacatgacgaggtgctctacaggaccgagcggtatcacaccactacatttgggtacgatttaccaagcgatggcgatggagattacgccttgataatgaagttctgtgaggtatactttgatgcgccgcagaagaaggttttcgatgtgctcctaaaccgcaagcacacggttgtccgccagctggacatctacaacgaggtgggcaggggctcggcacacgacgagattgtgtactttaagatcaacaacggacgattaaactatgaaggcgaggtgtccgatgtgcgaaatggccgcctccggctggactttataaagggggcactggataatcccaagatcaatgcattcgccctgctcaagggagatatctcccaggtgccacgaatgcatggtaccgaggcgactgagaggattaaaccggagggtaagctgaacgcggaacagaagaaagctcagcaggtagagagggtggtgcgcaaccagcgggacgacattgatgaggatgacgaggacctggacgacgaagagtttgaagaggagctttccgagcagaatgtcgacaagctgggcagcgatcagccgtcgctgcaatcggacacaaagcggtcttacagtggcccccgccaaccgaatccatactccatggacgactcatcgatcttgctaccagttttcatcgccatcggggcctttataccactgctgttctgcctctgcaagctgtgatccccatccgttgctcactcaacgctttcgcctgcgttggtttcctgctttgtgattttgtgattttgataaaagacttaattatatacttatcgtttagttcgtacgttacgcactccttagagttcggttcccttattcccaggatgcaaagctctctaacgccctgtactttccatatttgataagcaattcttttgtgttcttctcgttgaccactgccgtcccaggctcgtgtacttaatcgttgagtcacttgatttcaattcccggatcgtttgaccgcttgactaggacaatgtgcgcaaaaggttagatcggtttttgagacagtttttgcttgggaactgttggttttgaatgacattgaataaaattaaccttgtttgttattgaacaaaaagcttttgattattttcatgatggcctggattgtgcgacgacttattcgttgcctgataggccgcaaaggatcttgaatctaaatttttcggtacatggctttctgggagctcaatgtaaattatgtgtgtaaaatatttttcccgtgtaagactggttcattttccgaaccaataaccggtctatcggaaaacaatcggagcgactgccatccctggcggatgtcctgcgggggctggaaaatcttgagtcgcgtcgcgaggaaaattcagtcatcaacgcgtgtccatcgaatcggcagtgaaaatgtgccagcggcggttcttcagcagcaaatacaccagtttccacaagaatcacatcaagttgtttgccgtttacatgaaaacggcgaatttgatgcaaaattcgaacgtgctaaagcgttcgctgtaagcgccgctgcctgtgccgtcgcctccccctctcccatgcaaaaaagaagaaaaattaacaaaaagttgattcccggctgtgtgtgctagtgctttcagcttagtgctaaatggaaaataaaaccccctaacgcttgaatgcaaagttaaaatgtcggaacgga

SEQ ID NO: 2300 - DNA, 1044 bp, DROSOPHILA
atgcagcaaggcgaactccggcgcaaaaaaacaacaacaattgctgacatgtgcaacgtagcatgcaaaacggggattttccggaactacttgcgggcaagtggccaaaggacctggatgtcggtgctcctggtgctcgtccttatgggtaccttcacagccgcggaacccctgaaagttatatacgcggtcaacgctggcggagatgagcacaccgatcttaacggggtccaatacgatgcggatcctctcaaaggagttggaatagcttcggactacggcaaacacctgctgatgatcggccgggtacaggaacatgacgaggtgctctacaggaccgagcggtatcacaccactacatttgggtacgatttaccaagcgatggcgatggagattacgccttgataatgaagttctgtgaggtatactttgatgcgccgcagaagaaggttttcgatgtgctcctaaaccgcaagcacacggttgtccgccagctggacatctacaacgaggtgggcaggggctcggcacacgacgagattgtgtactttaagatcaacaacggacgattaaactatgaaggcgaggtgtccgatgtgcgaaatggccgcctccggctggactttataaagggggcactggataatcccaagatcaatgcattcgccctgctcaagggagatatctcccaggtgccacgaatgcatggtaccgaggcgactgagaggattaaaccggagggtaagctgaacgcggaacagaagaaagctcagcaggtagagagggtggtgcgcaaccagcgggacgacattgatgaggatgacgaggacctggacgacgaagagtttgaagaggagctttccgagcagaatgtcgacaagctgggcagcgatcagccgtcgctgcaatcggacacaaagcggtcttacagtggcccccgccaaccgaatccatactccatggacgactcatcgatcttgctaccagttttcatcgccatcggggcctttataccactgctgttctgcctctgcaagctgtga

SEQ ID NO: 2301 - protein, 347 aa, DROSOPHILA
MQQGELRRKKTTTIADMCNVACKTGIFRNYLRASGQRTWMSVLLVLVLMGTFTAAEPLKVIYAVNAGGDEHTDLNGVQYDADPLKGVGIASDYGKHLLMIGRVQEHDEVLYRTERYHTTTFGYDLPSDGDGDYALIMKFCEVYFDAPQKKVFDVLLNRKHTVVRQLDIYNEVGRGSAHDEIVYFKINNGRLNYEGEVSDVRNGRLRLDFIKGALDNPKINAFALLKGDISQVPRMHGTEATERIKPEGKLNAEQKKAQQVERVVRNQRDDIDEDDEDLDDEEFEEELSEQNVDKLGSDQPSLQSDTKRSYSGPRQPNPYSMDDSSILLPVFIAIGAFIPLLFCLCKL

SEQ ID NO: 2302 - DNA, 8130 bp, DROSOPHILA
tcattattttttaccgatgttttggaatgtaaaagctgatcagcgtgtgtagcctaatttacagtccctcaagtgtcgtaaactatatttttaattgcagtccgtagactgtgatgccacatcgacaactttatttgggaaaattgcagttgtatctgatataggccattagcctctgtaacactctgagaattctctacactgctgtaataattttaactttttttttgtattatttatgagctgtagaaatgtacatcaaaagcgacaacttcctgatatcatgccagttgtgtgacaacctctgaaaatggttatctaagaagcaatcacatgatttcttatcatagtttaaataaaagatagatttatatagccatcagaatttatttttgagacacacacaagaagcctttataaatagatatcattgaacttgtaccaaagggccaactgtaaccgcactccataagcaatcatttgacgtcagttttaaatgtctgatcacacaaatgcctgtactgctttctggggggtttactgactcggcaaaactgattaacccaattcgcaattaaatattcattgaatggccgacatatgtccaacattctggcatttacctcactgacctagatcaacatttcaaccgaatttgtgttttggaattcaaagcgctgacaactcaatcgtcggtaaaaattaaaacaaagccagacatattcgtgtttgagtgcgtcaccaataacaatcagtgtcattttgaatggcgtgttgccgaacggttaactaaacccccgatattcccaacccagcagatctggattgtattatattctgcagcttatacagccatgtaaacattttatttttgcctttgtgggtattggaaatttattacttgcatcgcgcttttatcaattttccgcttcgtgtttgccaattagaaactaatgctaatgccaaatatatttcgctcttccttcctgcccaaaaccagctgggccagtcggcgcccattgatgcggtggatgtggggctggatccaacgccatcggcgagagtgccacgtcccgaaccattgaaatccggcgacgagaatgcgaagggcgacgagggacacaagatggagcggtatcccctctccagtgtggacttcgctcgggtaaagacgccgttcatcattggaatctggatcctgtcggccagtatagctaaaatcggtaagtaaactattggcctttaaaaatgattaccctattgctgaacatttaattatttggaacacaaatcggctaattagcgaaggagcaggcttagcagtgcataatcagcggaaaatacggttttgccagacatgccacgagtccgtttcctgtgaaaggaagactcggtgcctgctcctgggcgtgggtgtgtgtttttccttctgctgttgccagggaaaatcaatatggtttatgtaattcctgcgacgacgccatcatgcagatttgcgtcaagtcggcgacgtaaccgtgtgggccgatggatgcgagtcgtggccgaaggacattgcataacccctcgatggatgtgtgcaacaagccgcaagaatcgagaccttgaccctgcccccgagcaacaattgggtccgaaggccatgtattaaccatcatttaccgtgattctcgaccgctttcaggcctctcgagacttcattaccaaggctttcagttttggtttatttactactggccccagtgtcggcaatttaacattgccccagacatgtttatcggttgccctgtccataaccttgactgcaggcgagagaaaatccattttcctccatcaaggacgctcgccgtgcattttcgggtccttggtttcgatttcatttctatttttaaataggcgaatgcttgcacttatttattgcaattggataagggcccggaaaaatgaaggcggaagaacactgaaatgccagttggccaagagcaaactaaaggaaaggtcgtttgtaaaatgagaggcttggcagtcgtcaaggaaatgactgaagtgtttactgccagataagaactagaacttgttcaaaactttcttacagtctgataacctttaaaggcttgacaaaagtttaacaaattgaaaatatctgcacccttagtatttttttgattcgaagtaaacagtagtagtatagggaagtataaagtttttctgccctacgtcttaaggtcctcctataagtttcttacttaaattccaaacaccgaaggccaaattgagttttcaaatttttacgaatgctttccccacaaattgttgatttgtttacaaaacataattaaaacagtaccattgaacccatgggtcgatgaggaaaatacaaaagagggtgaaactgactaaaaaggtccgaaagaaccctttaaaagggatcccagaaaatacatgcagctttgtgagtacttgtaatctgtatgccaggcgtttagtaaattaatggattatgtttatttttttgttacaccacccacgccattttagacattgcgttgtagaaattatcgtgtttacctagcaaaaacggtttatacaatatattttaaaattttttcaggtttccatatgacgcccaaactgcacctaatatttccggaatcgtgcctgctgattgtcgtgggcgtggtcattggcgtggtgctctatttctgcaccgatgtcgccgtctccccgctgactcccaataccttcttcttctacatgcttccaccgattatcctggacgcgggctactttatgcccaacagattgttcttcgacaacctgggcaccatcctgctgatggcggtggtcggaaccatcttcaacatagctaccatcggtgagtgcggtaacccgagatggattcggtcattgagttgatgaccaaataaacagactgttaatatctatgtccgtcaactgaaaaatggtcgatggaaatgtcgttttgacttgtcgattgtaggagttcatccaatttgtttgttttggaaaagaaatggcttaatttaaccattcaattctttttttaatgcaatttttccaaagccaaaaaaggtttcctaaatgacgaatatttcttctaattaagaaaacaagataacgtttatacattctaaaaaaatgtattacattttctactatttatggctcttttgccccagatttttaaattattttggaattcattttaaagaaattccgccctaaaatcgttcgcaagcttggcttaaagacaaaaatagatgaatacacatttttttcagactacaagttttttaaactcaccatttgtgctttcaagtattgacacacttgttcacatgtgttattcgtacagcaaaaactactgacaaaagaatcacaatatgcaatatcatttgaagtacccccaatctaacaattcaaacctgtgaacagtatttgccaaatggttgacaattacaaaggtgtcagcaacgccagcaattagacacctgatacagatgagtaaacagaagctgaataatccgaaagatacacttaaaagagtccgcctttttctagccttcggaaaacaaagacattgtttaagtgggcgtatattgttttccacttccaataaattaggcgacatgcgaggggcgtgacgccgccatagttagattcccgctttcaccagatttacacagtctgtagcgaaacatgcgattgatatggatgctcatgttgccttaacaaagagaatatggcagccacgtcgggtgggtggaaaggggtggacggcgtcagttagatgaatgaccaaaaccgcaaacgggccacgggaaacacgctcgagttgccatagttacccccaaaacatccagacttgccaattacttatgcttaataaattggattatatactgtacaatcgtataacacacagcgaaatgctctgttggaaaattgtaaattccgcttcaattgttcattacgaataacttttatgtaagccttagataaaacagaaagttgcatagggaggtcattggtttccctttatgtataacgatgtgtaaaagaggttatctaccaacaactcatttttaatttgaatttttgaacagtttgtaagctaataattgacgacaaatattccaagacacaaataaaatcgttggaaggcttttgcagcttacatcatttactggcgccacaaatggtgcttattgaagcaatattattgcaaacattgaatttgcgttgttgcaaattcaattactcttggaagaacacgcttatcaattgacttaagttacttggagatgcatttggaaaacaacaagctgcagcaatgtcaatgccatcgattggccagtatctaattaagtctgagaacggcttcggcaaattgatggctggaaatggatggctttcccgctgcctccactgattttatttataataccctctactatttttttccctcgaaggtggctccttgtacgcctgcggaaagatgggaatttacggggaaagcgagactccgggtctaatggacgtgtttctatttgcctcactgatatctgcagtggatccggtggccgtattggccgtattcgaggagatacacgtgaacgagatcctatacattgtcgtctttggcgagtccttgctgaacgatgccgtcacggtaagatgggtttattgattgattgcgattgtgggcggatggtgttagcaattaagtcaacaagtctacatggttaagtgaatttgagtcttccttctgtcccccaggttgtgatgtaccacatgatggagtcctacaatgagattggcttggacaaaatcatcgcccaggacattgccagcggtgtgggttccttcttcgtggtagcgctcggtggcactgccataggtgagtgcacgatctcgaatcggatttgctaaatttattacaccttgctaaatattttgagtcttggttaataatttgaaatttacatctttcaggcatcatctggggctttctcacgggcttggtgacccgattcaccgatcacgtgcgtgtcatagaacccattttcatatttgtgatggcgtacttggcctatctcaatgcggaaatattccacatgagcggcattttagcgtgagttttgtaaaaaaaaattgactaaccatctaccattcgggtaacacaacttattcaacagcatcactttctgtggtatcacaatgaaaaactatgtggaatctaatatttcacaaaagtcgcatacgactgtcaaatatgccttaaagatgttgtccagctcggcggagaccattatatttatgttcctaggcgtggccactgtgaacaacatgcacgtatggaatacgtggtttgtagtgctgaccattgccttctgttcagtatttcgtgtcattggtacgtattttacactgtacaaaaacgaagtttttaaattcatttaattttcgttcaggcgtcattttgctatcggcccttgccaatcgcttccgcttgcacaaattgtcccgggtggatcagtttgtgatgtcctacggaggattgcgtggtgctgtggcctttgccctggtgctgttggtggacgagaatgtggttaagcagaagaacatgtttgttaccaccacgatagctgtgatttactttactgtcttcctgcaaggaatcactataaagccgctggtgaaaatccttaatgtcaagcgcgctaataaacgcaagccaaccatgaatgagcgcattcatgaacgggtcagttatctacacagctctaaggcacatggattggtttatctaagtttaatatattacagttcatggatcacttgatggctggaattgaggatatagtgggcaagacgggcaactacaacgtgcgtgacaagttcaagcgtttcgacaatcgctttattcgcccgctgctgatcagagatcttaaggtatttttacatctaagtttgtagatggggtcaaaacggttaggtcttccagaatatgaaatctctaaatctatatgtatacccaaactgccattaggaaattaatgaattgcatttattggaccacattcccatgcaaagctatgagcgagcattgaacacgaatagagggccgagtgcatcaaatgcagatggaaagagccgaaggcaacgtcgttactcaagaatatcttctagaatgaaccctttcagaaacatgaatgataagatttagtaataagaacataaataaaagtcaagtcgatcttataccgatttatttttgttgatttccaacttaacatagggagctgagccgaagatcatcgagacgtactccaaactgacgatgcgcgatgctatggaagttatgaggcgaaatccatccactattggccagatgacgggaaccgagtcgatgagcgcccttttccggaattataccaataactatattggcggcaggtgggcaccgccaaccatatacaccacctggtaaacgaattttggattgaatgatttcttgcctgtactcccaccaaaaagatcgtatattgcatgagtacgaataaattcgaaattgatgtagctaaaatattctgacttgagcatgaattgcacaaaacttttgtttaaccaaatttgcagctaacaaattgaacacaaagcaagcagaagtgttacacaagtgtttcgttgaggcttcttaaatagggaagctgtaaaaatatttagtagtttgtcgtatcgaggtaaactcgtaaaataatttgtttttgtgaaacacctctttttaaattattgtacatcaatgtcttcgtatatctaaaattcgtttaaccacttctttagtttttacttaaatctaaaatctattcttatctgtaatatagaataactctctctctctctctctctctctgtctctctgatctctgataaacttgtacttataattgtgtaaaccattctttagccccagtctgacaaatctagacaatacctgttcccgtaatctggacatggctgagctggattataatccatccaagaaggatctaaccgatgccaggatccatcatcttttggccgaagaactgaagccttatagaagggtatgtattgggcgtatatttatcacttcatttgcaattcacgttttgtaacaataaactcttggttggataatctatagcaaccagttttacctttaagcccccaagattatcacagcccaaaagttttttctttaaattgatactatactatatctaccgatctatgtctccacctcttcactctatagtagtcactaaagagtgtttatgcaaagttctactgtaacttcacaatcgatatttattttcgttttgtactatgggcatttagtttctcacactcttcgcttctggctctaaatataaatatttttggctgcctatactcgtacacatatttgataactatagacatatttctatatagatatacttgtgattaatcgtttatttaatttctttcccgttgtttcgatactcaacatcaactactcgacaacgtgttaaaataaatcaaaactgcttcaaactttcgtgtgcttaaccaatcaaaaataaaaatttcaatattgcgataaaggcctcaatacaaatggtacgaataaattggttcattggttttttgtttaaattaatttggtctgtttcctggttaatttacataaactcctttcgaattaactaataaaacttgttcgtttaaatgttacacgttgtgtgtctgtattggtgttattttatattaaattatgctaagctattgaaactgaaagacctcaaatgctttgcaattatcagtaaaagtagtaatgagctaaagcgtttaaaaaattgattgaagcattggacagtttcaggatataattatttaataataataattcaatttaaataactctccgttcttcagataaaaaatttttttgtattgtataaaaaaacgatagacaagaaaaaatatatgtagttttttttgtatgttgtacttgacaaattgtaaaaataattgggaaaaataattaatcagaacctagtgctaataattaattggccaaca

SEQ ID NO: 2303 - DNA, 1964 bp, DROSOPHILA
ctgggccagtcggcgcccattgatgcggtggatgtggggctggatccaacgccatcggcgagagtgccacgtcccgaaccattgaaatccggcgacgagaatgcgaagggcgacgagggacacaagatggagcggtatcccctctccagtgtggacttcgctcgggtaaagacgccgttcatcattggaatctggatcctgtcggccagtatagctaaaatcggtttccatatgacgcccaaactgcacctaatatttccggaatcgtgcctgctgattgtcgtgggcgtggtcattggcgtggtgctctatttctgcaccgatgtcgccgtctccccgctgactcccaataccttcttcttctacatgcttccaccgattatcctggacgcgggctactttatgcccaacagattgttcttcgacaacctgggcaccatcctgctgatggcggtggtcggaaccatcttcaacatagctaccatcggtggctccttgtacgcctgcggaaagatgggaatttacggggaaagcgagactccgggtctaatggacgtgtttctatttgcctcactgatatctgcagtggatccggtggccgtattggccgtattcgaggagatacacgtgaacgagatcctatacattgtcgtctttggcgagtccttgctgaacgatgccgtcacggttgtgatgtaccacatgatggagtcctacaatgagattggcttggacaaaatcatcgcccaggacattgccagcggtgtgggttccttcttcgtggtagcgctcggtggcactgccataggcatcatctggggctttctcacgggcttggtgacccgattcaccgatcacgtgcgtgtcatagaacccattttcatatttgtgatggcgtacttggcctatctcaatgcggaaatattccacatgagcggcattttagccatcactttctgtggtatcacaatgaaaaactatgtggaatctaatatttcacaaaagtcgcatacgactgtcaaatatgccttaaagatgttgtccagctcggcggagaccattatatttatgttcctaggcgtggccactgtgaacaacatgcacgtatggaatacgtggtttgtagtgctgaccattgccttctgttcagtatttcgtgtcattggcgtcattttgctatcggcccttgccaatcgcttccgcttgcacaaattgtcccgggtggatcagtttgtgatgtcctacggaggattgcgtggtgctgtggcctttgccctggtgctgttggtggacgagaatgtggttaagcagaagaacatgtttgttaccaccacgatagctgtgatttactttactgtcttcctgcaaggaatcactataaagccgctggtgaaaatccttaatgtcaagcgcgctaataaacgcaagccaaccatgaatgagcgcattcatgaacggttcatggatcacttgatggctggaattgaggatatagtgggcaagacgggcaactacaacgtgcgtgacaagttcaagcgtttcgacaatcgctttattcgcccgctgctgatcagagatcttaagggagctgagccgaagatcatcgagacgtactccaaactgacgatgcgcgatgctatggaagttatgaggcgaaatccatccactattggccagatgacgggaaccgagtcgatgagcgcccttttccggaattataccaataactatattggcggcagaataactctctctctctctctctctctctgtctctctgatctctgataaacttgtacttataattgtgtaaaccattctttagccccagtctgacaaatctagacaatacctgttcccgtaatctggacatggctgagctggattataatccatccaagaaggatctaaccgatgccaggatccatcatcttttggccgaagaactgaagccttatagaagg

SEQ ID NO: 2304 - protein, 518 aa, DROSOPHILA
MTPKLHLIFPESCLLIVVGVVIGVVLYFCTDVAVSPLTPNTFFFYMLPPIILDAGYFMPNRLFFDNLGTILLMAVVGTIFNIATIGGSLYACGKMGIYGESETPGLMDVFLFASLISAVDPVAVLAVFEEIHVNEILYIVVFGESLLNDAVTVVMYHMMESYNEIGLDKIIAQDIASGVGSFFVVALGGTAIGIIWGFLTGLVTRFTDHVRVIEPIFIFVMAYLAYLNAEIFHMSGILAITFCGITMKNYVESNISQKSHTTVKYALKMLSSSAETIIFMFLGVATVNNMHVWNTWFVVLTIAFCSVFRVIGVILLSALANRFRLHKLSRVDQFVMSYGGLRGAVAFALVLLVDENVVKQKNMFVTTTIAVIYFTVFLQGITIKPLVKILNVKRANKRKPTMNERIHERFMDHLMAGIEDIVGKTGNYNVRDKFKRFDNRFIRPLLIRDLKGAEPKIIETYSKLTMRDAMEVMRRNPSTIGQMTGTESMSALFRNYTNNYIGGRITLSLSLSLCLSDL

SEQ ID NO: 2305 - DNA, 10240 bp, DROSOPHILA
aaaatatatgtagttttttttgtatgttgtacttgacaaattgtaaaaataattgggaaaaataattaatcagaacctagtgctaataattaattggccaacattttatagacaactattatcaataatatcaaaggacttgcttggttttatttagatctaattaatagatttttcaattatccagattactaatatttgtgtctatgcagaatgtgaatgtttattaatgaattctcaaatttttaaattaattaagacatcaaatcttaatatatggttattaaataaataataagtcaaattggtttaaaatcgtgaacatatcatttaaatcatatatcttgaaagtaatcttggaaaactgtaacaaatttatgcataaaggttaataataattgaaattattaaccattatttgtaaatttgttacaactttccaagataacttttatttcgtttaaatctttcacttttactgcattctcattgtccaagcaacatattgtaatttactaatatattttgtctgtcagcattcgctgagttcaccattacgtctcgtacaccctaagcacttgaaaggaatataatttaggcccagcacctaatagatattaatctctactcgtaaggtgtacaaatgtttattgaaagccgttaaaacttactcagttcatgttcacgttagtcaaatgcaattaatcgtaacatatattcaaattattaaaatgtaactgtcttatctggcaacctaagtaacctgcaaggccacatttctctacttacgtcattgtaatgccaatttatgatttcgatattaatttgcctcatcgatgtttttacagcaccgtcgtcttagttatagccgacacgcagtagatgacagagatttgtcaacccaggtgagtacctgtccacccaaaacaccagcaactcgcttctgccaattgcatatctgtttgaaaaaaattctaacccaaatgttgctctcttgcaggtcaattacaagatgcaaatgaacttcaggcggatgtttaatgatcgaaaacatcacaaacgcagcaaacgtggtgccagcaacaaggtgagcgccttcatttattttgtattcgaagaattctattttaatggataccgccactatccacaggaggccaaggagaacgttaagcagaatcatgtctcgttccatgactttcaacagaacggcaccactaagcaactcaccaatggtacggaatcgagttcaaaccattcacgaaaaaaatcttacagaaaaagacatactcacaattcacttaacaaatatcgtagattagaaataggtaaatgacgctaaaatcagcaacaaatttttatacaatcgaacagcatattgttctagtcgaaaaaatgtccgtaaagtttatctcgaatcagttcgtagagttaacgatcataaagttcttattattttctttaagtttctcattgtacaatgatcagactgcgctgtctatttttcgtgcgattcttagtttgtagtgaaaagtgaagtaaattttaagttcccagtaaagtttcatgcgtcatactaacctaattcacgatacttttagtttccttgtaaagcacaccgttaaaaccaagttttaattttttttttatgttcttcataaaggagtttgttaggtttggcaaaatcatgtcattgcgttactgcatgtcttctaatttcatttccgtgtacaaataatgaatacttttatgagctcctttaaacctattatcaaaatcgatttcataaggaaaaaagtaaaaaaaaaattggtattaatttggtaactaatttaatttcatccgaatccttctctttctcccctgcatcgcgcttccttccaactgatgccaaaaaccacacccatttggccaaaaaccaaactcgaaatttgttcactaatcgaaatcaataacccaacctgcaacacacactcataattatcctgacttgcccgattgtttgtttactcattccgaaccatacaaagactatattaacaatgtgcttaatgaaacagccgaggagtgccaacagaatcccaacgagatcaatgttgttggcccgagcgacgattgggatgatggcctgaccttcaccgccaaatcatcacgtaagtgttcattcctatttgtattcattcccattttttttcttgcaactaacttatgaataaggaggttgtctacatagagcataggcagcccctagatggttaaggttatctgccctcttctctgtatacgttcatttgtatatcattatttcgcctgctcgagtgagccacttttctctacattgtcagcagtcatatggcaatatctgaagttttccatacatctgtatatcctgttttctgcccaccttgtttgttttgttcacacaaaaatgccatcacttaatcgaataattgaatctttttttgcctgtaaagaacgaaatcttcaaaggttgtacgagtatgtgtacataaatcgactagctgagtatagtaacacgttttctgtataaggtagtttcaaacgaattgaataacacagatttgaggccaaataatatttttctgggaagagctttgctagtcctgcccattttctgtttattgatttagttttaattgtattcttgcatttgttttgtatcctaccccttatgaagaacctaataaaagctataacaacgaaatttctacatatttttcttgttttatgcctttccaattatttcgaaaaccaatcacttcaattaaaccaaaacacaaaccgaaacaaatgttgcttggcgaaaaaaaatatataaacacataaaataattacaaaaaattacgattagctgactcggatcgtgccaataacaattctctgatagcccacatccaaaacctgccgggtttcgatgcctccaaggcccgtatcgtcgtccagcactatgcgcccaaggccgacgacaatccggacacagatatagagtccccggagcaggccattgggcccacggccgccgaattgatattgccgtggcggcgggatcgttcataccagagcattggtaaagacatccatcatattcagagcaaccattccacccacaaacagatcaaaacagcaacgacatctgcaacaatcgttttgaatgatatataatatagctcacttctcgatcatttgcgtgcttagattcatggtcatattcgaactgaagctttcaaacacatttgcaaaaagttattaacatgaactattaacttcgatattttttccgacgttcaatacatttttaaggcttcaaaaaagaaccaacatttatagcttactacctttaaatgtcaaatcattaagtatttttaggcttgacctggtaaagagatactttcgaaaggggtcattatcaagcaaagcctgtcgccttaacattactttgaatctagaatctagaaaatgtaacttatccagagtccaatgaaaatctcacctactcacccatacatttcacagcattgcgtgtttttagaagtgtcttaaacttggttcaatctaacttattcagctctgcgcgattctgtcgacttttgtgtcgtcacctatttgatttcagttaatcatttactataattattttcccaacgcgatgaattctaatgccttgatttccattcccaacttattagacgtgctgagtgttgcctagacgtagctgcccatacaattagtaatcattacattttatttgtgcgtcgttaacgtaaatttactcgtagacggcaattgccattgattggtagatagttttagtccttgaatgaagttggaagttgttattgccaaagctcgaaataaccagcatttagcttcattgacttaccaaaaacaatttgaaaagtcacattaagtaacaagtttgttactacaaatttctgaacaagaagaagcgtcgaaacagagcatggcatttttgtgcatgaccaaatttctgttttgtattttatatttgtactttttcgtttagaccctttaaatcgaatttattgtgtgttttgtttcttatggcacactggtggatgtttttcaggaaatggccctcgaagcattcaactctatattaaattttatcacctgttcggcaacacataaattgttctaaaagctcactgcaaaatagcaaaaaatttaccttcagcttcagtgggccttcttaggtcgacccatgttatataaatcaatctgtcgccaaggaaaaataatgattttaatttcgttttgtgaagcctgatttgtcttcagttatgtgcactttgtttgtcttttgccctttgacgtattccttgtctcatcaactacgcttgagtttaaaatatgttgacaatatactctgaattggccaaccacaaagcaatcggcagctaaaaaccaaaacagcagttaaaactgtttgctgcatgcaatgcaaagccaatagttttatttttcgctaaaatacaaaaatttccatgcattcatatttatcgaaatttgtgtttgatctagtggccgaacatcccattcccgaggaggatcgtaatctgtcccgcgaatccgacggagaaaggcgtgtggccacacccaccgccacggaatcccaattgccgtggaaaagacagggtgacgaatgcacggatgcagtgcagcagaacgagtttcccgcttgggcctccaacaaggagtacttggcttacaattcccccagtgcaacattcctaggtaatgtatacatacccacattaaccatttttttttttttgtgacaataactcggtgggaaaagttgacattcacacaagaacttggaaatagttatgagagggctctcctaagattcttctttttgtgttgaatatttatgtcctcagtttattactctttgtgaattggcaaaaaccactggctgggtacacagaaaaaaagcggcgctagttgcctttgtaaaattttgagatcccatgttaaatgacgaatttttaaattacttaaatacataactgcaatcgctctaataaatacatactcgtcaaggttgcttgttttctgtgcaagcccaacccacattgtctatatcaatgtggcttcttacttgtctaaatgtaaatagcttaaatgtttgtattttgaccacaaatgatataatgatacaaatgcttacttatatccgattgcaaaattgcacccagtttttatgtggctttactgatttgatgttcatttcgttgggattttcctaaaatattcgtttttctatctctctttttcccgcattggtattccccgataactgttgcccacttctacacccaccacccacccacaacgtgccacacgatacaccacacgaactccctgtaaaaaccaccgaaaacgcgtacaacgatcccgcaacaaaggtggtataaacaagcctaaacagcccaagtccgtcataggtctcttccgccgtgagagttccagctcgaaggccgggagcgttggcgtcggcagcacaggagccatggactccgccgccagtggctccgaaacgatggtggtgtccatgtccagccaaccgcccaacgctccatcgacgtccatccacaatccgcggctggacaagcgctcccagtcgatctcctcaagctcgctgggcgccggagcccatcagctaggtccggagggtcattccggcccatttccggttacggccagtcatcggcggaacgtgcgcaggggctccatgctggagctaagcgggtaagttcgatgtccacttcgtcagacaccaaaagtctgcgcacattattctcaatcttcatggttttgtgcaaaagttatctagttctttgtgttttcaatcagactgaaatgggtcctgtacatactttagccgtatatgaaaatcctaaaatttaaaggagtaatattttgaaagcgtaactctgaattaaatatgtcttgggaaaaatcctaaaacatcaagttaaatatgtcacattttgttcgaatttcagaaatataaattcttatatcaaatcgtgaacaaatataaattgatataaacaatgagacagatgtagacggtatcctgtgaattctcccaaagtgctagctaaagacccatttcagttgtattttcttcattttacgcctgtacactaatagcctactaatatgtataacactatgatttgccataggcttacctttaaatttaaaaaagtattcagtagcttagctatatattttttatttgctttcgtactttttctctcttatttgtttaaaagtagtacaaattttcattgattcgattccttaactatcgttttcattgaattaaataatgatcctaaactggcccttataattagcacaatgttggtatgtgatctagacttacagcttccacgtcaaaacctgcctgcctggcaaacctttctgtttttcattacaaaaagattttaagagcatttttccagcttcttgcataatcttccctcttactcttatccgtcaacttatccacttcctgtcttaagttgcaccctttgtcgcaaagtaaaaaacgttgcttgcattgcaattctatactgcaaaaaaaaaccctattcagtgtatgtggatattgtgtggttgagccgcgtctgtgtcttttattgtgatgattattttacagactcattgcaactggacgaaggcccagtagaattttgcaatttagtccgggagcaactaacttactagggtcagccatgattccaagtccttctcctccacctcctactacttcaacaacaacaacaacaacaacaacaactacagtaaaaccaacaagcacatcaaccaccaagaacaacaaaaccaacaattcaacagatacaacatcagcaagcgccacaaactcaacgccaacctccccgaattcggaggacagcgccacatatacgtaccatacgaagtaaagatctaaaactgaaacgaaaccaaaccggccattaacgaatttcgatactctgtaaaaagaaacacaattcccaaataccgcgaatactggcatatgacaactctcgatttcaaaaacactaactatatatatacacgatatatgagtactgtatatagagccacagatcagtgcatatcattgtagagtaacagtttttagaccgtaggataaaatttgctagccctatgtcctttcatctaagccgaaatcgatttcgtgtacttgactcgattctcgatgataataatctcgcattggcttcagactttatttcttgcactgactcaaaacagatctctaaactggcccaacaactttcgcccttttccccacagtacataaattactccgaaattaggatgttgtcaattggtgatgtgtgaccgcttgactcagtggcaggcaatcgtatttttcattggaaaaagtatgctgggttactggagttgttacatttcgtttgcagttttatggactagtgcccattttttgtataacagtcctagtacagtaataaaacaagtatacgattgtagtacaacctaattatttattttttccattgatttttgtgattgcactcagtttttatgtcttttatatgcgtgttcgttttatttatataacagttttgtattccatatgtccctaattagcaccccgccatttccaatctaattatataacccaatacccaagactatgcaaagcaatttctaaaaaaaaggttaacaattattggaagatattacttaatacctttgtcgtgtgattctttgtttgtgaatatttcgaaccggaaaacccgaaacaaaatccaaactaaatcctaactaataacggtttataaaccaactacattggtaaacaatttgattgaaaattatattttttagcggcgtctcaattgaatctgattaatcaaatccgaaacgagcacagagccagagcaattaactagctaaactgtacagtaaatgcacaaacactcaccatatttctacacgcacacaagcacacactgacaccaaactgttatacaattgagagcacctgtgataactttccctagacacaatttctatgcctaaagcgtatctttaaacggctttaatcacacgaactatgtgtaagtattagacaaagtatccttccaaagtgtcatacgtataacacagtgcctgggctcagcacaattaacaatcgagcccaaataacacccacactcttctctgtgctaatcccattttttacgtaatctgaatttacaataaaaatccaaacggcggactcaaagaaattgtattgtatctatttataaaaaacagcagtgcatcaatttgaatgtaaagtagaactgttatactgtgccttaaacatgtcttccttataagcctctctccatcttcctgttccattttaatttgctttgatgtagtgccaacaaaaatatatttaatttattttattatatttaatgctaacgttttttataaatataaataggaaatttagctgtagcctctcatgctaacattaaaccatacgattatccacacgaaatcatttgccaaaattgatcacaactgacaactgacattaactttctacgccttctcttcacatcacctcaccatcgataaccaaccaccaaccacctacaaccaccgcacactccacacgacaccaccaccaacagagacacaataccggaggagtcgtcgtaccagcacggacactccaagtccttgtgcgagccggcggactccgatgaatgggagggagcaccgttgtccgcagccggcggagcaaacagcgagcttttgatgcgaatgagcggcagggaaccactcctgccacgcccatccaacacgcctcgtgcccagattcggcgcatgaacgccggggcggtgggcggtgcaggcgtgagccaggcgggccgtaagaaccaggtgaccaaggcactgttggactacgaggattccgaaaccgactccgatgagaacgatgatgatgaggacgaggacttcgattcctacgatgacgagaacattgtggtcaccacctttacaacaccggccacgggcagaagaccgggatctagtccaggatccgggtcagaagccaacaccgccactaccaccacgacaagcattcggctgacccgcaacaacgacgaaagcatcatttgagtatcaagcacggatggcgacgcggaggatctggaggatgatgagccaccggtgtcagcaccaccatctaacaatccaaaaagtttgcgtctgcatctattcccgtatgagatgttctaagctcacatttaaatgacctaggtcgtaagacaaaagttgaaaaaaaacgttggaaaatagtttcaaaataaggtttagaccaaaaaggtttataactatattaacatatgaatcggacaaatgttaagataatggaatagcaaaaattgtatataacaccagatatgaataacttaattaatttctcttggtcgtttaagtcgctttttaagatttttaacttccagttttgtgcttagtcccgatcaattcttattatgtaccacaaacatatatatcgaaaaataatttagtgatttcagctgatgtgttccaaaatagcaagcaaaaaaattgtgaattgtgtaataattaacacagcgtagccaaagttcatgttaagcgtacaactaacgtttatttctttatttgtaatttagacaaaatgtgctaactgaaaatcacattgcgagtatatgttgcaagcagtacttaagcgcttacttagtttagttcaattttagtcttagttattaaagagtttaaagcaattaatttccgtatagccgcagagtcagaacaaaaaataatgcagtaaagtttgtctcagctggaactgtcagtaaacttgcatcattcatcagtgtaaataaatttttggagtatttcgaaactgttttgggaacggcaatgacctctatatgaactgtatgatttggaaacggttcttaaaagaggctttaaagcaggttatgaagcagcggattttctacagcctctatgagatcttacatcttgttgtaatactccagcccccttataactagtttcaaaacaaggttacttcgcagatacagttgagcagaattttaccttaccctaactataaaatatacacaaa

SEQ ID NO: 2306 - DNA, 1554 bp, DROSOPHILA
gtcaattacaagatgcaaatgaacttcaggcggatgtttaatgatcgaaaacatcacaaacgcagcaaacgtggtgccagcaacaaggtgagcgccttcatttattttgtattcgaagaattctattttaatggataccgccactatccacaggaggccaaggagaacgttaagcagaatcatgtctcgttccatgactttcaacagaacggcaccactaagcaactcaccaatgccgaggagtgccaacagaatcccaacgagatcaatgttgttggcccgagcgacgattgggatgatggcctgaccttcaccgccaaatcatcacctgactcggatcgtgccaataacaattctctgatagcccacatccaaaacctgccgggtttcgatgcctccaaggcccgtatcgtcgtccagcactatgcgcccaaggccgacgacaatccggacacagatatagagtccccggagcaggccattgggcccacggccgccgaattgatattgccgtggcggcgggatcgttcataccagagcattgtggccgaacatcccattcccgaggaggatcgtaatctgtcccgcgaatccgacggagaaaggcgtgtggccacacccaccgccacggaatcccaattgccgtggaaaagacagggtgacgaatgcacggatgcagtgcagcagaacgagtttcccgcttgggcctccaacaaggagtacttggcttacaattcccccagtgcaacattcctaggtctcttccgccgtgagagttccagctcgaaggccgggagcgttggcgtcggcagcacaggagccatggactccgccgccagtggctccgaaacgatggtggtgtccatgtccagccaaccgcccaacgctccatcgacgtccatccacaatccgcggctggacaagcgctcccagtcgatctcctcaagctcgctgggcgccggagcccatcagctaggtccggagggtcattccggcccatttccggttacggccagtcatcggcggaacgtgcgcaggggctccatgctggagctaagcggagacacaataccggaggagtcgtcgtaccagcacggacactccaagtccttgtgcgagccggcggactccgatgaatgggagggagcaccgttgtccgcagccggcggagcaaacagcgagcttttgatgcgaatgagcggcagggaaccactcctgccacgcccatccaacacgcctcgtgcccagattcggcgcatgaacgccggggcggtgggcggtgcaggcgtgagccaggcgggccgtaagaaccaggtgaccaaggcactgttggactacgaggattccgaaaccgactccgatgagaacgatgatgatgaggacgaggacttcgattcctacgatgacgagaacattgtggtcaccacctttacaacaccggccacgggcagaagaccgggatctagtccaggatccgggtcagaagccaacaccgccactaccaccacgacaagcattcggctgacccgcaacaacgacgaaagcatcatttga

SEQ ID NO: 2307 - protein, 513 aa, DROSOPHILA
MQMNFRRMFNDRKHHKRSKRGASNKVSAFIYFVFEEFYFNGYRHYPQEAKENVKQNHVSFHDFQQNGTTKQLTNAEECQQNPNEINVVGPSDDWDDGLTFTAKSSPDSDRANNNSLIAHIQNLPGFDASKARIVVQHYAPKADDNPDTDIESPEQAIGPTAAELILPWRRDRSYQSIVAEHPIPEEDRNLSRESDGERRVATPTATESQLPWKRQGDECTDAVQQNEFPAWASNKEYLAYNSPSATFLGLFRRESSSSKAGSVGVGSTGAMDSAASGSETMVVSMSSQPPNAPSTSIHNPRLDKRSQSISSSSLGAGAHQLGPEGHSGPFPVTASHRRNVRRGSMLELSGDTIPEESSYQHGHSKSLCEPADSDEWEGAPLSAAGGANSELLMRMSGREPLLPRPSNTPRAQIRRMNAGAVGGAGVSQAGRKNQVTKALLDYEDSETDSDENDDDEDEDFDSYDDENIVVTTFTTPATGRRPGSSPGSGSEANTATTTTTSIRLTRNNDESII

SEQ ID NO: 2308 - DNA, 3915 bp, DROSOPHILA
catcggaacaagaaaattttgtatttgcgtaaattttaatcaatattttatatgataggatcctatatcgacgaacgataggctccgataggtacggactaataatcgaaggagggtgaccgtcgcttgtttctgtgattatagcaagcaagtgttgaaaagtacggtgaccttaagttggatgtgactattctgcaacgtttttgtttttagccgctaacggatttttaaataaatgaaacaactactgactatgagtaatatattaattatattacttctacagtgaacctcataaaaattatgtcggcagtatgatgcatttaacacaatacgaaaatgtatacctaaccaaaacatcaacagatcgcaataaacaaaatcgaagattaaaattcgaatatccaaaattataagaaaatgttaagtacaagtcagttaaattatttcaactatttttttcttttattgtctttaatatttctatacaattaaaaatgacaattattcagaaatcttttgttccggatttaacggaattgttaataatagcatcaataacatttgtgtatgaaaatgtcaaacagtttttattcgttgacagttcatgacagacaaccctctaattggcgtttcattaatttaaaattgcgcgatggaaaaagatgtataccaaatttgtattcaccatctattttcaaacattgttatattaactgaaatgacaaaatcacaatattaaacaattttctaacaaattacgattttatacaaatgtgaatatatttccgaaacaaactatttgcactataactaagtcctgtaattaagatcatggttcagtatgaatgagttacaaattttattaagtgtgcatgtgatatatcgcacattagctatcgaaagttatcatgaatctgcactgttttaaagacgcaactatatcgataatatcgcaaatagttctatttctattttaccgcctctaattcttttatttcgaccacgtgctgctattggtaatgtccgtaccgtgaaatttttctgaaactcatgtaacaaaatgtcggaaacttcagaggacgaacagacgcagctacaaacgagtgacgaagaggaggatctaggtagcgaggaggagcaggaagatgaagataacaatcataaggaaggggacagcgaggcggcactaagtggtgaagatgataaaggctccgaggacgacgcagccgaggaacagaagctaacctggaaagatctcgtatgagccccactattaatttaaattaaaatttaatcgaatggccatatttcttcaaagggtctcaatgaggctttgtgtcaagcatgtgacgaattgaagtggaaggcgccttcgaagatccaacgtgaggccattccggtcgccttacagggcaaggatgtaattggcctagcggagaccggttccggcaagacgggcgccttcgctctgccaattttacacgcccttctcgagaatccgcagcggtattttgccctcgtgctaacccccacgagggaactggcatttcaaattggcgagcagtttgaagcccttggtgagttttcgcatagtttatgtgcttttaattcgcagtgatgttaaacctgttttgattttgtgtatcaacgaaaatatgaaattataattttcttattcgtcactacctctgagtaaaaaaaccttcccatttatcgtattcttgaatttccttctgccaaacttatgctagctctgtttttttcaggtagcgggattggcataaagtgttgcgtggtagtcggcggcatggacatggtagcccagggtcttcaactggccaagaagccgcatattataattgccacaccgggtcgcttggttgatcatctagaaaacatgaaaggttttaaccttaaggctattaaatacttggtcatggacgaggcggatcgcattcttaacatggattttgaggtggagctggacaagattctgaaggtattgccgcgtgaacgacgaacctttctgttcagtgcgaccatgaccaagaaagtaaagaaactgcagcgtgcctcccttaaggatcccgtaaaggtagaggtgtctaacaagtatcagacggttgagcagctgcagcaatcatatttgtttatccctgtcaaatacaaggatgtgtatttggttcatatccttaatgagctggcaggcaacagtttcatgatattttgcagcacctgcaacaacacggttaagacagcgttaatgcttcgtgcgttgggattggctgctattccgctgcacggtcaaatgtcgcaaaacaagcgactagctgctttaaacaaattcaaggccaaaaaccggtcaatactcatttcgacggacgtggcgtcccgcggcttggacattcctcatgtggatgtcgtcgttaatttcgacataccaacgcacagcaaagactacattcaccgcgtgggaagaacagcaagagcaggtcgctccggcaaagccataaccctcgtgagccagtacgacattgagttgtatcagcgcatcgaacatctactggggaagcaactgacactgtataagtgcgaggaggatgaggtgatggcccttcaagaacgagtagccgaagcacagcgcactgcaaaactggagctgaaggatctggaagatacaaggggtggtcacaagaggggcggggacacccacgatgattcggagaacttcacgggcgcacgcaaacgcatgaaaccgatgggcggcactggcggtggtggaagaaagagctttggcaaaaagaattggagcaagggcaagcagaagagataggtcagatcagtctcgatttttattagtgctactctaagaataatgtaataaaagttttaaatagaaagtataacgcaaattttactttattgatatttgtaataatcaaataggaacaataatttgataacttaatttattcaattatgtgcatcaataatgaagagattatgatatatgtcaagtatatgttagatacttttcattcattttcatttgcttaatcaaaattatgtatattgatcgcatattcattggaataatgaaagctagggtttggcaaatatccaaaattaggaactgtggtgtgtggaggctgaatagcagcaggtggtgcaagaaacgaggccgctcctggcggcccctggcttgcgctcgcactttcattatgcatgtagctgtagcttttcgatgcgttgcttaaaatcgacataatagtttcgttggtacgaatagaatttggatggagggtgatcaacttaagggcgtttgcaaatttatctgagcagtctacggaggatttaagtatggtaatcaagttcttatggggtatctcaaagttataatccttgtccagctgagttagcttatcgcaataatcctcccagttggcgttggacagaatatttagagtcgttagcatcagatcccgatatttgtgagctttgcatggcaaccacacatgctccattatccttttcactgcctctttctgcataccgcacttactgagagcttcatagacgtgtgccagtaggggagctgaaatgcttttgtacaagcggcagtcgaccagcatgattagcagatactgccagagattgcgaaatttgaagatatccacgaacgaggtgtagtaggtctgaaacaggaaaaagcttcgtatcgtttgtcggtataggctcagcaaagtgtcctcgtccatcctcatcagtcgtttctgtacttcacccaaactgttcatcgtatgatcacaattaatagagatgcatttgttgtctacactttgcatgcaccttatcccaaacacatctttgatccaattaacaccatcttggttggaggtggaaaagtatact

SEQ ID NO: 2309 - DNA, 1666 bp, DROSOPHILA
cgaccacgtgctgctattggtaatgtccgtaccgtgaaatttttctgaaactcatgtaacaaaatgtcggaaacttcagaggacgaacagacgcagctacaaacgagtgacgaagaggaggatctaggtagcgaggaggagcaggaagatgaagataacaatcataaggaaggggacagcgaggcggcactaagtggtgaagatgataaaggctccgaggacgacgcagccgaggaacagaagctaacctggaaagatctcggtctcaatgaggctttgtgtcaagcatgtgacgaattgaagtggaaggcgccttcgaagatccaacgtgaggccattccggtcgccttacagggcaaggatgtaattggcctagcggagaccggttccggcaagacgggcgccttcgctctgccaattttacacgcccttctcgagaatccgcagcggtattttgccctcgtgctaacccccacgagggaactggcatttcaaattggcgagcagtttgaagcccttggtagcgggattggcataaagtgttgcgtggtagtcggcggcatggacatggtagcccagggtcttcaactggccaagaagccgcatattataattgccacaccgggtcgcttggttgatcatctagaaaacatgaaaggttttaaccttaaggctattaaatacttggtcatggacgaggcggatcgcattcttaacatggattttgaggtggagctggacaagattctgaaggtattgccgcgtgaacgacgaacctttctgttcagtgcgaccatgaccaagaaagtaaagaaactgcagcgtgcctcccttaaggatcccgtaaaggtagaggtgtctaacaagtatcagacggttgagcagctgcagcaatcatatttgtttatccctgtcaaatacaaggatgtgtatttggttcatatccttaatgagctggcaggcaacagtttcatgatattttgcagcacctgcaacaacacggttaagacagcgttaatgcttcgtgcgttgggattggctgctattccgctgcacggtcaaatgtcgcaaaacaagcgactagctgctttaaacaaattcaaggccaaaaaccggtcaatactcatttcgacggacgtggcgtcccgcggcttggacattcctcatgtggatgtcgtcgttaatttcgacataccaacgcacagcaaagactacattcaccgcgtgggaagaacagcaagagcaggtcgctccggcaaagccataaccctcgtgagccagtacgacattgagttgtatcagcgcatcgaacatctactggggaagcaactgacactgtataagtgcgaggaggatgaggtgatggcccttcaagaacgagtagccgaagcacagcgcactgcaaaactggagctgaaggatctggaagatacaaggggtggtcacaagaggggcggggacacccacgatgattcggagaacttcacgggcgcacgcaaacgcatgaaaccgatgggcggcactggcggtggtggaagaaagagctttggcaaaaagaattggagcaagggcaagcagaagagataggtcagatcagtctcgatttttattagtgctactctaagaataatgtaataaaagttttaaatagaaagtataacgcaaa

SEQ ID NO: 2310 - protein, 507 aa, DROSOPHILA
MSETSEDEQTQLQTSDEEEDLGSEEEQEDEDNNHKEGDSEAALSGEDDKGSEDDAAEEQKLTWKDLGLNEALCQACDELKWKAPSKIQREAIPVALQGKDVIGLAETGSGKTGAFALPILHALLENPQRYFALVLTPTRELAFQIGEQFEALGSGIGIKCCVVVGGMDMVAQGLQLAKKPHIIIATPGRLVDHLENMKGFNLKAIKYLVMDEADRILNMDFEVELDKILKVLPRERRTFLFSATMTKKVKKLQRASLKDPVKVEVSNKYQTVEQLQQSYLFIPVKYKDVYLVHILNELAGNSFMIFCSTCNNTVKTALMLRALGLAAIPLHGQMSQNKRLAALNKFKAKNRSILISTDVASRGLDIPHVDVVVNFDIPTHSKDYIHRVGRTARAGRSGKAITLVSQYDIELYQRIEHLLGKQLTLYKCEEDEVMALQERVAEAQRTAKLELKDLEDTRGGHKRGGDTHDDSENFTGARKRMKPMGGTGGGGRKSFGKKNWSKGKQKR

SEQ ID NO: 2311 - DNA, 2444 bp, DROSOPHILA
caatactcgcggttttgcgcttgtacatggtccgcaatcgactcgatgactatactcctgtccttgtaactctttgcgtggctgcactcaatatgcagcgatcaagaagccggaattaattgcactttggagcgaaaattaaacgaaaatacgaatgttggcgctaggtttgctttccgccatttatgtcatttttttcattctccctctattcttcgtgcgcactgcgcagtgtggcaaagcgacgctgccacgacgatagtaaatcgattaatcgatgcttgcgcacatttcaacactatattttaaacaggtaaacatttttaatattttgatctttaatttcaattaattttcatttaaattctgtatttagtttagtctgcagtccaacacacagatcatccaatgttttctacttggtcttcaaatgtatcatcacgaataaataataattattttagtactccataatatttagccattcgttaaggtttattgtccgataatattggcgacaacttttaaatgaaattgggtcttttttaggtttcaaattaaaagcattaaccctttgaaggcgcctgtgctagtcttgatcgtttacagagcatgtatagcacagctggaagttttcttaagagtgcccatgaagatggagttgagcttgtttgtcagtagggtgaatttaaaattttaaaaagatcaacttgataacgaaggattgttttaactttcaacagtaatttaaatatttactttaaacatcgcataaacacgagggcgcgccacgttttctagctaggctgaacgatgatttgcagcactggctttccccatttgttgtgctcggtcattctgcttttgaaaaaaattaaatgtgcctgatggtttcgccctagtttttaaactcaaaggacttctactatattagattcaaaaataaataaggaaaatgccatccaaatcaaagccgagactttcgcgtggtgtcctggacatgaagttcatgcagcgcacaaaagttaaagtggaaaaggaggcagacgatgagcagagcagggcactgtactccaacgagatcaaccagaagatgctcaattccacctcgaattttgtggtggagtccagctactcgatatgcgccggcctgatagacggacgcctcagtttccgcggcatgaatccggagctagaacttctcatggagcaggatctggcggaaaagcagggccgcacaaggccggagcagcccaaggaggtatccgaccaagacatggtaaaggcttattatgccaacaaggcgcccacggtctccggcagcatgagcaagaagtttaacaccaaaaaggactttaaaaggaagcaaatcggcggagatagtgatagtccgcatgccatgaagaagcagtactttaagaaaccacgctcgggtgacgaatagtttactacttagttgttacactcgtgacttagcttttagttaaataaatatacgaattcaattgtactcgcgctgtgcttgtttcaccgcctgcaaggcgtagcacatctggttgttgttgatccatcgccaggtgttgctccaaaagtcgtaggtgcttccatttaccaacaccgtctgacagttcactgcagatgaacgagagaataaagaatagcctaatctgaatataaagcctgagataaacttactcgtatccaagatgcgctgaacgtccaagggcgaaatcattttgtcccagtggtgcgttcccctgggcaccagattgagaacatactcgctgagtaacacgccaccgaaccaactgggtatggttttgttcaaagtggtgataaagatggatcctccaggctttaggctgcgtacactggcctccagcagggacactttatctttgacgtgctccagaacttcagacactatcaccgcatcatagcattcgcaattggccttggcatgctgatccaccggctcaattttgtacaccacattgctggccaactccggactggagcatttgagatgctcgcgagcagcttctattaacttctcgccaagatctatgccagccacctgggcacccaggcgcgccaagtgttccgtaagcaatcctccgccacatccgacctccagaatattttgacccaacaacactttggtggtatttacgtaacctggcttcacagtgccacgcgaaacgatgccatctctgataaagggaaccctgaaaggtggaaaggaacttagctataaacctttggaacatcaaatctgtatagcttacctaatctcattcagggcatgtagagcacccatggttccattttgattccaccactccgaggcgtgattctcatggtgccgcacttccttttgggtgccggcatccaacgacttcgctgtgctgctgcttctagtcgaatttcgcccgatagaacag

SEQ ID NO: 2312 - DNA, 444 bp, DROSOPHILA
atgaagttcatgcagcgcacaaaagttaaagtggaaaaggaggcagacgatgagcagagcagggcactgtactccaacgagatcaaccagaagatgctcaattccacctcgaattttgtggtggagtccagctactcgatatgcgccggcctgatagacggacgcctcagtttccgcggcatgaatccggagctagaacttctcatggagcaggatctggcggaaaagcagggccgcacaaggccggagcagcccaaggaggtatccgaccaagacatggtaaaggcttattatgccaacaaggcgcccacggtctccggcagcatgagcaagaagtttaacaccaaaaaggactttaaaaggaagcaaatcggcggagatagtgatagtccgcatgccatgaagaagcagtactttaagaaaccacgctcgggtgacgaatag

SEQ ID NO: 2313 - protein, 147 aa, DROSOPHILA
MKFMQRTKVKVEKEADDEQSRALYSNEINQKMLNSTSNFVVESSYSICAGLIDGRLSFRGMNPELELLMEQDLAEKQGRTRPEQPKEVSDQDMVKAYYANKAPTVSGSMSKKFNTKKDFKRKQIGGDSDSPHAMKKQYFKKPRSGDE

SEQ ID NO: 2314 - DNA, 3887 bp, DROSOPHILA
gcagggacactttatctttgacgtgctccagaacttcagacactatcaccgcatcatagcattcgcaattggccttggcatgctgatccaccggctcaattttgtacaccacattgctggccaactccggactggagcatttgagatgctcgcgagcagcttctattaacttctcgccaagatctatgccagccacctgggcacccaggcgcgccaagtgttccgtaagcaatcctccgccacatccgacctccagaatattttgacccaacaacactttggtggtatttacgtaacctggcttcacagtgccacgcgaaacgatgccatctctgataaagggaaccctgaaaggtggaaaggaacttagctataaacctttggaacatcaaatctgtatagcttacctaatctcattcagggcatgtagagcacccatggttccattttgattccaccactccgaggcgtgattctcatggtgccgcacttccttttgggtgccggcatccaacgacttcgctgtgctgctgcttctagtcgaatttcgcccgatagaacaggatagcaaatgtctcagtttgctggaatgcaaaactgtaatgtaatctacttttgcagtctattttttgacttacccgcttactaacaaggcatttcgcatcatttttgcgagaaaaacaaacgttgataaacaaaaacagctgactttgttttgctgcccggcgaaagcatgggcgtagccaggtgcattaagggggattgacaattcttgaatattaaacaataactattatttgtcatttttaaacacccatattgtaaggcattatagtactttcaggtacttttgttcaggtaaaaatttaaatattaataaagaaaatgaatataaagaaaataaaggagatggggttctccacacacgtcagttcccagttgtgaaatgtaatgactgtcagcaggaaccaatggaatggagcactcttttcagttccgatcaggttagttctttccattgttctagcgcctatcaaacagagagccgcgagcactatcaatcacctcccgtatcgataaggataatcaatttcttcttgctatttttagacatgccggaatacaagaagctagaggaccaggagtcagatgtggagaacgcaaatagaaccaccgtccagaacactgctaccgttcaggacgccggggagggacagaggcaggcggctggccagcaggcgggacaaatggtgacggtgtccttgttcatgcttcttttcctcggcagctcctacttccaagtatgtacttcatatgagatttcagccatatgtgcatatttgatttatttataccactaattcctttactacagccgcgaccacgactgcatcagtacaaggggggcaggggccatggactgctggagaagttcgactgcaacatacaactggtggaatccatacccattggcctaacatatcctgacggcagtccacgattcctaagcacttacgaagcttggctggagttattggagagcgccacgacctcactagacatagcatccttctattggactctgaaggccgaggatacgcccggggtgtcggacaacagcactcggccgggcgaggacgtcttcgcaagactcttagccaacggaaacggcggtagcaggtcgcccaggatcaaaattcgcattgcccagagcgaaccctctagtggcacacccaatttaaacacaaagttgttagctagcgctggcgctgccgaagttgttagcatctcgtttcccaagtactttggcagcggagtgctccacaccaagctgtgggtggtggacaacaagcacttttatctgggcagcgccaatatggactggcgggcactgacccaagtcaaggagatgggcgtgctagtccagaactgtccagaactgacccatgatgtggccaagatctttggagagtactggtacctaggcaacagtgaaagttctcgcattcccgactgggactggcgttacgcgaccagctacaacttgaaacatcccatgcagctgagtgtaaacaaaaatactagcatagagggcttcctatctagctcaccgcctcccctttcaccctccggccgaacagacgacctgaacgccatcctcaacactattaacacggccataacttacgtaaatattgcggttatggactattatccgctgatcatatacgagaagaaccaccactattggccgtttatcgacgacgctctgcgaaaggcggctgtagaacggggcgtggctgtgaagctccttatttcgtggtggaagcactcgaatcccagtgaggaccggtatctcaggtcactgcaggacttggcatccaaagaagacaaaattgatatacaaattcgtcgattcatagtgccgactgattcgagccaggagaagattccctttggccgtgtcaaccacaacaagtacatggttacagatcgagtggcttacatcggaacttctaactggagtggagactacttcacggacaccgctggcattggactggtgctaagcgaaaccttcgagaccgagaccactaataccttaagaagcgatctgcggaatgttttcgagcgggactggaatagcaagtacgccacaccgctggtataatcgcacaacgttgtaatgtgattattccgatgccaatgttattttaactattttagctcccgacaattgttcaatcctattcattgcttttattcagttttgatcatgcgtgaattcaaataatacgcgaatttacgaattggaataatgcaagtatttaaagtatggagatacagtgagcttgaaatcataacgtaataaaattcattctttcatatcctgctcgcagtcacatagtttccttctgatttgtaacatgtgtacaaactgcctaactcggcactaacccagctgcctggctagtcactaaatatatgttaaatactctttgcaactacatataacatttgcacttaataaatgttgggcgaacgcctttgtcgtcttcgtgataatcgctatccatcaaaaggagcatgggtataacagaggccagctcctcaatcacttaacatgggcaccccgcctgagaaagttattgctggcgatgctcttttcgataaccgcttgtatgaaggacacgcgttcaatgagcgtgttgtagatcagcatcaaacaccgcgcatcgatggctgttaagtagaaaattagtcttgctacattcaatcaaaaggcctatccctgactcacctgcataaagaatctgctcgcgacgcagcggtctattggcccagtttgagcactggtttgatttgttcagtttcttgccaaggcatgccaatgagagatccgtaagggcgtctcctgcccggttaacattgccgaagggaagttcaacgccgaagcgctgcttttttaactccaaccagagattgcgaaggtccaagtagtggtgaggcatttgaaggcgcagttgcaggggcagtgaccgctgcaatacactgagatcactgaccatagagaaccccaccttacggatgttcacgttattaaagatattcgcgcccagcaagcgccagtgttccgagcgtaagctctcccgcgccaggcaatcgatcaggtagacattgtggccggtggcgatctgtagcacgcacagctgattgtctccgcacacgctctgcatccattcagaatccaggtatatgacgcactcctgctgcagatggtataacatacgatcgaactcatcagccttgttcacaatgataaggcactcgtcgggcaggtccatggtcaggtacatatcacatctactcgaaggacagcgttcctt

SEQ ID NO: 2315 - DNA, 1813 bp, DROSOPHILA
tcaggttagttctttccattgttctagcgcctatcaaacagagagccgcgagcactatcaatcacctcccgtatcgataaggataatcaatttcttcttgctatttttagacatgccggaatacaagaagctagaggaccaggagtcagatgtggagaacgcaaatagaaccaccgtccagaacactgctaccgttcaggacgccggggagggacagaggcaggcggctggccagcaggcgggacaaatggtgacggtgtccttgttcatgcttcttttcctcggcagctcctacttccaaccgcgaccacgactgcatcagtacaaggggggcaggggccatggactgctggagaagttcgactgcaacatacaactggtggaatccatacccattggcctaacatatcctgacggcagtccacgattcctaagcacttacgaagcttggctggagttattggagagcgccacgacctcactagacatagcatccttctattggactctgaaggccgaggatacgcccggggtgtcggacaacagcactcggccgggcgaggacgtcttcgcaagactcttagccaacggaaacggcggtagcaggtcgcccaggatcaaaattcgcattgcccagagcgaaccctctagtggcacacccaatttaaacacaaagttgttagctagcgctggcgctgccgaagttgttagcatctcgtttcccaagtactttggcagcggagtgctccacaccaagctgtgggtggtggacaacaagcacttttatctgggcagcgccaatatggactggcgggcactgacccaagtcaaggagatgggcgtgctagtccagaactgtccagaactgacccatgatgtggccaagatctttggagagtactggtacctaggcaacagtgaaagttctcgcattcccgactgggactggcgttacgcgaccagctacaacttgaaacatcccatgcagctgagtgtaaacaaaaatactagcatagagggcttcctatctagctcaccgcctcccctttcaccctccggccgaacagacgacctgaacgccatcctcaacactattaacacggccataacttacgtaaatattgcggttatggactattatccgctgatcatatacgagaagaaccaccactattggccgtttatcgacgacgctctgcgaaaggcggctgtagaacggggcgtggctgtgaagctccttatttcgtggtggaagcactcgaatcccagtgaggaccggtatctcaggtcactgcaggacttggcatccaaagaagacaaaattgatatacaaattcgtcgattcatagtgccgactgattcgagccaggagaagattccctttggccgtgtcaaccacaacaagtacatggttacagatcgagtggcttacatcggaacttctaactggagtggagactacttcacggacaccgctggcattggactggtgctaagcgaaaccttcgagaccgagaccactaataccttaagaagcgatctgcggaatgttttcgagcgggactggaatagcaagtacgccacaccgctggtataatcgcacaacgttgtaatgtgattattccgatgccaatgttattttaactattttagctcccgacaattgttcaatcctattcattgcttttattcagttttgatcatgcgtgaattcaaataatacgcgaatttacgaattggaataatgcaagtatttaaagtatggagatacagtgagcttgaaatcataacgtaataaaattcattctttcat

SEQ ID NO: 2316 - protein, 494 aa, DROSOPHILA
MPEYKKLEDQESDVENANRTTVQNTATVQDAGEGQRQAAGQQAGQMVTVSLFMLLFLGSSYFQPRPRLHQYKGGRGHGLLEKFDCNIQLVESIPIGLTYPDGSPRFLSTYEAWLELLESATTSLDIASFYWTLKAEDTPGVSDNSTRPGEDVFARLLANGNGGSRSPRIKIRIAQSEPSSGTPNLNTKLLASAGAAEVVSISFPKYFGSGVLHTKLWVVDNKHFYLGSANMDWRALTQVKEMGVLVQNCPELTHDVAKIFGEYWYLGNSESSRIPDWDWRYATSYNLKHPMQLSVNKNTSIEGFLSSSPPPLSPSGRTDDLNAILNTINTAITYVNIAVMDYYPLIIYEKNHHYWPFIDDALRKAAVERGVAVKLLISWWKHSNPSEDRYLRSLQDLASKEDKIDIQIRRFIVPTDSSQEKIPFGRVNHNKYMVTDRVAYIGTSNWSGDYFTDTAGIGLVLSETFETETTNTLRSDLRNVFERDWNSKYATPLV

SEQ ID NO: 2317 - DNA, 3906 bp, DROSOPHILA
ctgcgtacactggcctccagcagggacactttatctttgacgtgctccagaacttcagacactatcaccgcatcatagcattcgcaattggccttggcatgctgatccaccggctcaattttgtacaccacattgctggccaactccggactggagcatttgagatgctcgcgagcagcttctattaacttctcgccaagatctatgccagccacctgggcacccaggcgcgccaagtgttccgtaagcaatcctccgccacatccgacctccagaatattttgacccaacaacactttggtggtatttacgtaacctggcttcacagtgccacgcgaaacgatgccatctctgataaagggaaccctgaaaggtggaaaggaacttagctataaacctttggaacatcaaatctgtatagcttacctaatctcattcagggcatgtagagcacccatggttccattttgattccaccactccgaggcgtgattctcatggtgccgcacttccttttgggtgccggcatccaacgacttcgctgtgctgctgcttctagtcgaatttcgcccgatagaacaggatagcaaatgtctcagtttgctggaatgcaaaactgtaatgtaatctacttttgcagtctattttttgacttacccgcttactaacaaggcatttcgcatcatttttgcgagaaaaacaaacgttgataaacaaaaacagctgactttgttttgctgcccggcgaaagcatgggcgtagccaggtgcattaagggggattgacaattcttgaatattaaacaataactattatttgtcatttttaaacacccatattgtaaggcattatagtactttcaggtacttttgttcaggtaaaaatttaaatattaataaagaaaatgaatataaagaaaataaaggagatggggttctccacacacgtcagttcccagttgtgaaatgtaatgactgtcagcaggaaccaatggaatggagcactcttttcagttccgatcaggttagttctttccattgttctagcgcctatcaaacagagagccgcgagcactatcaatcacctcccgtatcgataaggataatcaatttcttcttgctatttttagacatgccggaatacaagaagctagaggaccaggagtcagatgtggagaacgcaaatagaaccaccgtccagaacactgctaccgttcaggacgccggggagggacagaggcaggcggctggccagcaggcgggacaaatggtgacggtgtccttgttcatgcttcttttcctcggcagctcctacttccaagtatgtacttcatatgagatttcagccatatgtgcatatttgatttatttataccactaattcctttactacagccgcgaccacgactgcatcagtacaaggggggcaggggccatggactgctggagaagttcgactgcaacatacaactggtggaatccatacccattggcctaacatatcctgacggcagtccacgattcctaagcacttacgaagcttggctggagttattggagagcgccacgacctcactagacatagcatccttctattggactctgaaggccgaggatacgcccggggtgtcggacaacagcactcggccgggcgaggacgtcttcgcaagactcttagccaacggaaacggcggtagcaggtcgcccaggatcaaaattcgcattgcccagagcgaaccctctagtggcacacccaatttaaacacaaagttgttagctagcgctggcgctgccgaagttgttagcatctcgtttcccaagtactttggcagcggagtgctccacaccaagctgtgggtggtggacaacaagcacttttatctgggcagcgccaatatggactggcgggcactgacccaagtcaaggagatgggcgtgctagtccagaactgtccagaactgacccatgatgtggccaagatctttggagagtactggtacctaggcaacagtgaaagttctcgcattcccgactgggactggcgttacgcgaccagctacaacttgaaacatcccatgcagctgagtgtaaacaaaaatactagcatagagggcttcctatctagctcaccgcctcccctttcaccctccggccgaacagacgacctgaacgccatcctcaacactattaacacggccataacttacgtaaatattgcggttatggactattatccgctgatcatatacgagaagaaccaccactattggccgtttatcgacgacgctctgcgaaaggcggctgtagaacggggcgtggctgtgaagctccttatttcgtggtggaagcactcgaatcccagtgaggaccggtatctcaggtcactgcaggacttggcatccaaagaagacaaaattgatatacaaattcgtcgattcatagtgccgactgattcgagccaggagaagattccctttggccgtgtcaaccacaacaagtacatggttacagatcgagtggcttacatcggaacttctaactggagtggagactacttcacggacaccgctggcattggactggtgctaagcgaaaccttcgagaccgagaccactaataccttaagaagcgatctgcggaatgttttcgagcgggactggaatagcaagtacgccacaccgctggtataatcgcacaacgttgtaatgtgattattccgatgccaatgttattttaactattttagctcccgacaattgttcaatcctattcattgcttttattcagttttgatcatgcgtgaattcaaataatacgcgaatttacgaattggaataatgcaagtatttaaagtatggagatacagtgagcttgaaatcataacgtaataaaattcattctttcatatcctgctcgcagtcacatagtttccttctgatttgtaacatgtgtacaaactgcctaactcggcactaacccagctgcctggctagtcactaaatatatgttaaatactctttgcaactacatataacatttgcacttaataaatgttgggcgaacgcctttgtcgtcttcgtgataatcgctatccatcaaaaggagcatgggtataacagaggccagctcctcaatcacttaacatgggcaccccgcctgagaaagttattgctggcgatgctcttttcgataaccgcttgtatgaaggacacgcgttcaatgagcgtgttgtagatcagcatcaaacaccgcgcatcgatggctgttaagtagaaaattagtcttgctacattcaatcaaaaggcctatccctgactcacctgcataaagaatctgctcgcgacgcagcggtctattggcccagtttgagcactggtttgatttgttcagtttcttgccaaggcatgccaatgagagatccgtaagggcgtctcctgcccggttaacattgccgaagggaagttcaacgccgaagcgctgcttttttaactccaaccagagattgcgaaggtccaagtagtggtgaggcatttgaaggcgcagttgcaggggcagtgaccgctgcaatacactgagatcactgaccatagagaaccccaccttacggatgttcacgttattaaagatattcgcgcccagcaagcgccagtgttccgagcgtaagctctcccgcgccaggcaatcgatcaggtagacattgtggccggtggcgatctgtagcacgcacagctgattgtctccgcacacgctctgcatccattcagaatccaggtatatgacgcactcctgctgcagatggtataacatacgatcgaactcatcagccttgttcacaatgataaggcactcgtcgggcaggtccatggtcaggtacatatcacatctactcgaaggacagcgttcctt

SEQ ID NO: 2318 - DNA, 1726 bp, DROSOPHILA
gcactcttttcagttccgatcagacatgccggaatacaagaagctagaggaccaggagtcagatgtggagaacgcaaatagaaccaccgtccagaacactgctaccgttcaggacgccggggagggacagaggcaggcggctggccagcaggcgggacaaatggtgacggtgtccttgttcatgcttcttttcctcggcagctcctacttccaaccgcgaccacgactgcatcagtacaaggggggcaggggccatggactgctggagaagttcgactgcaacatacaactggtggaatccatacccattggcctaacatatcctgacggcagtccacgattcctaagcacttacgaagcttggctggagttattggagagcgccacgacctcactagacatagcatccttctattggactctgaaggccgaggatacgcccggggtgtcggacaacagcactcggccgggcgaggacgtcttcgcaagactcttagccaacggaaacggcggtagcaggtcgcccaggatcaaaattcgcattgcccagagcgaaccctctagtggcacacccaatttaaacacaaagttgttagctagcgctggcgctgccgaagttgttagcatctcgtttcccaagtactttggcagcggagtgctccacaccaagctgtgggtggtggacaacaagcacttttatctgggcagcgccaatatggactggcgggcactgacccaagtcaaggagatgggcgtgctagtccagaactgtccagaactgacccatgatgtggccaagatctttggagagtactggtacctaggcaacagtgaaagttctcgcattcccgactgggactggcgttacgcgaccagctacaacttgaaacatcccatgcagctgagtgtaaacaaaaatactagcatagagggcttcctatctagctcaccgcctcccctttcaccctccggccgaacagacgacctgaacgccatcctcaacactattaacacggccataacttacgtaaatattgcggttatggactattatccgctgatcatatacgagaagaaccaccactattggccgtttatcgacgacgctctgcgaaaggcggctgtagaacggggcgtggctgtgaagctccttatttcgtggtggaagcactcgaatcccagtgaggaccggtatctcaggtcactgcaggacttggcatccaaagaagacaaaattgatatacaaattcgtcgattcatagtgccgactgattcgagccaggagaagattccctttggccgtgtcaaccacaacaagtacatggttacagatcgagtggcttacatcggaacttctaactggagtggagactacttcacggacaccgctggcattggactggtgctaagcgaaaccttcgagaccgagaccactaataccttaagaagcgatctgcggaatgttttcgagcgggactggaatagcaagtacgccacaccgctggtataatcgcacaacgttgtaatgtgattattccgatgccaatgttattttaactattttagctcccgacaattgttcaatcctattcattgcttttattcagttttgatcatgcgtgaattcaaataatacgcgaatttacgaattggaataatgcaagtatttaaagtatggagatacagtgagcttgaaatcataacgtaataaaattcattctttcat

SEQ ID NO: 2319 - protein, 494 aa, DROSOPHILA; identical to SEQ ID NO: 2316

SEQ ID NO: 2320 - DNA, 4477 bp, DROSOPHILA
gtggagcttgcaaaccgtgtccagcacaaaatgtgacaagctcttcgtcttgatgttgctgctgtctgggcagttggcgaagatcttcagggccaggagcaaaggatcctgatggcccattaaagcccttccaaattcctggcgcagatgtggcgactttttcttgctatacatgttccacttctcgcggaacagcttaaaaaactcctccgcctttgcgtccaaggtggcgtcaaagttacagccgtcgattccagcacctgtcgtgatgtcctccaagcgcttgatcttcaggttgctcattaggttctccatgttctcctcgtccgactcaaagccggcgggtattgcgttgtacatgtggctcttgcgtgccatttctcacgggtttcccgtgccactgcagagcgaagcaagtgcaattgccaattgcaaatgcaattgacggtaaaggcgaacaaacttcgatggaaatatcgatttcaaaaacatcgatgtttcagtgaccgcccaaaacaacaccaaacgtcagcagaaaccgccaaaagttatagatttttttaaagcaagattatttttttcgcagattaatgccttgttgctagaaagctatatatatatatatatatattaatattaaatatatatttataattagcaattttttatacagtgaacaaggtacatgaaatccgccggtgcaaaattatttacaatttttactttgattggaaaatttatttattaaatttgcttggaaatacggcaatcatttgtattgcaggattgaaatccaaagaacaactatttgataaaagtctagctaaaataataagtattatagttattctaactgtgttgcctttgaagtccaactggcaaatgagttaatgagtttttattttaattaaattgttaaaacttgcctatttttactatagctgtatttagctctattttcctaacgcattggcagcactgcccacaattcagcagcgtggcagccccgttgaacagcacacgtgcatttttgttttagtttgcacgttgaaaaatgaagctggctacgaaaaaaattaagaccctgggcaaatccaagcctgacctaagcaaaaagaagcccgccaaggatgccatcaggaagacgaaaccgcaaacaacctctgaaacgaaagttactccaagaaacccgaagcagaaagtcgccgaaccagtgaagaatgggaagaccacaaaaaagggatttaagaaatcccacaaagaggagcttgaagggcttaaagatatagacccagaattttatgatttcttaaaaaataatgataagaagctactggactttaatttactggacacagatgatgatgatgatgaagagggggatgaggaagacaaggaagatacggtaactaaggaaagtaaggatgacgaggatgacgaagagaagtaccacaaacccagcaaggatttggaggtggctagcgatgagagtgactttgaggtcgacgaagaggacgatgcggcagctggaggtatccaaaagatcaccctcaacctgttgcatcagtgggaacagcaattgggccaggccaacatatctattgacattgtccgcaaggttatccaggctttcaattcagctctggctagtatctctgccgacggagcggacggaggagagaacaagcataatgctgccgcatttaaggtagtgggggcagctgcgtttaatggagtaattcagctctgcgtaatccacctgcagcccgctataattcgattgctgggcgttagacccaacagcagcctaccgctgcacaagcacaagaagtgggtcaaggtgcgaggctgtttgcgctactacctcaccgatttgattcgtctggtggagcaggtgtccagtccaaatatcttgggcgtgttgctgaagcatttgcatcaaatggccggcatggtggttcccttttcggcacttggaaagaccatattaaagcgtctggttgtcttatggtccactggagatgaaacagttcgtgttctggcctttctctgcattctgaagataaccaggaaacagcaggtaaatattctgaactagacacttattgtgacccctgctaacaccaatggttcttgcaggcgaccatgctgaatcacgttctaaaagccatgtacctggcctatgtacgcaattccaagttcgtgtcgccgaacactttaccaggaatcaactttatgcgccgctcgctggtggagatgttcgcgttggatttaaacgtcagttatcaacatgtcttcctctacatccgacagttggccattcacctgcgaaatgcagtgatccttaagaaaaaggacagtttccaagcggtttacaactggcaatttattaactcgctgcgcttgtgggcagatctcctgggagcaagtgcgaacaaaccacagttgcagcctctgatttatccccttgttaccattgccaccggagtgattcgactgatacccaccgctcaatacttcccattgcgattccactgtctgcagaccctaatttcactggccaaagagacaaacacatatgtgccggtgcttccactcattgtggaggtattaaagagcaatacctttaaccgcaagcactcggcggtatccatgaagccagtgcagtttacctgcgtccttaggcttaacaaagggcagttggcggaaaatggcttccgcgatgaggtgatcgagcaggtgtgtgggcttctgttggaatatctcgctcatgagtccacctcgctggcctttagtgatttggtggtgcccactgtcatggccatcaaaacgtaccttaaggaatgcaggaatgccaattatgctcgaaaacttaaacagctgctagagaagattcaggagagtgcccgcttcatagagcagcaacgtggcaagagcagtgtcacttttgacataaaggatgcgcaggcggtcgccgcctgggagcagcaactccgtcttaagcgcactccactagacgtctactatgccagctggctaaagacacacgagaccaagaagcgacgacaggcagcacatacagatgaaatcaatgcggactatgatgtgcccaagctaaagaaactaccggtcaaaaccggagtaccagtgagaaatgaaaacggcgaggtcgaactcttcccctcggactcggaagatgaaggcgatgatggcctgcatttgggatcagatgatgatgacgacgaggatgtacaggaggaggaggaggtggaagttgagcaccctaaagccaaaaaggcgaagaaagagaagcccgagaaacaaaaacctcggccagcaacagtggaagatgattacgacgaggcgggtggagccgtggatattgttaaggacttagatttgaacgaatggtaaaacatttaagatcaatttaactatatttacacattaaattaaaaggaaaaccaatatagagttacttctccggtggctccttgccaggaataaactcatactccttgtatttgggaaaggttccaatagttggtccgtccacctgcttgggcagtgccttgtcgtccttgcccttggcgtatgttgcttccaattcggcggcgttgcgtttcttcatgtccataatctgaagatttttcaccagctcttcgcgggtgggcggctcctcccggcgccctcgtagccacgcctcccattcggcagtcagctcctggtcgaaggcttccttatccgctggctcgaaccaccgggaaggcttcctctttccaatcgaaggatttgcaggaatttcgtagtacttattcccgaaatagtcctccccaatgtaatccccacgaaactgccgcggtcgtagggacttccaaaagttcttgaagatgatgccgatcacatcgcgcgtcggcttgttagccatgcttattttaacttaagagcgaggaacttaaatttattttagaatttgaggttaggtcttgcgtttgttatgacatgaacagctggtggcggtgttgcaaaatgccggcaggtttaaaagcgtaattcaaattcgtaaaattggtttcagtggcaatgcatagggactaaaccagtcccgcagaaaaattgccattaaatctgtacggagactattattgttgtattccatgtcctggagtactaatccaatgccagctgagtaagtaaaatgctctcccgaaaaactggaggtgcctataaaggcaaccctatcggtgactaagtacgagttgcagttaactctaccgccggaaatcctctccagttcatttgtggtgggtacaacaaaacgtcgctgcaagagcaaagaaattgttaataaaattgccaatacttataagctcattaccatttgtatatctactccttccgtaattttgtcgagcgcttgaagggacctcaagaagtgatcctcgctgggatccgaatacttccaccatgaaataag

SEQ ID NO: 2321 - DNA, 2418 bp, DROSOPHILA
gcagccccgttgaacagcacacgtgcatttttgttttagtttgcacgttgaaaaatgaagctggctacgaaaaaaattaagaccctgggcaaatccaagcctgacctaagcaaaaagaagcccgccaaggatgccatcaggaagacgaaaccgcaaacaacctctgaaacgaaagttactccaagaaacccgaagcagaaagtcgccgaaccagtgaagaatgggaagaccacaaaaaagggatttaagaaatcccacaaagaggagcttgaagggcttaaagatatagacccagaattttatgatttcttaaaaaataatgataagaagctactggactttaatttactggacacagatgatgatgatgatgaagagggggatgaggaagacaaggaagatacggtaactaaggaaagtaaggatgacgaggatgacgaagagaagtaccacaaacccagcaaggatttggaggtggctagcgatgagagtgactttgaggtcgacgaagaggacgatgcggcagctggaggtatccaaaagatcaccctcaacctgttgcatcagtgggaacagcaattgggccaggccaacatatctattgacattgtccgcaaggttatccaggctttcaattcagctctggctagtatctctgccgacggagcggacggaggagagaacaagcataatgctgccgcatttaaggtagtgggggcagctgcgtttaatggagtaattcagctctgcgtaatccacctgcagcccgctataattcgattgctgggcgttagacccaacagcagcctaccgctgcacaagcacaagaagtgggtcaaggtgcgaggctgtttgcgctactacctcaccgatttgattcgtctggtggagcaggtgtccagtccaaatatcttgggcgtgttgctgaagcatttgcatcaaatggccggcatggtggttcccttttcggcacttggaaagaccatattaaagcgtctggttgtcttatggtccactggagatgaaacagttcgtgttctggcctttctctgcattctgaagataaccaggaaacagcaggcgaccatgctgaatcacgttctaaaagccatgtacctggcctatgtacgcaattccaagttcgtgtcgccgaacactttaccaggaatcaactttatgcgccgctcgctggtggagatgttcgcgttggatttaaacgtcagttatcaacatgtcttcctctacatccgacagttggccattcacctgcgaaatgcagtgatccttaagaaaaaggacagtttccaagcggtttacaactggcaatttattaactcgctgcgcttgtgggcagatctcctgggagcaagtgcgaacaaaccacagttgcagcctctgatttatccccttgttaccattgccaccggagtgattcgactgatacccaccgctcaatacttcccattgcgattccactgtctgcagaccctaatttcactggccaaagagacaaacacatatgtgccggtgcttccactcattgtggaggtattaaagagcaatacctttaaccgcaagcactcggcggtatccatgaagccagtgcagtttacctgcgtccttaggcttaacaaagggcagttggcggaaaatggcttccgcgatgaggtgatcgagcaggtgtgtgggcttctgttggaatatctcgctcatgagtccacctcgctggcctttagtgatttggtggtgcccactgtcatggccatcaaaacgtaccttaaggaatgcaggaatgccaattatgctcgaaaacttaaacagctgctagagaagattcaggagagtgcccgcttcatagagcagcaacgtggcaagagcagtgtcacttttgacataaaggatgcgcaggcggtcgccgcctgggagcagcaactccgtcttaagcgcactccactagacgtctactatgccagctggctaaagacacacgagaccaagaagcgacgacaggcagcacatacagatgaaatcaatgcggactatgatgtgcccaagctaaagaaactaccggtcaaaaccggagtaccagtgagaaatgaaaacggcgaggtcgaactcttcccctcggactcggaagatgaaggcgatgatggcctgcatttgggatcagatgatgatgacgacgaggatgtacaggaggaggaggaggtggaagttgagcaccctaaagccaaaaaggcgaagaaagagaagcccgagaaacaaaaacctcggccagcaacagtggaagatgattacgacgaggcgggtggagccgtggatattgttaaggacttagatttgaacgaatggtaaaacatttaagatcaatttaactatatttacacattaaattaaaaggaaaaccaatatagagtt

SEQ ID NO: 2322 - protein, 766 aa, DROSOPHILA
MKLATKKIKTLGKSKPDLSKKKPAKDAIRKTKPQTTSETKVTPRNPKQKVAEPVKNGKTTKKGFKKSHKEELEGLKDIDPEFYDFLKNNDKKLLDFNLLDTDDDDDEEGDEEDKEDTVTKESKDDEDDEEKYHKPSKDLEVASDESDFEVDEEDDAAAGGIQKITLNLLHQWEQQLGQANISIDIVRKVIQAFNSALASISADGADGGENKHNAAAFKVVGAAAFNGVIQLCVIHLQPAIIRLLGVRPNSSLPLHKHKKWVKVRGCLRYYLTDLIRLVEQVSSPNILGVLLKHLHQMAGMVVPFSALGKTILKRLVVLWSTGDETVRVLAFLCILKITRKQQATMLNHVLKAMYLAYVRNSKFVSPNTLPGINFMRRSLVEMFALDLNVSYQHVFLYIRQLAIHLRNAVILKKKDSFQAVYNWQFINSLRLWADLLGASANKPQLQPLIYPLVTIATGVIRLIPTAQYFPLRFHCLQTLISLAKETNTYVPVLPLIVEVLKSNTFNRKHSAVSMKPVQFTCVLRLNKGQLAENGFRDEVIEQVCGLLLEYLAHESTSLAFSDLVVPTVMAIKTYLKECRNANYARKLKQLLEKIQESARFIEQQRGKSSVTFDIKDAQAVAAWEQQLRLKRTPLDVYYASWLKTHETKKRRQAAHTDEINADYDVPKLKKLPVKTGVPVRNENGEVELFPSDSEDEGDDGLHLGSDDDDDEDVQEEEEVEVEHPKAKKAKKEKPEKQKPRPATVEDDYDEAGGAVDIVKDLDLNEW

SEQ ID NO: 2323 - DNA, 6049 bp, DROSOPHILA
catttcgatggtaggtctcccaaggcaacagaagcacaatcatcaccagaacgaagagtataagcactggtatgatgtagccgtgcttgcaggaacagatatttcgctcatcctggagccctaggccgcaattgggacgccggcaacacgatgtggtcaaaggggttggctcttccggtgctctgggcactggctggtactctccgggtatctcatgcactacgcgacgctcggacatggcaaggggatcaggactaatgctgactggccattgtcaaacatttttcacagccgagcctatttattattcgcgcagttgtgggaaagtatcacccgcccacgcaaacaaatgggcagtgttggacagcacagcgcggtagtcgtctgcgctggctgctaaaaaaaagctaaaggataaattaatccaagtccctgctcagaaaaataagttgtcgtcagtgcattatttcagcatttacttcgatttaagttttaacgccatagagtccattaattctcttgaagttaataaatgtttatcgctttaattcaaaactgataaactttctatggtcctatttatttaacgacccaattttggcgggaaacaagccggcggaacattgctgacgcgtatgcgtgacgccagctaacactggtcgccgtggtaaagaatttagtctgtcttaaaatcttccggctgagagggctgaaaattttgacggcttcgaagcatttgctgcaatatcaatttcgtcgggtttatttcgagtatcgcttaatcaggacgcgaccatggctgcgagattgatgaacgcccaggcacaggtaggttctagagcggagcctgtgcctccagtcggccaatatataaccacggctatatatacgtttacgtatagaatctgtgaatggaaccccgaaattccaagctgcgataaagacaactggacagagcactgcgcgaaagtttacaaaaaatcattgcccatttcttacacacccagcaggatgtgggcagcgaaaaatagcaaatttttcgcacagcgttttctaacctaaaatcataaaattcgaagtggttaggtaaccgagttcgcagtgtttgtgattctacaggccctgcatcccaaacatgtatactgaatacgcagcagtgaaccatgcgaaatcgttagctctcaacaattaacagcgattcgtgggggttcgatggttggcatagttgcatttacataatcgccggggtccagttatttaaccaggaggcgaacaccctctagagcatatatcttgtggcggaggaccgtcttatctgtgacaggtttacttacactttgataatgccagcactaaatatagcttaaaaaagttgcgccgtttaacttgagtatcacgcgcattggaggagttttgcctttcaagtggggtttttccacgtcagcttcgagaaaggtttcactgtactctgcccataagttaacgacctatttgacgtaattgtcattgcaattgtttcgatttgcgtgtatgtacatacagtcgtgtcgtcacgtggttcttctaattggagtgttctgtagaatattgtaacaatttgaaaggcttacaaacaaactatatttccagctactttttatttttttattctgcagttcgaagaaccttaaagcactttggctagcacttaaaatactttgattgttaaatgtaaactttcaatcattttactaatctcaaaaaaatatttggaaaaatttcactctgaagcggtaaatggatcaatggattatttttggctattcaaaaatttcaagacgattaaaatttattagctttagcaatatattgatcttaaaacaagtgaaagcggtgataataatgttttacatttgttatatatgtatgcaagattaaatgtacagtaaagaagaattttcacagatatggtccccacatgattgtactcttgtcagaatatctttgggaattatcatttcctgatagaggaatcaatttaattaaagtgacgaggactcgtcctcttgacatgataatcaagtgtttattgggctaccaagcgaataaataaaatctcacagtgtgcgaagtgcaaataaactagagaatcacattgtgttaattacttgatcttgattgctaaatgtaccacttcaccatatttaacagttcgacttcttatctgctttccaggtgtgtcgactgggcaagcatgttgcgtccgaagccacagtggtgcgtcagttccacgcctcctgctacaccgcctccaaagtggctctgtccaagttcgactcggacgtctacctgccgtacgagaagctgaacaagcgcctggaagtggtgcgcggtcgcttgaaccgcccactgactctctccgagaaggtgctgtactcgcatctggacgatcccgcaaaccaggacatcgtgcgcggtacttcgtacctgcgtcttcgccccgatcgtgtggctatgcaggatgccactgcacagatggctctgcttcagtttatctcctccggactgaaaaaggtggctgtgccctccactgttcactgtgatcatttaatcgaggcccagattggtggacccaaggatttagcccgtgccaaggacctgaacaaggaagtgtacgatttcttggccagcacctgtgcaaagtacggattgggcttctggaagccaggcagcggaatcatccatcagatcattctggagaactacgctttccccggcctgctgatgattggtactgactcacacacccccaacggtggtggcttgggtggcctgtgcattggcgttggtggtgctgatgccgtcgatgtgatggccgacatcccctgggagctgaagtgccccaaggtgattggtgtcaatttgactggcaagatcagcggctggacctcgcccaaggatgttatcctgaaggttgccgatatcctgaccgtcaagggaggcaccggtgccatcattgagtatcacggcaagggtgttgactctatctcttgtacaggcatggccaccatctgcaacatgggtgctgagatcggagctaccacctctctgttccccttcaaccagcgcatggctgattacctgaaatcgacaggccgtgctggcattgcctccgaagcccagaagtaccaggccaagattctgtccgctgacaagaactgcgagtacgatgagctgattgaaatcaacctagacaccctggagccccatgttaacggaccattcactcccgatttgggccatcccatcagcaagctaggcgagaactcgaagaagaacgggtaccctatggacatccgtgtaggtcttattggctcttgcaccaactcttcgtatgaggacatgggtcgctgcgccagcatcgccaaggatgccatgagccatggcctcaagtcgaagattcctttcaatgtgactcccggatcagagcagatccgtgccaccatcgagcgcgacggcatctctgaggtgttcgacaagttcggcggtaccgttctggccaacgcttgcggtccctgcattggacagtgggatcgtaaggacgttaagaagggcgacaagaacaccattgtcacctcctacaaccgaaactttactggcaggaacgacgctaacccggccacccattgctttgtcactagtcccgagttggtcaccgctctgtccatcgccggtcgtctggacttcaacccgctgaccgacgagcttactggtgctgatggcaagaagttcaagctcaaggctcccttcggcgacgagctgcccgccaagggtttcgatcccggccaggacacctacactgctcccccacccgtaagtacatttaaattcccaaactgatttatattgttcttaagaatcaatatggaaatcccacagagcggcgaaaatgtcaaggtggctgtcgaccccaagtcgacgcgtctgcagctgctggagccttttgacaagtggaacggccaggatctgaccgatctgactgtgctgatcaaggttaagggaaagtgcaccactgaccacatctccgctgccggaccctggctgaagtaccgtggccatttggacaacatctccaacaacatgtttatcggagccaccaactacgaaaacaacgagatgaacaacatcaagaaccaacgcaacggtagctggggaggagttcccgacgtagcccgcgactacaaggccaacggcatcaagtgggtggccgtcggcgatgagaactacggcgagggttcgtcccgcgagcatgccgctttggagccccgtcaccttggtggtcgtgccattatcgtcaagtccttcgcccgtatccacgagaccaacctgaagaaacagggtcttctgcctctcaccttcgccaatcccgctgattacgataaggtttgcgactcttagcttctgtgactaaggtcatattaaccatatctttgtacttcaacagatccagcccacgagcaaaatctccctgctcaacctgaaatcccttgcgcctggaaagcccgtagatgccgaaatcaagaatggcgacaaggtcgagaggatcaagcttaaccacaccctgaacgacctacagatcggctggttcaaggccggcagcgctctcaaccgcatgaaggagctggcccagtaaatggtcctggacctacttaagacacccagtcaagaagcctgatcccaaccttcttcctgtaggtgaacacactcaaattcacaacggaagcaatcgaattatggtattgttattcaattcttttcaaattgtttatattatattttgactatatcgagtgtgcagctttaaaagtgaattatgtagccgaacgatagcgagaaattgtaagagttttatatatataattatacacaattttatttttaattctggctatgcatgcgtttccttcaatttttgttctttttgaatttgtccaaatgctctacagattgcctctactatgaaactgttttaagtgcgaataaaactcaagtaatatgtattaaaccgattctttcatttaataaacaacagttaaaacaaaaaagcggacaataagtgccgtcaattcatcccgtgtcctctatattttcttcattattaacataattttatcaattataagacgtaagacacaacaatttgcacaataaagcataatatcaataatagaatctactggggcagattacttaattattcacccatagcttttggaaaatatgtcgaattgtcaatcaaatataaattattagtaaatccaattctaggactatgaaacgcagagctcaaagtaaaacttccgttgcttccagcacggatttcttttcactctccgacaagccatcgttgggaagaagacgagccctactggctgcaaaacttaagcgtcaggaacagagtacaacgtcctttgactccagcacaggctcctacacttatacagacgccacttctttgcgaaagacccccatcaccttctcacctagcccggagttcatgaagaccgccaaggctaaattaaagttaatcgcattgtatgaagatcacaaatgcttgtggaatcagcgcaacaaagatttcttcaatttcgagctcaaagacagaatctgggatgcgattgccgatgaaatgaaagcggactcgccatctgggttttggaaacatatgattcacaagcttcgctataaagttgagatggagcgcatacaagagcagggtgcaaagttttcgggtgaatcgccgcagccaaaactattttattcagataatctgctgtttctaaatcacatgtttgaccgagaagggggaaaaccccctcgagagattgtatgtttatagttaacgaacaaatcactttagtatttattctactttttactcagccaatgcatcttaagccttcgggacctactctcgaaaagaatccgtctagaaacctgcgacatgttcaggaaaaacgtaaacgtacgcccattagagaaaagatggcttcgcttgagaagttgagga

SEQ ID NO: 2324 - DNA, 2794 bp, DROSOPHILA
cacccagcaggatgtgggcagcgaaaaatagcaaatttttcgcacagcgttttctaacctaaaatcataaaattcgaagtggttaggtgtgtcgactgggcaagcatgttgcgtccgaagccacagtggtgcgtcagttccacgcctcctgctacaccgcctccaaagtggctctgtccaagttcgactcggacgtctacctgccgtacgagaagctgaacaagcgcctggaagtggtgcgcggtcgcttgaaccgcccactgactctctccgagaaggtgctgtactcgcatctggacgatcccgcaaaccaggacatcgtgcgcggtacttcgtacctgcgtcttcgccccgatcgtgtggctatgcaggatgccactgcacagatggctctgcttcagtttatctcctccggactgaaaaaggtggctgtgccctccactgttcactgtgatcatttaatcgaggcccagattggtggacccaaggatttagcccgtgccaaggacctgaacaaggaagtgtacgatttcttggccagcacctgtgcaaagtacggattgggcttctggaagccaggcagcggaatcatccatcagatcattctggagaactacgctttccccggcctgctgatgattggtactgactcacacacccccaacggtggtggcttgggtggcctgtgcattggcgttggtggtgctgatgccgtcgatgtgatggccgacatcccctgggagctgaagtgccccaaggtgattggtgtcaatttgactggcaagatcagcggctggacctcgcccaaggatgttatcctgaaggttgccgatatcctgaccgtcaagggaggcaccggtgccatcattgagtatcacggcaagggtgttgactctatctcttgtacaggcatggccaccatctgcaacatgggtgctgagatcggagctaccacctctctgttccccttcaaccagcgcatggctgattacctgaaatcgacaggccgtgctggcattgcctccgaagcccagaagtaccaggccaagattctgtccgctgacaagaactgcgagtacgatgagctgattgaaatcaacctagacaccctggagccccatgttaacggaccattcactcccgatttgggccatcccatcagcaagctaggcgagaactcgaagaagaacgggtaccctatggacatccgtgtaggtcttattggctcttgcaccaactcttcgtatgaggacatgggtcgctgcgccagcatcgccaaggatgccatgagccatggcctcaagtcgaagattcctttcaatgtgactcccggatcagagcagatccgtgccaccatcgagcgcgacggcatctctgaggtgttcgacaagttcggcggtaccgttctggccaacgcttgcggtccctgcattggacagtgggatcgtaaggacgttaagaagggcgacaagaacaccattgtcacctcctacaaccgaaactttactggcaggaacgacgctaacccggccacccattgctttgtcactagtcccgagttggtcaccgctctgtccatcgccggtcgtctggacttcaacccgctgaccgacgagcttactggtgctgatggcaagaagttcaagctcaaggctcccttcggcgacgagctgcccgccaagggtttcgatcccggccaggacacctacactgctcccccacccagcggcgaaaatgtcaaggtggctgtcgaccccaagtcgacgcgtctgcagctgctggagccttttgacaagtggaacggccaggatctgaccgatctgactgtgctgatcaaggttaagggaaagtgcaccactgaccacatctccgctgccggaccctggctgaagtaccgtggccatttggacaacatctccaacaacatgtttatcggagccaccaactacgaaaacaacgagatgaacaacatcaagaaccaacgcaacggtagctggggaggagttcccgacgtagcccgcgactacaaggccaacggcatcaagtgggtggccgtcggcgatgagaactacggcgagggttcgtcccgcgagcatgccgctttggagccccgtcaccttggtggtcgtgccattatcgtcaagtccttcgcccgtatccacgagaccaacctgaagaaacagggtcttctgcctctcaccttcgccaatcccgctgattacgataagatccagcccacgagcaaaatctccctgctcaacctgaaatcccttgcgcctggaaagcccgtagatgccgaaatcaagaatggcgacaaggtcgagaggatcaagcttaaccacaccctgaacgacctacagatcggctggttcaaggccggcagcgctctcaaccgcatgaaggagctggcccagtaaatggtcctggacctacttaagacacccagtcaagaagcctgatcccaaccttcttcctgtaggtgaacacactcaaattcacaacggaagcaatcgaattatggtattgttattcaattcttttcaaattgtttatattatattttgactatatcgagtgtgcagctttaaaagtgaattatgtagccgaacgatagcgagaaattgtaagagttttatatatataattatacacaattttatttttaattctggctatgcatgcgtttccttcaatttttgttctttttgaatttgtccaaatgctctacagattgcctctactatgaaactgttttaagtgcgaataaaactcaagtaatatgtattaaaccgat

SEQ ID NO: 2325 - protein, 683 aa, DROSOPHILA
MQDATAQMALLQFISSGLKKVAVPSTVHCDHLIEAQIGGPKDLARAKDLNKEVYDFLASTCAKYGLGFWKPGSGIIHQIILENYAFPGLLMIGTDSHTPNGGGLGGLCIGVGGADAVDVMADIPWELKCPKVIGVNLTGKISGWTSPKDVILKVADILTVKGGTGAIIEYHGKGVDSISCTGMATICNMGAEIGATTSLFPFNQRMADYLKSTGRAGIASEAQKYQAKILSADKNCEYDELIEINLDTLEPHVNGPFTPDLGHPISKLGENSKKNGYPMDIRVGLIGSCTNSSYEDMGRCASIAKDAMSHGLKSKIPFNVTPGSEQIRATIERDGISEVFDKFGGTVLANACGPCIGQWDRKDVKKGDKNTIVTSYNRNFTGRNDANPATHCFVTSPELVTALSIAGRLDFNPLTDELTGADGKKFKLKAPFGDELPAKGFDPGQDTYTAPPPSGENVKVAVDPKSTRLQLLEPFDKWNGQDLTDLTVLIKVKGKCTTDHISAAGPWLKYRGHLDNISNNMFIGATNYENNEMNNIKNQRNGSWGGVPDVARDYKANGIKWVAVGDENYGEGSSREHAALEPRHLGGRAIIVKSFARIHETNLKKQGLLPLTFANPADYDKIQPTSKISLLNLKSLAPGKPVDAEIKNGDKVERIKLNHTLNDLQIGWFKAGSALNRMKELAQ

SEQ ID NO: 2326 - DNA, 6352 bp, DROSOPHILA
ccacaatccgcacgcgcagcttgggtctgccggcatctccattcgacagtagctgctgaaagagttgatctccaggcccggtgctgctatcgttgacgtccaagccgcgcagtgtccagtgcggagaaacgatgtccaacgatgccttggccctgcctagtagtagctgccaggcatcaaaggtgctactcagttgggggtggctttgccattggctgtagttcaaccccaagggcaagctctccaccagttcgagttgacatggtaacggcttttccaccggaacggggctgtttccgttttcatttcgatggtaggtctcccaaggcaacagaagcacaatcatcaccagaacgaagagtataagcactggtatgatgtagccgtgcttgcaggaacagatatttcgctcatcctggagccctaggccgcaattgggacgccggcaacacgatgtggtcaaaggggttggctcttccggtgctctgggcactggctggtactctccgggtatctcatgcactacgcgacgctcggacatggcaaggggatcaggactaatgctgactggccattgtcaaacatttttcacagccgagcctatttattattcgcgcagttgtgggaaagtatcacccgcccacgcaaacaaatgggcagtgttggacagcacagcgcggtagtcgtctgcgctggctgctaaaaaaaagctaaaggataaattaatccaagtccctgctcagaaaaataagttgtcgtcagtgcattatttcagcatttacttcgatttaagttttaacgccatagagtccattaattctcttgaagttaataaatgtttatcgctttaattcaaaactgataaactttctatggtcctatttatttaacgacccaattttggcgggaaacaagccggcggaacattgctgacgcgtatgcgtgacgccagctaacactggtcgccgtggtaaagaatttagtctgtcttaaaatcttccggctgagagggctgaaaattttgacggcttcgaagcatttgctgcaatatcaatttcgtcgggtttatttcgagtatcgcttaatcaggacgcgaccatggctgcgagattgatgaacgcccaggcacaggtaggttctagagcggagcctgtgcctccagtcggccaatatataaccacggctatatatacgtttacgtatagaatctgtgaatggaaccccgaaattccaagctgcgataaagacaactggacagagcactgcgcgaaagtttacaaaaaatcattgcccatttcttacacacccagcaggatgtgggcagcgaaaaatagcaaatttttcgcacagcgttttctaacctaaaatcataaaattcgaagtggttaggtaaccgagttcgcagtgtttgtgattctacaggccctgcatcccaaacatgtatactgaatacgcagcagtgaaccatgcgaaatcgttagctctcaacaattaacagcgattcgtgggggttcgatggttggcatagttgcatttacataatcgccggggtccagttatttaaccaggaggcgaacaccctctagagcatatatcttgtggcggaggaccgtcttatctgtgacaggtttacttacactttgataatgccagcactaaatatagcttaaaaaagttgcgccgtttaacttgagtatcacgcgcattggaggagttttgcctttcaagtggggtttttccacgtcagcttcgagaaaggtttcactgtactctgcccataagttaacgacctatttgacgtaattgtcattgcaattgtttcgatttgcgtgtatgtacatacagtcgtgtcgtcacgtggttcttctaattggagtgttctgtagaatattgtaacaatttgaaaggcttacaaacaaactatatttccagctactttttatttttttattctgcagttcgaagaaccttaaagcactttggctagcacttaaaatactttgattgttaaatgtaaactttcaatcattttactaatctcaaaaaaatatttggaaaaatttcactctgaagcggtaaatggatcaatggattatttttggctattcaaaaatttcaagacgattaaaatttattagctttagcaatatattgatcttaaaacaagtgaaagcggtgataataatgttttacatttgttatatatgtatgcaagattaaatgtacagtaaagaagaattttcacagatatggtccccacatgattgtactcttgtcagaatatctttgggaattatcatttcctgatagaggaatcaatttaattaaagtgacgaggactcgtcctcttgacatgataatcaagtgtttattgggctaccaagcgaataaataaaatctcacagtgtgcgaagtgcaaataaactagagaatcacattgtgttaattacttgatcttgattgctaaatgtaccacttcaccatatttaacagttcgacttcttatctgctttccaggtgtgtcgactgggcaagcatgttgcgtccgaagccacagtggtgcgtcagttccacgcctcctgctacaccgcctccaaagtggctctgtccaagttcgactcggacgtctacctgccgtacgagaagctgaacaagcgcctggaagtggtgcgcggtcgcttgaaccgcccactgactctctccgagaaggtgctgtactcgcatctggacgatcccgcaaaccaggacatcgtgcgcggtacttcgtacctgcgtcttcgccccgatcgtgtggctatgcaggatgccactgcacagatggctctgcttcagtttatctcctccggactgaaaaaggtggctgtgccctccactgttcactgtgatcatttaatcgaggcccagattggtggacccaaggatttagcccgtgccaaggacctgaacaaggaagtgtacgatttcttggccagcacctgtgcaaagtacggattgggcttctggaagccaggcagcggaatcatccatcagatcattctggagaactacgctttccccggcctgctgatgattggtactgactcacacacccccaacggtggtggcttgggtggcctgtgcattggcgttggtggtgctgatgccgtcgatgtgatggccgacatcccctgggagctgaagtgccccaaggtgattggtgtcaatttgactggcaagatcagcggctggacctcgcccaaggatgttatcctgaaggttgccgatatcctgaccgtcaagggaggcaccggtgccatcattgagtatcacggcaagggtgttgactctatctcttgtacaggcatggccaccatctgcaacatgggtgctgagatcggagctaccacctctctgttccccttcaaccagcgcatggctgattacctgaaatcgacaggccgtgctggcattgcctccgaagcccagaagtaccaggccaagattctgtccgctgacaagaactgcgagtacgatgagctgattgaaatcaacctagacaccctggagccccatgttaacggaccattcactcccgatttgggccatcccatcagcaagctaggcgagaactcgaagaagaacgggtaccctatggacatccgtgtaggtcttattggctcttgcaccaactcttcgtatgaggacatgggtcgctgcgccagcatcgccaaggatgccatgagccatggcctcaagtcgaagattcctttcaatgtgactcccggatcagagcagatccgtgccaccatcgagcgcgacggcatctctgaggtgttcgacaagttcggcggtaccgttctggccaacgcttgcggtccctgcattggacagtgggatcgtaaggacgttaagaagggcgacaagaacaccattgtcacctcctacaaccgaaactttactggcaggaacgacgctaacccggccacccattgctttgtcactagtcccgagttggtcaccgctctgtccatcgccggtcgtctggacttcaacccgctgaccgacgagcttactggtgctgatggcaagaagttcaagctcaaggctcccttcggcgacgagctgcccgccaagggtttcgatcccggccaggacacctacactgctcccccacccgtaagtacatttaaattcccaaactgatttatattgttcttaagaatcaatatggaaatcccacagagcggcgaaaatgtcaaggtggctgtcgaccccaagtcgacgcgtctgcagctgctggagccttttgacaagtggaacggccaggatctgaccgatctgactgtgctgatcaaggttaagggaaagtgcaccactgaccacatctccgctgccggaccctggctgaagtaccgtggccatttggacaacatctccaacaacatgtttatcggagccaccaactacgaaaacaacgagatgaacaacatcaagaaccaacgcaacggtagctggggaggagttcccgacgtagcccgcgactacaaggccaacggcatcaagtgggtggccgtcggcgatgagaactacggcgagggttcgtcccgcgagcatgccgctttggagccccgtcaccttggtggtcgtgccattatcgtcaagtccttcgcccgtatccacgagaccaacctgaagaaacagggtcttctgcctctcaccttcgccaatcccgctgattacgataaggtttgcgactcttagcttctgtgactaaggtcatattaaccatatctttgtacttcaacagatccagcccacgagcaaaatctccctgctcaacctgaaatcccttgcgcctggaaagcccgtagatgccgaaatcaagaatggcgacaaggtcgagaggatcaagcttaaccacaccctgaacgacctacagatcggctggttcaaggccggcagcgctctcaaccgcatgaaggagctggcccagtaaatggtcctggacctacttaagacacccagtcaagaagcctgatcccaaccttcttcctgtaggtgaacacactcaaattcacaacggaagcaatcgaattatggtattgttattcaattcttttcaaattgtttatattatattttgactatatcgagtgtgcagctttaaaagtgaattatgtagccgaacgatagcgagaaattgtaagagttttatatatataattatacacaattttatttttaattctggctatgcatgcgtttccttcaatttttgttctttttgaatttgtccaaatgctctacagattgcctctactatgaaactgttttaagtgcgaataaaactcaagtaatatgtattaaaccgattctttcatttaataaacaacagttaaaacaaaaaagcggacaataagtgccgtcaattcatcccgtgtcctctatattttcttcattattaacataattttatcaattataagacgtaagacacaacaatttgcacaataaagcataatatcaataatagaatctactggggcagattacttaattattcacccatagcttttggaaaatatgtcgaattgtcaatcaaatataaattattagtaaatccaattctaggactatgaaacgcagagctcaaagtaaaacttccgttgcttccagcacggatttcttttcactctccgacaagccatcgttgggaagaagacgagccctactggctgcaaaacttaagcgtcaggaacagagtacaacgtcctttgactccagcacaggctcctacacttatacagacgccacttctttgcgaaagacccccatcaccttctcacctagcccggagttcatgaagaccgccaaggctaaattaaagttaatcgcattgtatgaagatcacaaatgcttgtggaatcagcgcaacaaagatttcttcaatttcgagctcaaagacagaatctgggatgcgattgccgatgaaatgaaagcggactcgccatctgggttttggaaacatatgattcacaagcttcgctataaagttgagatggagcgcatacaagagcagggtgcaaagttttcgggtgaatcgccgcagccaaaactattttattcagataatctgctgtttctaaatcacatgtttgaccgagaagggggaaaaccccctcgagagattgtatgtttatagttaacgaacaaatcactttagtatttattctactttttactcagccaatgcatcttaagccttcgggacctactctcgaaaagaatccgtctagaaacctgcgacatgttcaggaaaaacgtaaacgtacgcccattagagaaaagatggcttcgcttgagaagttgagga

SEQ ID NO: 2327 - DNA, 2839 bp, DROSOPHILA
cggctgagagggctgaaaattttgacggcttcgaagcatttgctgcaatatcaatttcgtcgggtttatttcgagtatcgcttaatcaggacgcgaccatggctgcgagattgatgaacgcccaggcacaggtgtgtcgactgggcaagcatgttgcgtccgaagccacagtggtgcgtcagttccacgcctcctgctacaccgcctccaaagtggctctgtccaagttcgactcggacgtctacctgccgtacgagaagctgaacaagcgcctggaagtggtgcgcggtcgcttgaaccgcccactgactctctccgagaaggtgctgtactcgcatctggacgatcccgcaaaccaggacatcgtgcgcggtacttcgtacctgcgtcttcgccccgatcgtgtggctatgcaggatgccactgcacagatggctctgcttcagtttatctcctccggactgaaaaaggtggctgtgccctccactgttcactgtgatcatttaatcgaggcccagattggtggacccaaggatttagcccgtgccaaggacctgaacaaggaagtgtacgatttcttggccagcacctgtgcaaagtacggattgggcttctggaagccaggcagcggaatcatccatcagatcattctggagaactacgctttccccggcctgctgatgattggtactgactcacacacccccaacggtggtggcttgggtggcctgtgcattggcgttggtggtgctgatgccgtcgatgtgatggccgacatcccctgggagctgaagtgccccaaggtgattggtgtcaatttgactggcaagatcagcggctggacctcgcccaaggatgttatcctgaaggttgccgatatcctgaccgtcaagggaggcaccggtgccatcattgagtatcacggcaagggtgttgactctatctcttgtacaggcatggccaccatctgcaacatgggtgctgagatcggagctaccacctctctgttccccttcaaccagcgcatggctgattacctgaaatcgacaggccgtgctggcattgcctccgaagcccagaagtaccaggccaagattctgtccgctgacaagaactgcgagtacgatgagctgattgaaatcaacctagacaccctggagccccatgttaacggaccattcactcccgatttgggccatcccatcagcaagctaggcgagaactcgaagaagaacgggtaccctatggacatccgtgtaggtcttattggctcttgcaccaactcttcgtatgaggacatgggtcgctgcgccagcatcgccaaggatgccatgagccatggcctcaagtcgaagattcctttcaatgtgactcccggatcagagcagatccgtgccaccatcgagcgcgacggcatctctgaggtgttcgacaagttcggcggtaccgttctggccaacgcttgcggtccctgcattggacagtgggatcgtaaggacgttaagaagggcgacaagaacaccattgtcacctcctacaaccgaaactttactggcaggaacgacgctaacccggccacccattgctttgtcactagtcccgagttggtcaccgctctgtccatcgccggtcgtctggacttcaacccgctgaccgacgagcttactggtgctgatggcaagaagttcaagctcaaggctcccttcggcgacgagctgcccgccaagggtttcgatcccggccaggacacctacactgctcccccacccagcggcgaaaatgtcaaggtggctgtcgaccccaagtcgacgcgtctgcagctgctggagccttttgacaagtggaacggccaggatctgaccgatctgactgtgctgatcaaggttaagggaaagtgcaccactgaccacatctccgctgccggaccctggctgaagtaccgtggccatttggacaacatctccaacaacatgtttatcggagccaccaactacgaaaacaacgagatgaacaacatcaagaaccaacgcaacggtagctggggaggagttcccgacgtagcccgcgactacaaggccaacggcatcaagtgggtggccgtcggcgatgagaactacggcgagggttcgtcccgcgagcatgccgctttggagccccgtcaccttggtggtcgtgccattatcgtcaagtccttcgcccgtatccacgagaccaacctgaagaaacagggtcttctgcctctcaccttcgccaatcccgctgattacgataagatccagcccacgagcaaaatctccctgctcaacctgaaatcccttgcgcctggaaagcccgtagatgccgaaatcaagaatggcgacaaggtcgagaggatcaagcttaaccacaccctgaacgacctacagatcggctggttcaaggccggcagcgctctcaaccgcatgaaggagctggcccagtaaatggtcctggacctacttaagacacccagtcaagaagcctgatcccaaccttcttcctgtaggtgaacacactcaaattcacaacggaagcaatcgaattatggtattgttattcaattcttttcaaattgtttatattatattttgactatatcgagtgtgcagctttaaaagtgaattatgtagccgaacgatagcgagaaattgtaagagttttatatatataattatacacaattttatttttaattctggctatgcatgcgtttccttcaatttttgttctttttgaatttgtccaaatgctctacagattgcctctactatgaaactgttttaagtgcgaataaaactcaagtaatatgtattaaaccgat

SEQ ID NO: 2328 - protein, 787 aa, DROSOPHILA
MAARLMNAQAQVCRLGKHVASEATVVRQFHASCYTASKVALSKFDSDVYLPYEKLNKRLEVVRGRLNRPLTLSEKVLYSHLDDPANQDIVRGTSYLRLRPDRVAMQDATAQMALLQFISSGLKKVAVPSTVHCDHLIEAQIGGPKDLARAKDLNKEVYDFLASTCAKYGLGFWKPGSGIIHQIILENYAFPGLLMIGTDSHTPNGGGLGGLCIGVGGADAVDVMADIPWELKCPKVIGVNLTGKISGWTSPKDVILKVADILTVKGGTGAIIEYHGKGVDSISCTGMATICNMGAEIGATTSLFPFNQRMADYLKSTGRAGIASEAQKYQAKILSADKNCEYDELIEINLDTLEPHVNGPFTPDLGHPISKLGENSKKNGYPMDIRVGLIGSCTNSSYEDMGRCASIAKDAMSHGLKSKIPFNVTPGSEQIRATIERDGISEVFDKFGGTVLANACGPCIGQWDRKDVKKGDKNTIVTSYNRNFTGRNDANPATHCFVTSPELVTALSIAGRLDFNPLTDELTGADGKKFKLKAPFGDELPAKGFDPGQDTYTAPPPSGENVKVAVDPKSTRLQLLEPFDKWNGQDLTDLTVLIKVKGKCTTDHISAAGPWLKYRGHLDNISNNMFIGATNYENNEMNNIKNQRNGSWGGVPDVARDYKANGIKWVAVGDENYGEGSSREHAALEPRHLGGRAIIVKSFARIHETNLKKQGLLPLTFANPADYDKIQPTSKISLLNLKSLAPGKPVDAEIKNGDKVERIKLNHTLNDLQIGWFKAGSALNRMKELAQ

SEQ ID NO: 2329 - DNA, 4481 bp, DROSOPHILA
tgtaagccgtgctcctcctttggctctctctcatttttgataacaacatgcaagaggttatcagaaacggcacaaaccacagcaacaacaactaaagagggcggccgcgtggttgtaatttaatacacatgcagaaggcacgcacacttacacacgtggagccgccaacaagcggcgcttataaccacaaaatggccacgggatatatttgcaaaacatttaaaaaattgcaaatgcggagaacaaaaaatcgcaacaaaagcaaaggcaaatgcggttgaagctaatttgcgaattcaacgggcggggtgcggaattgtgggcggagcagcaccgcatggcgatttggctgggatcggggatctttttcgccatattgcgactctcaccttctctcgttttagcctggctgcggttttccagaaccgggaagtccgtcggcaaggccgtggaataccgtgacaagcagcgcaagactttgtcttaagacgaaattcgcgatccgttgtttgcggtcccccgttttccttcctcacgcacacactcaaaatttcttcggctgctgcagcttcttttccgcgtatccagggctgctcgacacagctggcgatgaaatccctgtgattttcacggctgcgttattatggccgcttccagggactttccttttggatttcctgcagttttttcgcgaattaaagccgaaagatgacttattgacgagcggatgaccatatttcggatttgggaaaaatccagctgtgctgcaaacgaaaaataccagctgtgaacgtttttggtattaatatttaccaaataaataaatttatatttatttcgaaaacaatgaaaattccttaataacattacattacttctttattaggagtgcttaagtattcttttaaataatgaattataattaaaattataatctgtttgtacagtgttgacaaacgagcactttttgtagaaccatatacattacccggtcacactgagcccgccaaaacagatatgttattgcgcttatttagaaaaccaagaaaaaacacgagaacacgtgaaaatacaaatctacccaaatgaaatgggtcctgctcagaaatccggaacagatattagtatcgatgatgaggaggaaatactggctctggaaaaactactgggtgcagcagaaaacgaaaatacaaaatctgcagagtcagaaaaagcaaaacccaccgcacccattttggtgccaaaactacgagaagacaacagttttgctaatgccttcaccttcgagaagatcgtgaaaccggaaaagcagaagaatgctgctatcattaaggaaccagagctggactcgtccgacgacgaggaggtaaagaacttcctggaacgaaagtacaatgagtacggcagtgatataaacaagagactgaagcagcagcaggagaacgcctacgagtccaaggtggcgagggaggtggatcaggagcttaagaagtctatccacgtggttacatccaccccgcaacccctgaaaaatccgcataatcctattaaacggcaatcggcggtgagcaccacgtttcaacgtcctccgccagtcgctgccgccgtggcatctacatcccagtcaagtgctcccgtatctgctgtttttacggatccagtcttcggactgcgcatgatcaatccgctagtctccagctcactgctgcaggagcgcatgacgggcaggaaacctgtgcccttctcaggcgttgcgtatcacatcgagcgaggcgatttggccaaagattgggtcattgctggcgcgctggtttccaaaaatcctgtaaaaaacaccaagaagggtgatccctactccacgtggaaactatccgatctacggggagaggttaaaacgatctcacttttcctttttaaagaggcccacaaatccctgtggaaaacagcggagggtctgtgcttggctgtgttgaatccaactattttcgagaggagagcgggaagctccgatgtggcctgcctatccatcgatagctcccagaaagtcatgatcctgggtcaatccaaagatttgggcacatgtcgggccaccaaaaaaaatggggacaagtgcacttcggtggttaacctaaccgactgtgattattgcatttttcatgtaaagcaggaatatggcaagatgtcccgacgttctgaactgcaatcggcgaccgcaggtcgtggtatcaatgaactaagaaacaaggttttgggtaggtagactttgattttgaagaaaactcaatataacttagttttttctttatgttaaggcaaaaacgaggtattttacggcggccaaacatttactgcagttcccgcaagaaaaagtgccaagttaatcaccaaggaacgtgatcgtctgagtatgctggctggctatgatgtttcccccttcgcccataccgctaaccacacctcaaagcccaaaacagccgaacccactaaaattccatatgcagaacgtggcggtcctgtttcccgtttggctggtggtgtggaagcgtctaggaaacagagagtccaagatctagagcggttgcgtctgcttaaagaggaaaatgagcgctttgaaaaaaagaagcaggcggagggccatgtcttgggaagtgataacaaaaaagaatctgaagcaggcacacccgctgtcagtatgcccactacacctgttccagataaattcaaaaatcgaggcttctcctttgatgccagtttaacgcccaagctttccggtagcgagaacttttcctttgaaatcaatgtaggatctcgccaggcacaaaatgctaagctgaaagcagctgccctgctgaagaagaagccactggagaagatcaaccccaactccacacgaggcagtgaaagtgggaagagaagagccatcgatgaactcaacgagaagttctctagcagcgccaagcgacaaaaaattgatgaggacgatcgggagttaatgcgcaaatcaagaatcgaaaaaataatggcagccacctcatcgcatacgaatctcgtggaaatgcgagagcgcgaagcgcaggaagagtactttaacaagcttgaacgcaaggaagcgatggaagagaagatgctgaccacatacaagatgccatgcaaggccgtcatctgccaggtgtgcaagtacacagccttttccgcttccgatcgctgcaaggagcagaagcaccccttaaaggtggtcgatgctgaaaagcgattctttcagtgcaaagactgcggaaatcgaactactaccgtattcaagttgcccaaacagagctgtaagaattgcaaggggtcgcgatggcaaaggacggctatgatacgggagaaaaagatactgactggtagagaaactctatccgtgagaggagacgaggaaacctttatgggctgcctagcaggcagtgctaatctcaacttgctggtacccgatgaagagtgatgccccaattggccgctatctgttatatttggtttattttattttatattatttcaaataatttttaaaagttaatttaaacatatgcagtagatgcaagtatttacattcattaaagtcataaaagtcatcgataaataagtacattggttcgaatacctaaatatctagagtgcctgtgagattgtttaagatgtaccagatgtactcaatgattaataatgaaggttacttatgattgtttagcttatggcgtaaataaattgaaacttatattatgactgctattacattaaatggacattataaatcaacctagcttactttagcagagttttacaatcttaaattgaaataaatatccaaatacagaaaaccccttttgaagcacaaatattcctttaaaaactttatttattgagtgtaaaaattctttgggataaccattcattcttctggcatataataggacgaacttggcaatttacaaataaagttaattatcttttaagaatatggctttttgaagcaaaagtaataagaagtaataataaaaaaaactaaggctgtctttggctagttaaaatagtgtataaatgcttgggagtatttgaaatcgaaatcggttatcttaaaatccatatttggcgtcaacgtaaagctaattgattatatgtaaaactaagactaatcaacaaacagtttgaactgaaaaacaggcgtgagattagaactctgggaaacactatttctagactgcatcctcagcttgccatcctggactcacctccttcgtttcactgagattcagcaaactagagaaacggaacgagatggtcttggacagatgcttttcaaactccctgctgtccaggttgtctgggatgagactcttgttggtcatatccaggtaggatcgacccctcttcacggggacagaataatgtggcagtgaggtggtcgctggaggttcactggtcatgttgctgtagcttggagt

SEQ ID NO: 2330 - DNA, 2421 bp, DROSOPHILA
agcccgccaaaacagatatgttattgcgcttatttagaaaaccaagaaaaaacacgagaacacgtgaaaatacaaatctacccaaatgaaatgggtcctgctcagaaatccggaacagatattagtatcgatgatgaggaggaaatactggctctggaaaaactactgggtgcagcagaaaacgaaaatacaaaatctgcagagtcagaaaaagcaaaacccaccgcacccattttggtgccaaaactacgagaagacaacagttttgctaatgccttcaccttcgagaagatcgtgaaaccggaaaagcagaagaatgctgctatcattaaggaaccagagctggactcgtccgacgacgaggaggtaaagaacttcctggaacgaaagtacaatgagtacggcagtgatataaacaagagactgaagcagcagcaggagaacgcctacgagtccaaggtggcgagggaggtggatcaggagcttaagaagtctatccacgtggttacatccaccccgcaacccctgaaaaatccgcataatcctattaaacggcaatcggcggtgagcaccacgtttcaacgtcctccgccagtcgctgccgccgtggcatctacatcccagtcaagtgctcccgtatctgctgtttttacggatccagtcttcggactgcgcatgatcaatccgctagtctccagctcactgctgcaggagcgcatgacgggcaggaaacctgtgcccttctcaggcgttgcgtatcacatcgagcgaggcgatttggccaaagattgggtcattgctggcgcgctggtttccaaaaatcctgtaaaaaacaccaagaagggtgatccctactccacgtggaaactatccgatctacggggagaggttaaaacgatctcacttttcctttttaaagaggcccacaaatccctgtggaaaacagcggagggtctgtgcttggctgtgttgaatccaactattttcgagaggagagcgggaagctccgatgtggcctgcctatccatcgatagctcccagaaagtcatgatcctgggtcaatccaaagatttgggcacatgtcgggccaccaaaaaaaatggggacaagtgcacttcggtggttaacctaaccgactgtgattattgcatttttcatgtaaagcaggaatatggcaagatgtcccgacgttctgaactgcaatcggcgaccgcaggtcgtggtatcaatgaactaagaaacaaggttttgggcaaaaacgaggtattttacggcggccaaacatttactgcagttcccgcaagaaaaagtgccaagttaatcaccaaggaacgtgatcgtctgagtatgctggctggctatgatgtttcccccttcgcccataccgctaaccacacctcaaagcccaaaacagccgaacccactaaaattccatatgcagaacgtggcggtcctgtttcccgtttggctggtggtgtggaagcgtctaggaaacagagagtccaagatctagagcggttgcgtctgcttaaagaggaaaatgagcgctttgaaaaaaagaagcaggcggagggccatgtcttgggaagtgataacaaaaaagaatctgaagcaggcacacccgctgtcagtatgcccactacacctgttccagataaattcaaaaatcgaggcttctcctttgatgccagtttaacgcccaagctttccggtagcgagaacttttcctttgaaatcaatgtaggatctcgccaggcacaaaatgctaagctgaaagcagctgccctgctgaagaagaagccactggagaagatcaaccccaactccacacgaggcagtgaaagtgggaagagaagagccatcgatgaactcaacgagaagttctctagcagcgccaagcgacaaaaaattgatgaggacgatcgggagttaatgcgcaaatcaagaatcgaaaaaataatggcagccacctcatcgcatacgaatctcgtggaaatgcgagagcgcgaagcgcaggaagagtactttaacaagcttgaacgcaaggaagcgatggaagagaagatgctgaccacatacaagatgccatgcaaggccgtcatctgccaggtgtgcaagtacacagccttttccgcttccgatcgctgcaaggagcagaagcaccccttaaaggtggtcgatgctgaaaagcgattctttcagtgcaaagactgcggaaatcgaactactaccgtattcaagttgcccaaacagagctgtaagaattgcaaggggtcgcgatggcaaaggacggctatgatacgggagaaaaagatactgactggtagagaaactctatccgtgagaggagacgaggaaacctttatgggctgcctagcaggcagtgctaatctcaacttgctggtacccgatgaagagtga

SEQ ID NO: 2331 - protein, 581 aa, DROSOPHILA
MINPLVSSSLLQERMTGRKPVPFSGVAYHIERGDLAKDWVIAGALVSKNPVKNTKKGDPYSTWKLSDLRGEVKTISLFLFKEAHKSLWKTAEGLCLAVLNPTIFERRAGSSDVACLSIDSSQKVMILGQSKDLGTCRATKKNGDKCTSVVNLTDCDYCIFHVKQEYGKMSRRSELQSATAGRGINELRNKVLGKNEVFYGGQTFTAVPARKSAKLITKERDRLSMLAGYDVSPFAHTANHTSKPKTAEPTKIPYAERGGPVSRLAGGVEASRKQRVQDLERLRLLKEENERFEKKKQAEGHVLGSDNKKESEAGTPAVSMPTTPVPDKFKNRGFSFDASLTPKLSGSENFSFEINVGSRQAQNAKLKAAALLKKKPLEKINPNSTRGSESGKRRAIDELNEKFSSSAKRQKIDEDDRELMRKSRIEKIMAATSSHTNLVEMREREAQEEYFNKLERKEAMEEKMLTTYKMPCKAVICQVCKYTAFSASDRCKEQKHPLKVVDAEKRFFQCKDCGNRTTTVFKLPKQSCKNCKGSRWQRTAMIREKKILTGRETLSVRGDEETFMGCLAGSANLNLLVPDEE

SEQ ID NO: 2332 - DNA, 14061 bp, DROSOPHILA
ttatatagttacactttcactggtctttagatgctttttttcagcgatattcagttgcagagtcccgtcgtttgagtacacaagatattgatcgacgatggcagatgagcaaagcgaaatgatttcacttgatattgaaaactaaattcgactgttttgcgtcgtctttgttgttttgctgcgactgtttttctcgttctatctatcaacaaattccccctacacacaacacacacacacataaatcatcatcattggaactgggttcgggaactgaaccagccgtgttcaccaaatgccatatataccgttaaatcatttgtgtaacggaaaatgtaaaattgttattaaaaattgaaatggacaatatatatacatgtatccgcatatatttgcattggaaaaatcataaaattacctcatatttcacacaattacagtgcatttagtgtgtatatgtcagtttcatttctttttatataaacattaaaatagttttttccaataagtatctacaattatctaagtgttgtgtcaaattttctatcaaatcggaacaaaacagtggacgtgttaagcttcttataaggttcttctgtcttagcaaaattgtatttcccataatgtatttccctacttcaacttgatctacactaaaactttataccttttgttcctaatttatattataacctatattgttcgtcgatttaataaattttgcatagcctatttaatagtaaaacaatttttagatttgtaacatttaatacacatttcatagtctagcgctaacttaaaaataaaactgtcttaacgcgaatctgagtaagttataaatgtattcgtagtttgtaaaaatcgttttcatgcatacgccaagtatactagaaactagttccccagtgcatcgactgccaactcgcttcaattacatgggtgcaatctgcagtattgtcgaaaagtgactgcgcggccacactgaaactcacaacagaaaataaagcattttcgcttgctttaaaataggattttatcccgtacaagagctgtctcgcggcaagaaatatgcaccctcgaagtctcgcagtgccgtgcgaccagagaacttgatccttggacaaatgactcgtgtttgcagtgcccgttttgaggttttgccagagtagtatacaacacccgaaaattttcgctggttctcggggacgcatgaaaaatggcggcgtcctcagctgcggctgcggcgcccaccaatccgatcccgcttccgacggactccatatcggaggagtgcaaggacgacgacgccctcacctccacgctgcacacatgcgccaatgatccggactttgcggtcatttgcgccttcctgcaaaaattcggcaaggacctgggtcttaacctgcccaacttcaagcatctgcaggagtggttgacaaacaacaacgatggtgagagggtggggtggtggtatcaagagagcggggtggaagcagttttttgccaaattaatttatgtcaggttcaattatcgtggggcaagtggcggtggaaactacggatgtagtgttttcgaataggtctgctccagagatttaacaatgctccgctctggagagcgtgcttggctcgtcagagagaaagagattgctcaatggcagagagagcactgcgatttgttttcatctcaacacaagcgcaatatacaaaacaaatctgggagagacgtaaatatttcccacatttgctctggtcttcttatttgagagatagtaagagagctacaattgaacactaaaagttggttttttttttttaatgtacacctgcatctggaaatatattaaatatttagggtcacgagtgggagggaacctgaaaatatatttgtttaaaaaagttataatcatgctaagtttctacgttttgtatgtatttgcgtgagcaacagcagacacaaaaagtgtacactacaacaaacgcggttgcatttatttcacttgccctcataatccacccacaatccatttatattccgctgtcactttcttccttttcgcagaacttttactaatatttaattataacgaatctttgtagttcctgagctaagggacttgcacataaagctgctccgtaagacccgtaagacggttcacgaaaagagttgggagtccgccctcagcaaattctgcttcggctactcggtgcaagatgcctgggaaatcgaacgtttcggttataggaattccagcttgaaggttaagctgcgaatatttcgggtgagtaacgaatttcgtaccacttgataaaccgttctaaagggcgtctttcccgtacaggaacttctcgaaagtcagtttgaacgcaatgccaagtttcgggcccacatcctcaccttgaatgccgatactttacgctctgagccaattggaagggaccggttgggacatgcctactggctgactcaggatgcccactgtaatctgcggatctaccaggagcatctagacgaggaaatttggcaggtggttgccacgaacagggacgagtttgtaaatctcatttcaaggctgcgcggaaatgaggtggtacttccttcgaaggacattggtgaggccgatgaggacaccagcagcagcaacagttgtcatcccaaaccaccgccccccgaacagaaagaagaagaggacgatgaggaagttggagatgagcccgaaaaaactgtacccaatctaaagattaaactccgctctcccgagcaagaggatcaaaagtctaaaaaggttaaggtgtgtatggatttaaccaaggagctttgcatttttagataagatttcattctcggtctttcagccactgctcattagccaggccaaactttcgagtagcgcatcgccggccccaaccaaaaaacgttctatcgaagacgtagacagcagccccacagcctcccaggaggaacagcagaagaagcaccgtcccacactgcttgatacaaagcgaatcaaaaagccaagtcgctacgaaagcactaaggatgaaatcgaagaagagtccggagaagaggatgaggaagaagaggacgaggaggattctgaattggatgagggtgaggaagaggaagatgtcgatagtgcggcggcggatatcgaggaagatgacgatgaggaagatactggagagcctatagaggatccaacgatagtggtgcagggccaaggatcaggacttgactgtgaagccatcccttataatttaattggcaactttgattatgaggatgacttggagatcggggaagccattgcagatccaatgctccatgtgattggtcaagggtgggggaccgactgtctcgtggggaatggtaaaaacgaagcttccgtggaggaaacgtcaacgcgcacatcggaaccaaaagcgacgttcttttttggcgagcccggatgtctcaagctaagtcccatgaagcaaacatcaaaaccagaggcaaaacggggcatttttgacagcttgagcgaggagaaaacaaatggtgaaagcgaaaagtgtatagtgaacacaccgccccgaaatggaagcgaactcacaaaaactctgggagatagtgaagaaacagcatctgcgagtgcagctacattagaagagactaacatatgccaagaagctaacgtaaataaaatctcagatgatcaaataaaaaaaaaggaatccgtaccagtggctaaaaggaatatacaggatagtacaataagcgtgatcgaaaagaatgaggaaatctctaaaggtcgtaccgaaagtgaggcaattgaagaaggagtgaggaataggacagaagtttcagtcttacaaaataattcaaatgaaagtgataactcctctattcagactcaggatcagcataaagttccagctgatctgaacaatacaaagaaaccagtaacagaaaaatgcgtcctggaaagcggtacagttgaggataaactggtaataaatcatcagcaaatttcgacaaatgccttggacactgcatgtgatgagaaactttcgtgtgaaacagaaagccctgtacctaaccaacatgattccaaaatgaaatcagaacaggaaacggcaacgagcgctaaggaatcagtatctgaatcttctccaacggatggggaagatgaaacagcaaaatcgaaatgtttgattgacccttatgcaggaaaaaccaatgataaaggtattattataaataaaattgataaggcagaaggggttattaaaaccttgcttcaagatgatccacctaaagatatttcaaaaagcgaaacgaatacaacatgtcttgaaatcaatatttcgccatctgcagaacataggatttcggaaaaagttcaaaccatagaaccaagtacatcccaaaacttacttttcgaagacaatggaaaatccggagaggttgacggtaagtcaaggacgagtggtgctgttgaagaaatatctaagacatctacgttattaaatcgcaagcggcgtcttaatgactctcagtccgctctacgaaactccacctccgaaagcgaagtgcacgaagaggaaccgcaagatgacgatcctaccctggacgatctagatgtgggcggcaagcgcattaaaatgagaccgaagaccactaacgcggagtccaggcgaaaggtggaggctcaaaaaacgcagatagaagaaactacttcgtccagcggagaagacgatgcgcgtattcgccgcaagtgtatagctcctcacactaaaaccaagcccactctggaggaaattattgaaagaaagttaaagaaaagtatagagatggatttgccggaaaagacaactgaaaaagtaatggagatgccaacgcaactgatgcagaaaactagagaagctacaccgcccatcatctccttaagtccgcaaaaaaaaacaccgataaccaagcccctaaagaaaaatctcctgacacaactacgacaggaggagagtgaagaagagaccataccaagaaaacgaacaaacagtgagaccctcgtgcctgcaattccagcatctaatgtactttgtcaaccggacgagcgtcatcgcaagcgtcgtagcagtgaggatgcaaatgaggcgttttcgaaggaatcctcccctactgaagtgcctccgtcagccgtaagcgagaagttgaagcgcaataacgagcaggacatacaggaggaagtcgaggacccacttgcaatgtctgtcaaggattcattacgttcagctaaagaccaatcgcctgtaccggagggatctgcccgtcgttctggtcgcagaggtggacctgctgtcattcactctgagcttcctcagccaaaaaggactcgaggtggggccagggataaaatgcagccagaggtcaatgctgagctgaagcaggaatccgaagatgatgagaaaatttcaaccaaaataaaatctgaagctaaagacgatccagccccagaaagcccagaaaatagaaagaaacctgaggagaaacccatcaaggaagagcccaacgaggagccaaagccaaaggtgggtcgtggacgtgggccgagaaagaagcgtgaggtggatactaccaatatcattgagaccaacgactcggagacacctgtgcgccaatctaggcgcattgcccagcagaagatcaaagaggaagctgaaaggcgaaagcaagaggaggttgctctacgtaccatgaaacaggagcttaagaaaaagaaaaaagccgagaaggaagcagatcctactgtgctagaaccatcaggagaagaatcagaatccgaggccagcgaggcggaggaggaggcacgtaataagaagaaaaaaaagtgtcctggcaaggatggctggtcttccgattcagaagaacagccagaaagtgaggaggaggaggaggagccaccgcactatgaaacggatcctggttcgccactcttccggtccgatcacgaattttcaccagaatcggagcttgaagatgagtctcaagtggtgccaatgaaaagggcgcgcaccgtacggaaggagaacgccgatgacctagaggaggtaaatattaaaaatgttaattagaaagcatacaaaattgattttgttagctttcccgttctgaatgtctattcaaaatagaagaaactatttcttgagttattccttgcattgttattgtacccgttataatccagaatgtgttttatatcttaagtggtcactaaaatcactatgcagtaacattcatgctgatttattttacaggaggatgcggaggaagcttgtcagaaatgcggcaagtctgaccatccggagtggattttgctctgcgacacgcctacctgtaacaaaggataccactgctcctgcctttcaccagtgctcttctacattcctgagggcgattggcactgccctccttgtcagcaggagcagctcatagctgccctggagagacagctggagcaatacgacacattggtagctcaaaagcaacaggagcggatcttggctgaagagcaagccgagcgagagcgtcaggagctagaggcggccacgctggcggcgaaggacgaaaacttcaagagcgaaaaggaagaggacgaagacgatagggatgatatggcagtcggcaaggctgaaaaggtaaagcggcgtcgcggagatggacgcattaataggagagctgccaagcgaggcaccaggcgccgtcgtggaaacgaatctgactccagccaccgcaaatccttaggcagtggctctagatccggatctggatctgactcaagtagcgacaatagcactagcttttctgactcggatgatgaacccatatacaagttgcgcaagcggcggcaaatcaacgtgagctatcggcttaacgagtatgacgaccttatcaattctgctttaaaaaaggagatggatgaggttgccggagcaggaaatctgggccgcggcaaagacatatccaccattattgaggcggataaggaaaaggcacgacgtgatgatctgcctacggaggatgaagtggggaataaggaagacggtgagaaggataaacaaaagtcaaaatctagcggcagtagtccgtcgtcgtcagaagacgaagtacctctcaaacgtagtaacaagtttaaacaacctcctgccaaaaagaaggctcgaaaactgaccaccctggacgttagcagcgaagaagatcatggaagcgatgaggactttaaaacgtccagttactcggatgaagatacttcacagtccgcatccggagactcagactcaagcttggaggcatacaggcgacccggtcgaggaaaaaagcaaagaaaggcagccaggagagcggcacgtgaaaggcgcaaggatagaaagtttgtggttgaagagagtgacgaaagcgaagatgaagatcagaagagacggactacaaagtcaaaaaagaagaaagacgattctgactatacagaaacggaaacggaagatgacgatgataatgagttgtccgataacgtggacagcgccgatttgtgtgacgacaccacttctgagagcgaggatggtgcctggaatccttcttccaaaaagaaaaagacggtggccgcaaagaagtcgaattcgtcgggtggcatcgccagaaaatcacctaagctaaagaagctagccacccaggctgagaaaaaggtcaagcgcttggagtactctgacgacgacataagcgagagcgatttggaagaggatgatgacgatgacgaggaagatgaagagggtgtaccattgtcgggcaaaggttcaggcaaacaacctcgctcccagcctcttaagccgaccgcatcttcaaccctaacaggcaaggggaaaggaaaaggcaaggccaaaaagaaaaaacaggtgtcctctgaagaagaggacggcgccgcttccgacgatcgcactcgcacccgtggtcgccgatacgcctacattgaggacggtaagcaatgattcaaatagtctctagcaatcatattgacaaacatttttacacgatagaagtacaagatatataaaaacacttgccatttgatttaatttttcctctctttacgtagacgacgacagctctgacggcggcattaaacctggcgtgcatcggccggatacgccacctgaggagcgtcaaaaattcatccagcggcaggaggagataaagcgtatgctcgcagagaaaaatgcagagggtgcgaagattgctgctacaccacgtctcacgccccttaaatctggtgtcactgcatcggagaagcgcacacctggcaaggcagcaagcggtgattcgctttccacggtgcccctctcggtgattcgacaggccaaggtgctggacatcgattacctgcaacgcaaaggagagaccattggagatctagatgatgtggacgagtcggagctagacgacgctgagctgcccgacgacttgcccgaggacatggaggacgcgattgctcgaatggtggaggaggaagaacagttcagcgcggaagtggcagctcgtgagctacctggagcagaggaggttctgcgcactacgccttccaagtccaagcaaactagcagggtgatgcctgagagtccagctcaaaactccgcgcccagtacatctggcttgcaggaaccacaccgaaagcgccttcccatgcccacgatgcatccgccgcttctgcgccaccagttcccaatctctgccggcccgtcacattctcctgcatctctggttcctcctcatgcagctcagggtatgcatcccatgctccaaagacacctttcgcagactgtccccccaccacaggctatgcatctcctgcaaaatgccctatccgctcctcttggtcagccgctcggatgtggtaattacggatccggcccaaattctgcccaacatctgcctctggtcatgtctatgccttcggctgcggcggcggctgcccatcttatgcaatcggcggtcgcttctgctacagcgcgtccagttgagacagcatcgggtaacccagcttctgatccgaaaccaaggggtagacgaaaaaaggttacaccccttagggatcagttgcagaagcaacaaacggcggccgctgttacggctgccacttcttcaactacaccgggatcagccccctcggaaaaggtgaaggcccaaccgctctttaagccgcacgaggatgctgcccctagcgctcctgcttcccaagcctctgtgattacccggatgccgtcgctccttcctccggcccatggacgaaatcatggaccgcccagtggtttatatccaagcagtgcggatttggcccgattctatggccaagtagctaaccagcaacccattcccgctgtcccaggctctcgttctccttcttcgacgtcaggacctcctagacaccttttgcgaccgcaaatgccacctggattgcctccgcctcacgcatccctacgacccacctacggaccaccgccgccacttcgcggatctggcccaccaacttctacgcccagtactacgaccaattccaggccggcttaccttcacggagccgagcatcacggtggaccctctgggcccccaatgggaggagtctttagttccgggccgccaccagcgcgacatgcaactccccacttgaatccctacaggtaagctacttatgtactccacagttcccactaagcacacgtgtttcttatagagcgccgcccatttatggcaatccaaactattcccctcgtcttggtggagctcccggaactggaagtatgcgccctggagctgtggactacgttgctggaccacgtaagcaaatcaaattttgtttttcttttaaaaagttcatttaaaagcatcttaagaaaatggtattaaatgtttttaaagagcacagccccacgtgcttctccagttcttaagaattaacaggatctatgtatttccgaatgcccattacttatagacaaataaacatattttccaaaatggtgtttcttaaatattgttcataataatcaacgaagaaaaatctaattgaataaacaaaactagctaataccaacgtaatcatcagatgctatttaatttgaaaattatattaaatatgattttactaacaatacattttaagatgattttaagtaaccgttttatattttattatttaataggtttatgttgtatgtgtatttgatgattatttaactttatattttacaggtggatattccccatatggctattatcccccgcccccgccgctgtccacaccatctgcccacgcagcgacaagttctgtgatcgtaagtgctccgcacaccctgacgccaacgaatcactcggttcccactttgacgcatggaaagactcctcctcaacaaactccgacacagtcttcaggtccaccacccgctgcagccccgccacccacaataaccagcgaaaccagcagccacaagccaccactggcttctgtgataaccagcaaaaagctaactactctagaggcgtatcccatcaggaagtccccgattgcagtagtggccgatgtatcgggtccggcagaacctactaggtcaccggcacctatagccgaggaagactcaggatcagctcatgacacgagagctccgtcatccgcaacaggaacagcagtcgtgggagagttcagtgggttggtaagctactttagctcgcaacaggatgattatgacacataacaaacgccggcgggagcattatttaaatttgtatatatcgatctgcttgtaaagttaaaaaacaattttactttagggctagaaatcaatcttggcaatactttaccaatataagctttgtgtttaaactataataaaacatacacacaccaaactgatccgaattctttaaaaagatttccaaagattcttttaaattcggttttggcgatcagttaatgttttatagaaattttatgtttgattgctttgtaacgtcactcccatcggctttctatgttgtatttaacttagttccctttatgtgctgttacagtttagctaaatcaagcatcaactacttttagtattttaatttagctctatatgatttgagccctaacgcaataaaagtaagttattaattatacataccattataattatacgaatataagataaacttatgatcataaatatatatagtcaataaatatatagattgagttaattacaaaattatgtaagtaaaccagttatgcagtgcatacttaaaaagattgacttgcgtatccattataacgttaagaagatggtactaaatcaaaaaagggcgaaaacataatgttcacaataaaactatttattattagtggaaagtatttgaaattcgatgttttctattgccttataatgaaattaattaaaagaggatagatttttaacagcgcccaacaaaggttagcattggttacaatggcgctttcccatttgatatgcccaaaaaatgtaaaatagcaaagctagactgcgtgaaagtccttgtagaattaagtgatcctggtgagagagagcggtgaaggtgtggaagttaaaatttgggacaatttggacctcatatcaattttaataaggggaaacatttgaattttgcataagggaacaagcgaaattggaatttcaaaatatcattatgactacaaagtattaaatatgatattctagtcttcatacaatggttttaactcaaaaagattgacttttatactaaaacggctaccacttaaaacgactattcttcccaagccatttatttaagtagaactgaaactgtgccacatttttcagatttctctcatattcgctaaatttattcgttgagtggctagcgttaacgacatctctttgcgaaaatttgccaacgcagttatggcctacacctcaggtcatctttgtataacctgccgttgttgaaaccgctcggtaaacgctacgtaagccggcagatcgcgtctctaaaggctttatggtgctaaatttaaatactcgtttttaaaagggacagcgaaaccgcggaacactggacccgttcgtccatttcaattttgcagcgagcttatattttttgttttgtaatttttttattagctaaaatctcaacgggaactttgcgtaacaacaaatattcaacaacaatgggcgacggcacttgttaatttaacaagctgtcaccactcaaatggctgcggaactctttggaatccacctgatgtccatttagaagcggaaacgcttggcaggcacattgtactggtagcccgactccacgggagctggggcagagtaaactggagctggagcaggagcagagtaaactggagcgggagcaggagccgagtaaactggagctggagctggagcaggagcagagtaaactggagcgggcgcaggagcgggaaggtcctggacgggaggtaaatactcgggagctggcgcaggagcagagtaaactggagctggggcaggagcagagtataccggagctggcgcaggagcagaatacactggggcgggagcagggatgtcttgaacaggaggcagatactccgaaacgggtgctggtgcgggagcagagtagactggagctggggctggagcggagtaaacaggagcaggtgcaggagcggagtaaacgggagctggagccggagctggaatgtcctggacgggaggcaagtactcaggagctggcgcaggagcagagtaaactggagctggggcaggagcagagtaaactggagctggagcaggagcagaataaacaggagctggagctgggatgtcttgaacaggaggcaggtactccgaaacaggtgctggtgccggagcggagtagactggggctggggctggagcggagtaaacaggagcaggcgcaggagcagagtacacaggagctggagccggcgcagatatcacctcctgaacgggtggcagataagctggagctggagccgaggggatgttgaaggtcggcgtgggcttgttgtagctataaccactgcccaggttaaggtgggaaacatcggcggaggccaaggcgatggcgcacacagcgaagacgaagagtttctaaaataagcggaaatttaagggtcaagtgagcgatcgggatccccgacatcttgacggttggccaaggcgagcggttgagcaaggccaacggctttcttgatcgaagttgtgaccagtggacagtttactcaccattgttattgatttgttggtcgggcttttaaagttcgttggatttgctttggcaagctcttgtcgcaagacgctcaagctgaatgatgtcgaactgcagatgggcccgcacttttataccaaaagccatgcttaacttggtctggcccattattattgctggatatccgtcttcgcgtcttcggtgtgggcctggcgcttcttctagtcgaagaaaaggtagacagttaagaagagagcggagcagtgatcattaacccagaggcggctgttgggcgatcaaaacgaaacaaagatatatttattttatttttccctttgatcttacgtattaacattaagaaacgttaattttcaagttttgaatatggtttagggagaattaaaaaaaaaaaaactataatattcgccttgtttaatacatgattaagtcgttaattaattaaactacattaaattctacttaaaggttatttgcttagggtattttagtttcttaaagcaaaagttgagatctgttatttttttttaaattatttggaccaagcattcatatgggagcacactttttataattaactgacagctctaacaaagaaaccacacccagatgcatagaaaaacaaggggagttttcgatatattggaaaactgttcatgctaatacagtaaaatgtattatcacaagaaacccaacccgagcagaccaactgcccgggcagtcttcgatgcaattttttagtgcccagcgcggggttaaga

SEQ ID NO: 2333 - DNA, 8910 bp, DROSOPHILA
ataaagcattttcgcttgctttaaaataggattttatcccgtacaagagctgtctcgcggcaagaaatatgcaccctcgaagtctcgcagtgccgtgcgaccagagaacttgatccttggacaaatgactcgtgtttgcagtgcccgttttgaggttttgccagagtagtatacaacacccgaaaattttcgctggttctcggggacgcatgaaaaatggcggcgtcctcagctgcggctgcggcgcccaccaatccgatcccgcttccgacggactccatatcggaggagtgcaaggacgacgacgccctcacctccacgctgcacacatgcgccaatgatccggactttgcggtcatttgcgccttcctgcaaaaattcggcaaggacctgggtcttaacctgcccaacttcaagcatctgcaggagtggttgacaaacaacaacgatgttcctgagctaagggacttgcacataaagctgctccgtaagacccgtaagacggttcacgaaaagagttgggagtccgccctcagcaaattctgcttcggctactcggtgcaagatgcctgggaaatcgaacgtttcggttataggaattccagcttgaaggttaagctgcgaatatttcgggaacttctcgaaagtcagtttgaacgcaatgccaagtttcgggcccacatcctcaccttgaatgccgatactttacgctctgagccaattggaagggaccggttgggacatgcctactggctgactcaggatgcccactgtaatctgcggatctaccaggagcatctagacgaggaaatttggcaggtggttgccacgaacagggacgagtttgtaaatctcatttcaaggctgcgcggaaatgaggtggtacttccttcgaaggacattggtgaggccgatgaggacaccagcagcagcaacagttgtcatcccaaaccaccgccccccgaacagaaagaagaagaggacgatgaggaagttggagatgagcccgaaaaaactgtacccaatctaaagattaaactccgctctcccgagcaagaggatcaaaagtctaaaaaggttaagccactgctcattagccaggccaaactttcgagtagcgcatcgccggccccaaccaaaaaacgttctatcgaagacgtagacagcagccccacagcctcccaggaggaacagcagaagaagcaccgtcccacactgcttgatacaaagcgaatcaaaaagccaagtcgctacgaaagcactaaggatgaaatcgaagaagagtccggagaagaggatgaggaagaagaggacgaggaggattctgaattggatgagggtgaggaagaggaagatgtcgatagtgcggcggcggatatcgaggaagatgacgatgaggaagatactggagagcctatagaggatccaacgatagtggtgcagggccaaggatcaggacttgactgtgaagccatcccttataatttaattggcaactttgattatgaggatgacttggagatcggggaagccattgcagatccaatgctccatgtgattggtcaagggtgggggaccgactgtctcgtggggaatggtaaaaacgaagcttccgtggaggaaacgtcaacgcgcacatcggaaccaaaagcgacgttcttttttggcgagcccggatgtctcaagctaagtcccatgaagcaaacatcaaaaccagaggcaaaacggggcatttttgacagcttgagcgaggagaaaacaaatggtgaaagcgaaaagtgtatagtgaacacaccgccccgaaatggaagcgaactcacaaaaactctgggagatagtgaagaaacagcatctgcgagtgcagctacattagaagagactaacatatgccaagaagctaacgtaaataaaatctcagatgatcaaataaaaaaaaaggaatccgtaccagtggctaaaaggaatatacaggatagtacaataagcgtgatcgaaaagaatgaggaaatctctaaaggtcgtaccgaaagtgaggcaattgaagaaggagtgaggaataggacagaagtttcagtcttacaaaataattcaaatgaaagtgataactcctctattcagactcaggatcagcataaagttccagctgatctgaacaatacaaagaaaccagtaacagaaaaatgcgtcctggaaagcggtacagttgaggataaactggtaataaatcatcagcaaatttcgacaaatgccttggacactgcatgtgatgagaaactttcgtgtgaaacagaaagccctgtacctaaccaacatgattccaaaatgaaatcagaacaggaaacggcaacgagcgctaaggaatcagtatctgaatcttctccaacggatggggaagatgaaacagcaaaatcgaaatgtttgattgacccttatgcaggaaaaaccaatgataaaggtattattataaataaaattgataaggcagaaggggttattaaaaccttgcttcaagatgatccacctaaagatatttcaaaaagcgaaacgaatacaacatgtcttgaaatcaatatttcgccatctgcagaacataggatttcggaaaaagttcaaaccatagaaccaagtacatcccaaaacttacttttcgaagacaatggaaaatccggagaggttgacggtaagtcaaggacgagtggtgctgttgaagaaatatctaagacatctacgttattaaatcgcaagcggcgtcttaatgactctcagtccgctctacgaaactccacctccgaaagcgaagtgcacgaagaggaaccgcaagatgacgatcctaccctggacgatctagatgtgggcggcaagcgcattaaaatgagaccgaagaccactaacgcggagtccaggcgaaaggtggaggctcaaaaaacgcagatagaagaaactacttcgtccagcggagaagacgatgcgcgtattcgccgcaagtgtatagctcctcacactaaaaccaagcccactctggaggaaattattgaaagaaagttaaagaaaagtatagagatggatttgccggaaaagacaactgaaaaagtaatggagatgccaacgcaactgatgcagaaaactagagaagctacaccgcccatcatctccttaagtccgcaaaaaaaaacaccgataaccaagcccctaaagaaaaatctcctgacacaactacgacaggaggagagtgaagaagagaccataccaagaaaacgaacaaacagtgagaccctcgtgcctgcaattccagcatctaatgtactttgtcaaccggacgagcgtcatcgcaagcgtcgtagcagtgaggatgcaaatgaggcgttttcgaaggaatcctcccctactgaagtgcctccgtcagccgtaagcgagaagttgaagcgcaataacgagcaggacatacaggaggaagtcgaggacccacttgcaatgtctgtcaaggattcattacgttcagctaaagaccaatcgcctgtaccggagggatctgcccgtcgttctggtcgcagaggtggacctgctgtcattcactctgagcttcctcagccaaaaaggactcgaggtggggccagggataaaatgcagccagaggtcaatgctgagctgaagcaggaatccgaagatgatgagaaaatttcaaccaaaataaaatctgaagctaaagacgatccagccccagaaagcccagaaaatagaaagaaacctgaggagaaacccatcaaggaagagcccaacgaggagccaaagccaaaggtgggtcgtggacgtgggccgagaaagaagcgtgaggtggatactaccaatatcattgagaccaacgactcggagacacctgtgcgccaatctaggcgcattgcccagcagaagatcaaagaggaagctgaaaggcgaaagcaagaggaggttgctctacgtaccatgaaacaggagcttaagaaaaagaaaaaagccgagaaggaagcagatcctactgtgctagaaccatcaggagaagaatcagaatccgaggccagcgaggcggaggaggaggcacgtaataagaagaaaaaaaagtgtcctggcaaggatggctggtcttccgattcagaagaacagccagaaagtgaggaggaggaggaggagccaccgcactatgaaacggatcctggttcgccactcttccggtccgatcacgaattttcaccagaatcggagcttgaagatgagtctcaagtggtgccaatgaaaagggcgcgcaccgtacggaaggagaacgccgatgacctagaggaggaggatgcggaggaagcttgtcagaaatgcggcaagtctgaccatccggagtggattttgctctgcgacacgcctacctgtaacaaaggataccactgctcctgcctttcaccagtgctcttctacattcctgagggcgattggcactgccctccttgtcagcaggagcagctcatagctgccctggagagacagctggagcaatacgacacattggtagctcaaaagcaacaggagcggatcttggctgaagagcaagccgagcgagagcgtcaggagctagaggcggccacgctggcggcgaaggacgaaaacttcaagagcgaaaaggaagaggacgaagacgatagggatgatatggcagtcggcaaggctgaaaaggtaaagcggcgtcgcggagatggacgcattaataggagagctgccaagcgaggcaccaggcgccgtcgtggaaacgaatctgactccagccaccgcaaatccttaggcagtggctctagatccggatctggatctgactcaagtagcgacaatagcactagcttttctgactcggatgatgaacccatatacaagttgcgcaagcggcggcaaatcaacgtgagctatcggcttaacgagtatgacgaccttatcaattctgctttaaaaaaggagatggatgaggttgccggagcaggaaatctgggccgcggcaaagacatatccaccattattgaggcggataaggaaaaggcacgacgtgatgatctgcctacggaggatgaagtggggaataaggaagacggtgagaaggataaacaaaagtcaaaatctagcggcagtagtccgtcgtcgtcagaagacgaagtacctctcaaacgtagtaacaagtttaaacaacctcctgccaaaaagaaggctcgaaaactgaccaccctggacgttagcagcgaagaagatcatggaagcgatgaggactttaaaacgtccagttactcggatgaagatacttcacagtccgcatccggagactcagactcaagcttggaggcatacaggcgacccggtcgaggaaaaaagcaaagaaaggcagccaggagagcggcacgtgaaaggcgcaaggatagaaagtttgtggttgaagagagtgacgaaagcgaagatgaagatcagaagagacggactacaaagtcaaaaaagaagaaagacgattctgactatacagaaacggaaacggaagatgacgatgataatgagttgtccgataacgtggacagcgccgatttgtgtgacgacaccacttctgagagcgaggatggtgcctggaatccttcttccaaaaagaaaaagacggtggccgcaaagaagtcgaattcgtcgggtggcatcgccagaaaatcacctaagctaaagaagctagccacccaggctgagaaaaaggtcaagcgcttggagtactctgacgacgacataagcgagagcgatttggaagaggatgatgacgatgacgaggaagatgaagagggtgtaccattgtcgggcaaaggttcaggcaaacaacctcgctcccagcctcttaagccgaccgcatcttcaaccctaacaggcaaggggaaaggaaaaggcaaggccaaaaagaaaaaacaggtgtcctctgaagaagaggacggcgccgcttccgacgatcgcactcgcacccgtggtcgccgatacgcctacattgaggacgacgacgacagctctgacggcggcattaaacctggcgtgcatcggccggatacgccacctgaggagcgtcaaaaattcatccagcggcaggaggagataaagcgtatgctcgcagagaaaaatgcagagggtgcgaagattgctgctacaccacgtctcacgccccttaaatctggtgtcactgcatcggagaagcgcacacctggcaaggcagcaagcggtgattcgctttccacggtgcccctctcggtgattcgacaggccaaggtgctggacatcgattacctgcaacgcaaaggagagaccattggagatctagatgatgtggacgagtcggagctagacgacgctgagctgcccgacgacttgcccgaggacatggaggacgcgattgctcgaatggtggaggaggaagaacagttcagcgcggaagtggcagctcgtgagctacctggagcagaggaggttctgcgcactacgccttccaagtccaagcaaactagcagggtgatgcctgagagtccagctcaaaactccgcgcccagtacatctggcttgcaggaaccacaccgaaagcgccttcccatgcccacgatgcatccgccgcttctgcgccaccagttcccaatctctgccggcccgtcacattctcctgcatctctggttcctcctcatgcagctcagggtatgcatcccatgctccaaagacacctttcgcagactgtccccccaccacaggctatgcatctcctgcaaaatgccctatccgctcctcttggtcagccgctcggatgtggtaattacggatccggcccaaattctgcccaacatctgcctctggtcatgtctatgccttcggctgcggcggcggctgcccatcttatgcaatcggcggtcgcttctgctacagcgcgtccagttgagacagcatcgggtaacccagcttctgatccgaaaccaaggggtagacgaaaaaaggttacaccccttagggatcagttgcagaagcaacaaacggcggccgctgttacggctgccacttcttcaactacaccgggatcagccccctcggaaaaggtgaaggcccaaccgctctttaagccgcacgaggatgctgcccctagcgctcctgcttcccaagcctctgtgattacccggatgccgtcgctccttcctccggcccatggacgaaatcatggaccgcccagtggtttatatccaagcagtgcggatttggcccgattctatggccaagtagctaaccagcaacccattcccgctgtcccaggctctcgttctccttcttcgacgtcaggacctcctagacaccttttgcgaccgcaaatgccacctggattgcctccgcctcacgcatccctacgacccacctacggaccaccgccgccacttcgcggatctggcccaccaacttctacgcccagtactacgaccaattccaggccggcttaccttcacggagccgagcatcacggtggaccctctgggcccccaatgggaggagtctttagttccgggccgccaccagcgcgacatgcaactccccacttgaatccctacagagcgccgcccatttatggcaatccaaactattcccctcgtcttggtggagctcccggaactggaagtatgcgccctggagctgtggactacgttgctggaccacgtggatattccccatatggctattatcccccgcccccgccgctgtccacaccatctgcccacgcagcgacaagttctgtgatcgtaagtgctccgcacaccctgacgccaacgaatcactcggttcccactttgacgcatggaaagactcctcctcaacaaactccgacacagtcttcaggtccaccacccgctgcagccccgccacccacaataaccagcgaaaccagcagccacaagccaccactggcttctgtgataaccagcaaaaagctaactactctagaggcgtatcccatcaggaagtccccgattgcagtagtggccgatgtatcgggtccggcagaacctactaggtcaccggcacctatagccgaggaagactcaggatcagctcatgacacgagagctccgtcatccgcaacaggaacagcagtcgtgggagagttcagtggaagcggaaacgcttggcaggcacattgtactggtagcccgactccacgggagctggggcagagtaaactggagctggagcaggagcagagtaaactggagcgggagcaggagccgagtaaactggagctggagctggagcaggagcagagtaaactggagcgggcgcaggagcgggaaggtcctggacgggaggtaaatactcgggagctggcgcaggagcagagtaaactggagctggggcaggagcagagtataccggagctggcgcaggagcagaatacactggggcgggagcagggatgtcttgaacaggaggcagatactccgaaacgggtgctggtgcgggagcagagtagactggagctggggctggagcggagtaaacaggagcaggtgcaggagcggagtaaacgggagctggagccggagctggaatgtcctggacgggaggcaagtactcaggagctggcgcaggagcagagtaaactggagctggggcaggagcagagtaaactggagctggagcaggagcagaataaacaggagctggagctgggatgtcttgaacaggaggcaggtactccgaaacaggtgctggtgccggagcggagtagactggggctggggctggagcggagtaaacaggagcaggcgcaggagcagagtacacaggagctggagccggcgcagatatcacctcctgaacgggtggcagataagctggagctggagccgaggggatgttga

SEQ ID NO: 2334 - protein, 2897 aa, DROSOPHILA
MAASSAAAAAPTNPIPLPTDSISEECKDDDALTSTLHTCANDPDFAVICAFLQKFGKDLGLNLPNFKHLQEWLTNNNDVPELRDLHIKLLRKTRKTVHEKSWESALSKFCFGYSVQDAWEIERFGYRNSSLKVKLRIFRELLESQFERNAKFRAHILTLNADTLRSEPIGRDRLGHAYWLTQDAHCNLRIYQEHLDEEIWQVVATNRDEFVNLISRLRGNEVVLPSKDIGEADEDTSSSNSCHPKPPPPEQKEEEDDEEVGDEPEKTVPNLKIKLRSPEQEDQKSKKVKPLLISQAKLSSSASPAPTKKRSIEDVDSSPTASQEEQQKKHRPTLLDTKRIKKPSRYESTKDEIEEESGEEDEEEEDEEDSELDEGEEEEDVDSAAADIEEDDDEEDTGEPIEDPTIVVQGQGSGLDCEAIPYNLIGNFDYEDDLEIGEAIADPMLHVIGQGWGTDCLVGNGKNEASVEETSTRTSEPKATFFFGEPGCLKLSPMKQTSKPEAKRGIFDSLSEEKTNGESEKCIVNTPPRNGSELTKTLGDSEETASASAATLEETNICQEANVNKISDDQIKKKESVPVAKRNIQDSTISVIEKNEEISKGRTESEAIEEGVRNRTEVSVLQNNSNESDNSSIQTQDQHKVPADLNNTKKPVTEKCVLESGTVEDKLVINHQQISTNALDTACDEKLSCETESPVPNQHDSKMKSEQETATSAKESVSESSPTDGEDETAKSKCLIDPYAGKTNDKGIIINKIDKAEGVIKTLLQDDPPKDISKSETNTTCLEINISPSAEHRISEKVQTIEPSTSQNLLFEDNGKSGEVDGKSRTSGAVEEISKTSTLLNRKRRLNDSQSALRNSTSESEVHEEEPQDDDPTLDDLDVGGKRIKMRPKTTNAESRRKVEAQKTQIEETTSSSGEDDARIRRKCIAPHTKTKPTLEEIIERKLKKSIEMDLPEKTTEKVMEMPTQLMQKTREATPPIISLSPQKKTPITKPLKKNLLTQLRQEESEEETIPRKRTNSETLVPAIPASNVLCQPDERHRKRRSSEDANEAFSKESSPTEVPPSAVSEKLKRNNEQDIQEEVEDPLAMSVKDSLRSAKDQSPVPEGSARRSGRRGGPAVIHSELPQPKRTRGGARDKMQPEVNAELKQESEDDEKISTKIKSEAKDDPAPESPENRKKPEEKPIKEEPNEEPKPKVGRGRGPRKKREVDTTNIIETNDSETPVRQSRRIAQQKIKEEAERRKQEEVALRTMKQELKKKKKAEKEADPTVLEPSGEESESEASEAEEEARNKKKKKCPGKDGWSSDSEEQPESEEEEEEPPHYETDPGSPLFRSDHEFSPESELEDESQVVPMKRARTVRKENADDLEEEDAEEACQKCGKSDHPEWILLCDTPTCNKGYHCSCLSPVLFYIPEGDWHCPPCQQEQLIAALERQLEQYDTLVAQKQQERILAEEQAERERQELEAATLAAKDENFKSEKEEDEDDRDDMAVGKAEKVKRRRGDGRINRRAAKRGTRRRRGNESDSSHRKSLGSGSRSGSGSDSSSDNSTSFSDSDDEPIYKLRKRRQINVSYRLNEYDDLINSALKKEMDEVAGAGNLGRGKDISTIIEADKEKARRDDLPTEDEVGNKEDGEKDKQKSKSSGSSPSSSEDEVPLKRSNKFKQPPAKKKARKLTTLDVSSEEDHGSDEDFKTSSYSDEDTSQSASGDSDSSLEAYRRPGRGKKQRKAARRAARERRKDRKFVVEESDESEDEDQKRRTTKSKKKKDDSDYTETETEDDDDNELSDNVDSADLCDDTTSESEDGAWNPSSKKKKTVAAKKSNSSGGIARKSPKLKKLATQAEKKVKRLEYSDDDISESDLEEDDDDDEEDEEGVPLSGKGSGKQPRSQPLKPTASSTLTGKGKGKGKAKKKKQVSSEEEDGAASDDRTRTRGRRYAYIEDDDDSSDGGIKPGVHRPDTPPEERQKFIQRQEEIKRMLAEKNAEGAKIAATPRLTPLKSGVTASEKRTPGKAASGDSLSTVPLSVIRQAKVLDIDYLQRKGETIGDLDDVDESELDDAELPDDLPEDMEDAIARMVEEEEQFSAEVAARELPGAEEVLRTTPSKSKQTSRVMPESPAQNSAPSTSGLQEPHRKRLPMPTMHPPLLRHQFPISAGPSHSPASLVPPHAAQGMHPMLQRHLSQTVPPPQAMHLLQNALSAPLGQPLGCGNYGSGPNSAQHLPLVMSMPSAAAAAAHLMQSAVASATARPVETASGNPASDPKPRGRRKKVTPLRDQLQKQQTAAAVTAATSSTTPGSAPSEKVKAQPLFKPHEDAAPSAPASQASVITRMPSLLPPAHGRNHGPPSGLYPSSADLARFYGQVANQQPIPAVPGSRSPSSTSGPPRHLLRPQMPPGLPPPHASLRPTYGPPPPLRGSGPPTSTPSTTTNSRPAYLHGAEHHGGPSGPPMGGVFSSGPPPARHATPHLNPYRAPPIYGNPNYSPRLGGAPGTGSMRPGAVDYVAGPRGYSPYGYYPPPPPLSTPSAHAATSSVIVSAPHTLTPTNHSVPTLTHGKTPPQQTPTQSSGPPPAAAPPPTITSETSSHKPPLASVITSKKLTTLEAYPIRKSPIAVVADVSGPAEPTRSPAPIAEEDSGSAHDTRAPSSATGTAVVGEFSGSGNAWQAHCTGSPTPRELGQSKLELEQEQSKLEREQEPSKLELELEQEQSKLERAQEREGPGREVNTRELAQEQSKLELGQEQSIPELAQEQNTLGREQGCLEQEADTPKRVLVREQSRLELGLERSKQEQVQERSKRELEPELECPGREASTQELAQEQSKLELGQEQSKLELEQEQNKQELELGCLEQEAGTPKQVLVPERSRLGLGLERSKQEQAQEQSTQELEPAQISPPERVADKLELEPRGC

SEQ ID NO: 2335 - DNA, 24401 bp, DROSOPHILA
aacctttctagcttttatagttcctgatatctcgacgttcatatggacagacggacatgaccagttcgactccgctatttatcctgatcaagaatatatacttaatatggccggaaacgcttccttctgcctattacatacttttcaacgaatctagtaaaccctattactctacgagtaacgggtataaaaacaattagcttatgtattaataagcgtgtttcgtttaggataaaacgatacgatattaccaaacgtggtgatttaaatttcccgtgtggaaaatctaatctgagacaaaatattccaattctcttatttatgtgtgtttatattgtttaatttgtattatgagtaacaatatttacataattaatacaactgttatttaattatagaacaaattgaaaacacttcttgaagaatgtgggtaattagttatttcctagaggtcatctaaaactgttattataaattatcgactactttgaaacaatttgaactaagtattatcatagacttaaaccactaacaaaagttgatcgcttttatcagtctggaattaaattattttacaagtgggctccataatagcaatctactatcgataaagtgcgaacgaattcgaactattctttcccggttaacgaatacaaaaaactcgaatagcgtcggcgtattttctctggatgaaaattttttgtgaaacttcctatttgatctgacttcggactatcaggaaaaagtaaaaaggtttattggtaaatgagcgacaatttaaaaaataatgaaaatataaaagaccattacgtcgtaagaccaccgttccaaattcactagtaacccaccgtcgctgccttgacgtattttgtcccgctatcagatctgtgttcgtaaagtggcagtgtgcagcaacagctcgcagaaaggtggcaacgctcgctaacagaccgagagctccactaacaaaacaaacattttgctacttcgtcgcaggcgggactgtgttgcgtcgtgtgatcgctagagcggttgtggaatcggattcgagcgcaaaacaccgttcatgctgtgagcgaaaaagagtggtagcgcctacagtggcatatgtagttaaatccgtgaataagtgaataagaatatatgtatgtacttaattcgaaaaccttttcgccgtcagcacaacgggtgaacgagagagcggaagtggagttttttgtggcgggtcgtctcgctcgcaccgcaaaggtcgtccgtggctgcgtgtatgggtgtgtggaagaggcgtcgaggtgaatgtggatttctaaccacaccagcattgcaaagacattgattgatatttaaagctgcagcagcgaaccaaagcaaatcctaatttcggcaaagtttaagaataacgagtgactggggcgcgcgcaataagataaaattgaaggttattctgtgtgcgtgtgagtgacccgtttaccagtgtgtgtgtgcgagcgttccattgtaaacaaaaaagcaagtgttgtgagcggagagaagaaagggaaagagagaaagagcgaacagactggcgagagaaaaaagagattgcgcacgaagaaagcagcgcacaaagcgaacgctgaaaatgtcaataaactctgcgaaaggtgaggaaaacgcaacaagagcgccgcagtcgtgtaaaataaaacccaagactcaaagaaagcagtagaaagaggcaagtgcaagagcagaacttgtgcgtgtgagtgctggtgtagtgtgtgtgggagagaagagttcgagtgtttgttctgattggacagagtgtgcagaaaagtttttctggtttcgattcgcttgcaacagtttccgcgttttcagctccaacaagtttcgtcgatttttcgcgtctgcattttgtttattttattgtgaattcgttgacttgcttgctcgctcgttaacccatacaagtgcgcccgccgcgacgctggatgagtaatttaccgttattaattcacaggtgaaaaatccgatatttgtcgtgcaataatttcctcgattggcatcaagtggcttccagtcgggtacatattgcacaagaaatgttatacgcataatgtgcacgcaaattaaacgaattctctatgaaaatgtgactagaatgtgagtcgaacaaaacgagtaaaacgtgaaatcccaactggcttttgggtaacaaatcttatcaacacagcaacggaaatacattaaaatcttgatagactgagaaagggacaattggaatacttttagttatttttaaatggtaagataatctcctttccttaaaaacaaaatgttcccataattttttaggtattttaaaatggtaagatgatctcatttccttaaaaacaaaatgttcccataattgatgtccatgatgtccatcccataacttgatgtgatttcaaaaggaacatcgtgaaaactgggcgaatcgtataaaccatatgctttcatttcatttgtatttaaggacaacaatataggggctgtaaaaattaccattttttaagtgatttaatattcctttgtcctttaaatttaaagatccaagaggcccaattcaagcgctatattttcttatccccttccacagagtcaaagtaggcttttcgaatccctgaaatcaaaacaaaattattaacacatcgggaagtcagtgtcgtctggcggactgtctggccgggcgactcccaattcataagcagtgaaatgtaacggcgccgttgagtacttgaactactttcatgtggcagaggctttatgacccgaacttggctggctcattacattgacattcaactctaccgagctctgaaagcgcaaaaaggacgccataaaggctttaattaaacatgtgttatgttcggttctagaaaacttaaagctttccgaattgactctgtatagattcgcttgtctttattgttcgatcatcgttacacgttatatttttctcggtgcagccgccggaaattgtttcgacaacgaaacagagacggtctcgatcagggagaataagagggtgggaaggcactgcatgtctgaatagtacggccaaggcacgttttgaactctacctctaccacacatttcttgggccaagtctttagctctttctgctttcgcgtggtgcttgacccagaaaaatcgaagaatcgccaattctgcggctgacaacgctgctgatgaggctgcggctgggccaagtcttgtgctttcgaggagccgcagaaggggctgtctcataaaccattttaaatgtcgggctcattattattttgactgcgtcgcttgcggtttttgtgtctatcagccgttcttaccgtgccttcttaccgttcaactcttctcatttcgtaagctgggattcagtctgtccgaaggttgaccgcgagtttggaagttgattggctccggattatacattgcggacgctggtttatgttcttgaactccttttaaatgtgcgcggcctcaaaggttaatttacagctttcggggtcataactctggctaaaggcggtcgattctgccgtcgagacgcggttacaagaactggcaactgatgtagggatttgcccatgcttacaaacgcaatgagtggaagaaggcaataaattatcgggcttgagtggtaagcctggtctccaattctgcaaaaaaaaattttgcttctggtaactctttttgtgcatgcagatatttatattaacccgacccatacgccttaatatctgtaacttgtaaagtctttgagatttgcccattcggtgatgtatttctcgttcgtcagttggctgccagctgttaaccggttttcgaatatgccttcgggtgttccaaccgccttgatacccacttcggccatccgtgcctctccctcggcagtgcaccacccactcttgcaatacataagttgatacatgctgtttctctccctggctttgactctggctgctaattagcagttaacaattgcagcattgacctcctcaccacaattcttctcctattctagcaggcaaactgcgaaagtagcgagaacgggtttgctttgttccattgtctatggtaaaaaatacaactgaaagatacaacatggcagcaggtttaccttgttgtaacctcgccaagaactccggggaaaaaaagcttgaaaaaatatatgcattccactctttctaaaccgaagagaacaagacaacacacaaatataattgcttgtcgtttttacaatttacaattttaataattatttagtagttattcaattaactaccggcaacaaggttcggtttggagtgcatgcataggtttttaactatgtgatgtcttgagtgaaatgtgaattggtattaaaaacctactagaattactattaaaacctattggacgtcccgaattggccttattgaagtttcttgataataagctacataatgaagtgggggtagtgagacgcgggtggctggatgcattcgtttttacttgctgcttttagacatttgctgcagttgcctgtcgttgctgttgccttttcgttgttattgtgccattttgtttgatttttgcaactggcaactttttcgattgctgcaactgtgcagccgttggttcgcaaaccgttgtgtgtatgcagcctttgtcgtttttggtttgtctatacatacatgtctatataaacatgatcactttggccgatttcttgtcttaactcgccacttttcagcaggcggtggaaggtgaagcggggacaagaaaaaagaggagaaacatgttgcctaaatgttgctgctgctgcggttgcatttgcagcaacccactgttgttcatgattgtgcaactattggcagcattttcggactgctgttgaacttttgtagccaaccgaaaaagaatgttacctcgttgataagttttaaattgcttatcaatcatattaatctatattacctggaatttgtgaggccttggataagaacatcaggaaaattgtattaataatcgcttttttttcgtaaactgtgcattgaaaatttgcgtttatcaagcacgaatggcacaaacagaaattctgattctcaaataaattaatgtaacaaaaagacttttcatcgaatcgaatattatatacccgttactcagctaaaaggattgcgaaagaaatggaattaccacctcggctcgtgactctcgaacgtcattcactcctaaatccttaattatattatttaattcaaatatttatgtatagacatgcgcactatgacttagatttcatcctattccaacaaaaaagtgtaattaaacataaaaaaagggaatgctatagtcaagttccatgactatcatcagatacctgttactctagtggaaatgcggaaatggaaattgcacaatttttctgggttatcgatagatattagggaataaaatgagaacaaattgcgtgacctttggttaggtgtaagaaggggcgtggttctagtgttttggtataccgatagaaattgacaactcaaacaattaaacgaagaaaattcaaaacatttttcaagtgtgggcgtgacagtttgtgggcgtgtaaacatttttggttgcaaatcgatagaaatttacaagactaataaaaatatgaatgaatattgtgcggcttgtgggtgttagagtgggcgtggcaatatttgaaaaccaacttgcgctgcgtctatgtctctggaagctgcatgcttaatctcacccttctagcttttatagttcctgagatcgaggcgattattcggacagacggacatggccagttcgattcggattggtcctgatgaagaaaatatgtatatgtagaaaatccttttcctctacgagtaacggatttaataaagattggtagttaattttcaacttgcctatagtcgctgaagaatatgtaataaaggtctcatttccaaacaaagacatccacacctttgaatcgtctttcggtcactcaattgctgggcgcagagtctacaaaatataaaaaaataatttttattaatttgtaccactgaagttcacttaatatatccttggaagcatcgcaaaaggagctcaacatcataagggcctggccagccgaaatttatgactattagctaagttaatttatgcaaataatagaaaattacttaatgaataaaaagaagctgcctgacttcactgttggtatcagtctcgactcgactttggttcgaaaacgagaaatcgataaaaagctcattaaattaaggcagaacgataaaagttgattggcgtatggctacagacaaacgtctttgaaatccccttatcttgaatttcactcaaactcgattttcagcttaaagctaggcttcttgactggcaagacagcttgaaagtttctgccgcgagtacgcgaaaaaccagacactaaaattttttaaaaatttgttcgaattcgatgtagaggctgtcttagccggggctaaggaaacattgaattatctgaggatcggatcttctccattccttttttgcgttattttgcttcgctaaaaatgtttgtttgatgactaaccacttaaatattagcgccgtccatcagctgaagtcgcctgggctacctacaatttggtattttgacaatgcgattaggtgtatctacacttaacagtaagtttctattgaatattgtatgcaatatctttgccaactaattattataaataagaaattaattattggatttgtagaatataaatgttctccagcaattttcgcagtatctttcgtttgccctcgttgtttagcatattcttcagtcgtctcagttgctgttcttgattgaatccaattacttctccctttccaccaatggttcctcgcaaaaacgtgtttcatctcgttgtaggtttctttttagttcttttaaaggtactgagcatttttcaagtcccgttttcaagttatttttaaaaatttgtaatcataatcaaaaatgtcttgaccaaaatcactatccgatttgatccgcccttgttggtccgtatgagtgctgataaagtaaaaattctgtgtactgtaaaaaaatacaaatatcacaaattcgttgaaaagtaattaacaagaagaacgaagcgttttcggcccgaacatgacattcaaatgcatctcccacgcactcactttagctgaaattaagtttgttatattattaaacctatcgagattccaaaccctttttaaatcacctttaaatgtgttaatagtcaatgacgtaatgccattaggttaacacatgcatacatacagatgtacatctagttctagggcatgtttgtttaaagatgtgtaagctgtcttacgggattatatttttccaaaaacttttgacgacccctgtaaatttggtatgcctttatggattatgagaaaccaatttgttgtttctacaagttcgatatcccagaggtttcacataagaacttaactgaattcggaactaaactacgcgacaaagagcatctaacaaaaaaaacaaagaagctccaaaacagacagaaagagctcattgtattcgcggggaaaacaagacatcaagagaagagaagatggggcaatgagagtcaaaagaagcgaacaaaggaaaggccaaacacgttcaaaccttggcaagagaagaagtagcacgacgacttgttgccaagacgtaagaactcaaacttaaactcaaataaaagcaaatgtgaggaagaagttgaaattcgagagagccagagccaccaagaacagtaaaaacacgtcatgctgactgcctttgcttacccaccttcctccgcccgttcggacttctttgattccgtcgccttgtcagcggaaagatagaagacggagagaagggtcattggcggccgttgactttatctcgcgatgaccttgcccgaaatgtaatagggaagagcgaagagctgtaagaagggatagaagctcatgcacacacacacacattccactgcagctaaataacgagcagaagatggggaggtacgcgaatgcagctgttgacaaactgagtccagccgaccgagagagcgagagaaaaagggcagaggcaatggcagaaaaagcggaaggggagccagggcacagggccaaggcgaatggcttaacgggatttttcgataccaataaatttacaggcaaacataaatatgtacatatgtacaagtattaatcgatggaagaattattgtaaacgatttgtgtcttcagatcttgcatcttgagaattgtgcaaaatgaaaattttgatcgcaagtttggagtgcagtgataaagacttcaacagccgagaggacctcccttattccaatcatgtagttatgtagccagtatagtatacagtgtaagtccttaagctccaatggtagtaatatgaagtgaatcaaaaatattcgggattcgttatctctcactgtgccatttcaatcgatgatataaataaatatatatatatatatatatatatgaaaaggagccctagcaaaactgcgatataaatatgtatataaattttgtcatctctattatttcactattgtaactgaaacgtcatatatcttttggttgtacgtaattttttactgttttatagtaatgttaaagttatggttattataatttcaatgacgctctcttcgatcccattataatggatcagtgacaaggagtcgttccaatgggaacaacataaattgcaaactgccaaaaacagcctggttaacttggcttaaactcactcaataggcgcaaattagttggttactcggcggttgagtttcaacacgcctggagagtggattgcagctcagcgccaacgacgaatcgcagccaccttgtcccacaacaacttgccagtgttgttaaattctgtattcagcagtatgcgttattttttttttttagctaaccttgcgtacgtacatatgtatgtacgtgtgcttcgccgatctggcttttgatattaattaaacgcacgcagccggaccagcaaagtcgtattcagattctcagccagtggcaactgcaatgcccacccagcagcagcaacatgtggtgaaacgagttccgagggctcagcaggccaactactaaaatgaggagagaggcaaaccaaagacaagcccaaagtagttggtagctggtgttggggcttagaaaagtaaaagaagtttaacgtacggcacgtattttgtgcgtcacggtggcggtggggggtctttggggagtgtcgctgctgttccacgagcgagcacgcaagaaatgttgtctttagctggcggtagaagatggatcagcagactcgcaccgtgaatctgtttaaagcctgttcaatgattcgctgaaatactgaatgctctgtaggagaactggctaggataagtttaaatgccgtctaaataaatattttgaaatatgatcaattatctggagggacatggaaataccttcgctgattcactgtagacatcaggcttattgaccagtcacttctgccactaattgtggcagcatgcgccatggcggcgaagcctatatatttttgaacaaatggataatttaatatacgtttacgttctagcaacgacagctatgcagcgttcacttctgatcgagccgggcttatgtataaaaaactaatcaacccaggaaagcgatcagctccgacttagagctctgctggatgatatttatctgctatttatctcctgctggtccgaaagctaaatctgatttgccggcctactttttataaagtgcccgtatttataaacaatattcgcaacgaccttgattttgtcggaacagcgtcgacagctggaaacaagttaacaaaaatactaaggacaagttctataaataaactttcgtgagaaatacggtttctcatttcagtttcagttatcttttattgattctgatagtgtgcggagctcgattatggctatttagtgaaggtttcagtactgataaagccgcagatgacggaaaatgtaaatgcacaaatgctctgcatgcggaaagcggcgggaaaggtgcgccactcctaacaatggaaaataaacactaatgataaagcaaaaaataatacaaatgtgcatgcataacgtttcctgtttgtcgaacggtaaactataattgctacgcggacgacagatacctgcctgcaacattacggttatccgaattcctcaggactccttcgcaatgagatggagtcatgctggagctgggggcttctagacactatgtatgaatacgtctaggttagattagattggtcaggcgctggttgctatgcacggcgcaacgttgacaaagttatcttctggtttcctatactaggcgcccaaacttgttcgctttgctcactgcgtttttgagctacttgcaaagtacactggggaaaatattaactgccattttaaatgatctaagtccatcattatgaagattgttcactaataaaccgataacttcttcgttggaaatcgtgaaaatataaatttcatgtacttattcttctccaatgtcgatcagttaaaagtcaagacttcaaagtccattgaaaggaatactacattatttcttctaggtacctacctacctataaaatacttacttttcatttttctaaaaaaaattttttcggtggtattgttgcattggtaccggttttctatatactttgtacgccatttgtaagtttttttgctattacaaggcaacagtggccatattgatctcggacgagaaacgcacctgttgaaaaccaagttacttcagttgtttgcgaatgtatttttacattccgaacttataacgctgaaaaccccttacttgcaggggttggtttcagtcatacttggcttagaaatatgaattatttgtgaatatgcatccttgcaactgaaattgaagcaacacattatttacactctaccctcctaagttgtgcattgaaaatataagacgttgcaccgcacttctgtgtcgtgtctaacctgttggcttttgtagcacaattttgcaatttgtttgccattttccgcaagccaacttctgtagcacattgtgctaatgacttgccggcattcgcctcgtcttgcccctctttacaaaccattcgcggtgattattcaaaagacctcaacactcgcaaaatgttgcctcattgccaggcaattcgatttgccattgttgtgcccatatgaatacctggtctgcagcaaaccagattttggtttgtttctaagccatattcatagactaagccgggctctatgttgtcaattggaaaaaaggggggtgttaccgtttatgtatctgggacagctctctgtgtccgaggagtacgtatatcctaggaggtaattcttatttagctgccctagatattttcggcagttttgtgataattgattttacttagacaattgattttgaaaataactaatatggttatactaataatacggtattattttcaaaggttcgatttttcttatcgaccttgttacattttattatatctcaactcaaagttgagtaaaaaattaggttattacccatagacagaatctggacacttccgatggtccccctatttatgtggggtgtcgttgtcctccattacaacaacccaccaaccccagtcgccgtactcaccgcttttatgttacgcataattgaaaccaactttctgttcagtgggcaaaatccgacgcccacaatatattaaccacccccactgaggaggcccgaggttgcaagggagaaaataaacgaggactcctacccccgaagcttgtgccccacaaagcatgtcaatgtcatgaatattattgacatgaacttttacccacacaaaacacaaactgagaacagggccgatgagtacgccatttttattttgagggaacacatttccgcaaaaacaaaaagaatacaaaaaaaaaaaagaaaaacccgaaggtcaacccctttcggcacaacgctaaagggagttatccgcggagctgaagttgctttcgacgtgctgtcaaagtcagaacctgataaaaaatcaataaacaacagacagcaaacgttgtggctgggttttaccgagctcgaattcctgagttctggaatgccgtactggttcctaagttttatgtagctcagcaagatactacgattgatgtagtgccagtaggatttttgaatccagtaacttcttaaaactgaaatgcaggaaagcatgcatccttagcactggtcctggcccggaagccaatgcatcacagcttagcacttacataatgaagcgctcatagatcttccttcaatttttagggctccgcggctttttttgacatttgtacttattgttatatgtagatgtgagtgcaataatggtcaactcggtgtaccaacacaacacatagaaatgaatattggaaacactagactgcgcttgtacatatgtacatacatatgtacatatatacatgcgctcgcagggcttttaaagtccttttcttctgtgcaagacccaatgctacaccaggcatccgtttaattcgatttgctgaataaatagcaagcttcaagtgtaacaacacttccgcccgatggtgtcagcaacaacaacgaagccccatctgtatgggtacagttctaacctcgggatacagcaacgaaagggacaagggcaaaaaccggaaaccgagagaccgaaaagagaagtcatcatcgaaacctcggttggctgcatttgtcggaccatcatcatgagtattgacgaatgtgtgtacatacactggtcgggaaaattattttgaccatgtaaacgctgcacatttgtcatgagaattttttgttcggcataagtattttgacaggctttcaattcaatgaaaataagtttaaatgaagctggattagctccttattgaaacaattaattaaatatatatcctcttttggcatcaataacttttttgagtcggtcctttactgaatccttcaaattgtgaaggatctctggagttatctctttccaaagggaagtgagctcagaaatagtctcctctcgagtttaatgttacgaaactgttcttttgcgtttcaaaagagaccagatgttcacaataatatttaaatctggactttgaggtggccagtccaagacggtaacgccaacatcctttaggaacttggttatcatatccttgtaggcaacacatccccacaccatgacagagcctccaccatggctctttttctgacaaacgggccgtcttttttgcttttgctgagttggcaatcttacaaaaaaattttttttgggacgagttatactggaaagagctttcatccgcccataaaactcttctcccgaaagacttcggctttcctagatgttcctttgttcctttgcaaatttcgatcttttaactttttgaatccttagtcttcatgtcctgttcctttaaacgtcgacgaactgtgcgctcactgtttgccttgcgttcactttttggagggctggcggtcagattccatttttttaaaattcccgtataaggattttgtcgtcagcgatcgttgttttgcgcttaggacctcttctttttaggttttttaagtcattatgtttcttaaactttttaattagttaatacacactttttcgcgacacattaaactcatttgcaatgttgttttactctaattccaacgttatactgtgttaccattgatgatctaataaataattggctatcaattaatttgttgttttttattaaagttcaatatccaaaaaagttcaatttaaacaattgttgattaacacgtgttcaaaagcagaataccatttactaaatgagtttgtcaaaatacctacatattttacatattacatattttcatatttcattaagttgtttataacttttatagttttagtaaaaaaatgttcgtttcttaatttttaagtttatattacttgcacacaaaaaagtaaaaaaaaattaccaatacgaccatatcaagccatttaaaagtttcaccgacaaatgtgcagcttttattttgtccaaatactcatgccgactagtgtatgcacgagtagttcctaaaagacggagtacgaaaatcagcataaatcgagtgctgaccattcactctctatgcctgcacctttcccttcccctggcgacgcttcctcacttttacggcgctcccacgcaactttagctgagagtcaatcttatgcctcattcttttttcatatatgtatccgtgtacaaacatacatacatatatatttggaaagacaattttgtttattttcttttctaccaatttcgcacatgcatacatacatacatcaccaagagtaattctgttctttcttaaaccccaaaaaaagatagccagcgctaagcgctctctcaccatctctcttctctgtctgccccatcttttgtgtgccggcagcgcatgtgtacgtttaactttgtgtatgtgtgtctctagcgggtgtgtgtggagctgacttcggtgctgcgtcttcttcttcgtggtttgcttcgccgccgctgtcgtcgctatggttgttgttggtttgtgcaaggtcgtttgcgtacaaaattcaacattatttgaaggtcgtcctttgcttattctgcgcgtcgctttttactcgttcgctctctcttccccagcgggcttttttttgaatgtccctctctgtcgctgtctcgattttgtctttgtgcagtgcgtgggtttttgtcttcgctaaacacatcgaatggtcctagtgtgtcttagaggggaaagaatttattttagtcttttgatttattagaattggttcctggaacacactgcaccgtttattaagctaccaaacattcattgtctccaaaatgttgctttccaaacaaagatggttgattcccagggaaacataaaagttataaaaaaataaaagacccccaaataatttcttatatgcccatgctgagggttaacatttctttaaatgtgatggtttgtttgagtacaaaatttatgaaatcttattgtcatcttaagctgagatctttttgaatgagtatgtgacaccctatagtccacgcacttaccttaatcaagtacaaataagattttacagcgcagcttaatcgttgaaagttatgtactatgtaagagataaattgtgtatgtatggtatattcttgtaattaaaaagttatgcgggacttatgcatgcttatcttcctcgctgttctatttgcagtaatctttctaattaaagtaagctcacgttttattatatacaatttaattgtaaatactacatttatcaaaattccggggtcactactgcttgtcggtgggttattgtaccttaaatttattataatttcatcccatctaccatgtgactctttcgcttgtccgattgcttcattgcctcgccgctccatcgtcgcgggtcgatgacatttttcgttgctggccattgccgaagatttgtatacatttcttaagctgctgtatgtgcgcagagcgagacggatagacaaggaagaaaagagatggagagttgcaagcgagcaaaagagaactagtagggctgataagaactgaatgaaccaaaaaccccacatgctcatacgtttgtgtacaatacatttatgaacggttgtttgaaggcggctagtgagtgaacccaactaacccaagtgtcatttcatggtcggcaaaagtcgacagaaagggtggcagtaggtggcattgaccttattgttgtcgggctctctcaacattctctttgtttgtgttgctaggtttaggttttgagaaatagccgaaatcctaacaggctagaccaagtaaaagaaattattattaaaaaataaagaattgttaagtctagttgaccgactatcaggtacccgttacaataataaatatataaattatataataaataaattaataaattaaaagtaaataatttaatacaaattatattttagtgggtagaggacagcaaaacgggaggaaaaacatataaaaaaattttaaaaaatccttgaatgaatgccaatcgacgcatagttcgttacagcaaagtcaatccttttgcatcctttagggatgaacttgagaatcagtgacgttacaattcggagtcgactattgaatcaaaatttaagtgcggggagtgccgaaggcatattaaggcaaggttaaactttgctaaaacctacctatcgtttggaatgatgggtcaaaaacagtgctatttggtggaacaggttcaccagtaccacccaatccatacacaagactgtgaagaacggtggacttaaaatcatggtatggtcctgtttttcatgcaacggtgtgggttggtattatggaccaacacgtatatgtgtaaatatgtgttattgtcatatgctggacattgtcataaaatggacattctaacaggataatgatccgagacacaagaaaaccggcttaaaactggttcacccaaacacgtggccagcacaatctctatttagtcatgttaaattttgtttctttttttttcattgcactgctttttcagtgaacattacaatttctgcctattatgttgttttaatctatattttcgaaactattcacgaaataaaagtgaaacatttgctgaattgttataaattaaatacctgatgatagtataaaaaatttgcccattacaactgtaatcataggattatttatttaaactcgcaagtaccaagcactgctatttcaatactgcacagttgttcgggataaaaagcgataaaagtgtaaaaggatatatttaaaaaattggtgctaatggggcacgttcttgttaaaaatacttgtcgcatgagacatccatgttttcactatattgacaatattgtcttgccaatgcttttttaatgatcttgagagccctgatgatgtttactggaagcttttttcgccaaacaatggatattaaggttttttgaattatatttttttaatatgttttattaaaaatggcatatatataaatatattataaatagccacccatttgggcttttaatttctctctttcccctacaactccttatcgttgacatttttcaattcgttttatttttcaagttttacaacacaatggaactgcatcaacgacacctctcaaacttttacaaattgcacaactgagaaatagtctttgataaataaataaaatataagaaatcgctactgaaacaagatgccaaacatgtccagcatcaaagcggagcagcaaagcggtcctcttggaggaagtagcggctatcaagtaccggtcaacatgtgcaccaccacagtcgcgaatacgacgaccactttgggaagctccgccgggggagccactggctcccggcacaacgtctccgtgacaaacatcaagtgcgaactagacgaactaccgtcaccgaacggcaacatggtgccggttatcgcaaactacgttcacggtagcttgcgcattccactcagtggacattcaaatcatagggagtccgattcggaggaggagctggcaagtattgagaacttgaaggttcggcgaaggacggcggcggacaaaaatggtcctcgtccaatgtcctgggagggcgagctgagcgatactgaggtcaacgggggcgaagagctgatggaaatggagccaacaattaagagtgaggtggtccctgctgttgcacccccacaacccgtctgcgcactacaaccgataaaaacagagctagagaacattgcaggcgagatgcagattcaagagaagtgttacccccagtccaacacacaacatcacgctgccacaaaattaaaagtggccccgacgcaaagtgatccgatcaatctcaagttcgaaccgcctctgggagacaattctccgctactggctgcacgtagcaagtccagcagtggaggccacctaccactgccaacgaatcccagtcccgactccgccatacattccgtctacacgcacagctccccctcgcagtcgcctctgacgtcgcgccacgccccctacactccgtctctgagccgcaacaacagcgacgcctcgcacagtagctgctacagctatagctccgaattcagtcccacacactcgcccattcaagcgcgtcatgccccacccgccggcacgctctatggcaaccaccatggtatttaccgccagatgaaggtggaagcctcatccactgtgccgtccagtgggcaggaggcgcagaacctgagtatggactctgcctctagcaatctggatacagtgggcttaggatcttcgcaccccgcatctccggcgggcatatcacgtcagcagttgatcaactcgccctgccccatctgcggtgacaagatcagcggatttcattacgggattttctcctgcgagtcttgcaagggcttcttcaagcgcaccgtgcaaaatcgcaagaactacgtgtgcgtgcgtggtggaccatgtcaggtcagcatttccacgcgcaagaaatgtccagcctgccgcttcgagaagtgtctgcagaagggaatgaaactagaagcgattcgggaggaccgaacccgtggcggccgctccacataccagtgctcctacacgctgcccaactcaatgcttagtccgctgcttagtcctgatcaagcggcagcagctgccgccgcagcagcagtggcaagtcagcagcagccgcaccagcgactacatcaactaaatggatttggaggtgtacccattccctgctctacttctcttccagccagccctagtttggcaggaacttcggtcaagtcggaagagatggcggagacgggcaagcaaagcctccgaacgggaagcgtaccaccactactgcaggtaagaaaaacttgctccggtgtaaatacaaaataaattgttttttatttaattatttaacttgacataaatttatagatgagcttctctactatgatgcattttttaaagctaacgcaataacagagacaattattcttaacaaaaaaatcgtatttaaaaaaggaaattattcgtacaccgtgctactagtctatatttgcaatttttctcgacccattcaggaaatcatggatgtagagcatctgtggcagtacaccgatgcagagctggcccgcatcaaccaaccactgtccgcattcgcctctggcagctcttcgtcgtcgtcatcgtcaggtacatcctcaggcgcccatgcacaactcaccaatccactactggctagtgctggtctctcgtccaatggcgagaatgccaatcctgatcttatcgctcatctctgcaacgtggctgatcaccgtctttataaaatcgtcaaatggtgcaagagcttgccgctttttaagaacatttcggttcgtatgacttttattttcagatccatcaagttttgttaacttgcctaccatgcctaccattccagatcgatgaccaaatctgcttgctcattaactcgtggtgcgagctgttgctcttctcctgctgttttagatcaattgatactcctggagagattaaaatgtcacaaggcaggaagataaccctatcgcaggccaaatcaaatggcttgcaggtaagtttatgcgaactttgaacttgtctatgcgttgacaaaaactgtcagataaaatgtatgtcggatatacctatttaattgttataacatttttattcaacttcgataagaaataaattaattgtttgtcactttttatacttatacttatttatttatattactcgcgcagtaaatcgatttaatagattggttgaataatatcttacaggtagcaggcagcgctcgcgacccccatgattaagattaagcatgcagattttagtaacgcaaacacaactcatctttccttcagaagattaccgcccaaaacgtatacgtgattacctatttcatatatatattttccatgcatttttttttcgataagtcaaaaacagtttggccactaccactctagtacccacaaatcgcaaatcgcggacatggccagatcgattcggcttgatttacatacatatgtactttataaggtgggaagtcctttcttttatatgttactttttttcaaccgatttggaatatcttgctaatgtctttttgctaaatcaagttaaaacaatagagaatgctatagtcgagctccccgactattattagatagccgtcactcagctggaagtgtgaacgaaaaatgtcaatattttttttttatatcggtagaaattgggataaaaagttataaaatgaaaagaaatttgtgcggacggacagacggacatggtcagaccgactcggctattgatactggtcaagaatatatatactttatatggtcggaaacgcttccttcaacccgttacatacattcaacgaatcttgtataaccttttagtcaacgagtaacgggtttaaatatgtatctttaagccctaatcccactatatttgattcagacttgcattgaacggatgctcaacctaacagatcacctgaggcgattgcgcgttgatcgctacgaatatgttgccatgaaagttattgtgctgttgcagtcaggtaaaatataaacataatactagttcggttaaccaagcatattggccatcttagatacgacagagttacaggaagcggtaaaggtgcgcgagtgtcaggaaaaagctttgcagagcttgcaagcttacaccctggcgcattatcctgacacgccatccaagtttggggagcttttgctacgcattcctgatttgcagcgaacgtgccaggtgagtattgagtgtggatcgagatatacatatccaaacccaacggcttttacgaggtcaaaatacaaaagtttataaaccgattttctattcaactaagaaaatacagtatctataatgtactcattcgttctcaattagaacgagaatctatcaaaatatgttcttgtacctaccctcttattttctattaaagcgttccaaataaatgagtttaagataatgtaaattatcagtatttcatatagacaaatagacagaaataaaaaacaaaaaaatgctcactttaaaaaatttcccaaaatcttgtttaaaaaatatatatttagaacaaatgaggggtcaaagctcctttttaactagaaattgtaaatattttgtattttataaatgtattatatagtagtcgattcgtcaatacgtggactggcgtccacagtaataggaaaatattattaccacatgactgataatatcattttcaacagcttggcaaggagatgttgacgatcaagactcgcgatggagctgatttcaatttgctaatggagcttttgcgcggagagcattgacaattgataactaagacggaaatcttttaccattggcaaaacaagtttcacatatttagtattagatatatatattctatagataagatccttactgtaagttctgaaaacatgtgcctaaaaaccaaagccacgatagcagtcacatcaggcccactggtcgagattaaatccaagagcaagattgccaaatttttacaccaatatatattttgatatgagccatgtgcagggcctcagatcgctgttgttgtcggctaaagtttcagtaagaaaagtatatattgattttgctatttatacatatttgacttatgtatagtgtaaactaaagcacacatggaaaatgaaaagactaaacaaatttatttaaagattacttttactattatagaaaaaggggaaaaataaaaaacacaaaggcagagaagaaaatttagttacaacaggtagcgacatttttatattttcttatataaggaaatattcaatgtattttaaatataaagccaaacccgatttggtttgggaaagagctactgaaatttttgatatctatatattcatcactagaagacgaatgaatgtatccaatgtttaaatgttgtagcgtttagttttagtgcaatttcacacatgtctacatacatgaatattcagcgagatatgtttgcaaactattataaagcaaaagaccactcgaaatcgccatcactgggttggctaagactattccagttatgctgtttgttgcataaaaaaccacaactacgtacatcaataaaatgtataattttttattggagttttagatttgtattaacttcttccttataattacgattattattattattactaattttatgaatattgtgtaacactgacttaaatagctgaaaaaatcctgcaacaggatttaaaacacctgaatacacaaaacattataacatgaatacattttgcttatggcctagatagtttgatatgtactttgcatatgtatgcatgtgtctatatgtgagtacgtaccatacaaattcctgtcccaccagaaaaatcacacgcaataaaaaattccaaaatactaagctcgtatctacaaagaaagattaaaagacaaattgatgaataggaatatgttgccggaagtccaagagatttggctgaaagtatcgacaaattttcaacacatcgttcatggatattgtgctaacactctcagtttgaaaatcattttctgttaaactttctatataataagttctccattcgattttgtatttacaatttgtttctttaattttcctttatcagttgtatctatgaaacatgaggatctcagttcatattgatcgtgttcttctgccgtacaccgcttctgtccgttaatgtaaaccataagtataaatgaaattagttaaatgtttatttataaataaagcgctataataaatttcaatacatttatcatagttaactgattaagaccactgaaatcaaaaatattttatttactaagcaaagcacacgcaaacaatttataatgtttattacgttaacaacaaactcatttttaataattctttatgaatacacaaagttacgcaattttccctctaggcgcattgcttaaatagttaaagaaaaataataaacccatagcgcaatatttaatgtaaaacagttttccttgcgtgtgatgtttgctctagctacgtacaaattcatcatttattaaatttaaaactcaattttgcttttaaataaatttaataagtaaaattcaacaataattgatatacaattgtcaatgcaatattttgtaataaaaatgcgaaaaatcaatattagtttcactgttattacggagcctaagggtatactagattccttgaaaacaggtaaaaggaaatgttcccaacagcttattcaatctggctctgccctttcgtttgaataaactgatacgtcaaaattcttatagagtaaaagggtatattagattccttgttaagtatataacaggcagaaggaagcgtttccgacaatgtaaagtatattctcgatcaggatcaatggccgagtcgatctaggtatgtccgtctgtccgtatgaacgtcaagatctcaggaacgataaaagctagaaggttgctagtcagggaagtcgactatagcattctctcttgtttttaatcaatattttgccatttttgatcaatttttatcaaacagcgtggcagttttttgcggttttagggctatagaatgggcgggtcaaaaagttgtttggcaaatcgacagaaatttttaagactaataaaaatatgaataaatatcaaaacatttttcaaaagtttgattattatcctcgtttttctcgatgtttatgtaggcacgctccatatctgcttttaatcaaaacattgaacaacacaaaaaatgtaacagtaactatgtttgggatagaatgattgataaatgagtgcttgcaacaggtcctgaaatttatagactgaacggttacccgatatatatatatatatgtatgtatatgttgttagttattcattggttacaaattaatttattttattgtattgcttatataaagacatgagtttataatttaatggtggatacagattttttctaatttaaagtagcaaccgaaagttacaacaaaactagtatgtgtaatctatacatcccacattagtagtacagaataatttagtaataatatatatacatactttataatggtacgaattaatccatttgaaaatttgtatgttacaactttagaacatttgtttgcccaaaaataaggattcatatttt

SEQ ID NO: 2336 - DNA, 4758 bp, DROSOPHILA
gactgtgttgcgtcgtgtgatcgctagagcggttgtggaatcggattcgagcgcaaaacaccgttcatgctgtgaaaaatccgatatttgtcgtgcaataatttcctcgattggcatcaagtggcttccagtcgggtacatattgcacaagaaatgttatacgcataatgtgcacgcaaattaaacgaattctctatgaaaatgtgactagaatgtgagtcgaacaaaacgagtaaaacgtgaaatcccaactggcttttgggtaacaaatcttatcaacacagcaacggaaatacattaaaatcttgatagactgagaaagggacaattggaatacttttagttatttttaaatgttttatttttcaagttttacaacacaatggaactgcatcaacgacacctctcaaacttttacaaattgcacaactgagaaatagtctttgataaataaataaaatataagaaatcgctactgaaacaagatgccaaacatgtccagcatcaaagcggagcagcaaagcggtcctcttggaggaagtagcggctatcaagtaccggtcaacatgtgcaccaccacagtcgcgaatacgacgaccactttgggaagctccgccgggggagccactggctcccggcacaacgtctccgtgacaaacatcaagtgcgaactagacgaactaccgtcaccgaacggcaacatggtgccggttatcgcaaactacgttcacggtagcttgcgcattccactcagtggacattcaaatcatagggagtccgattcggaggaggagctggcaagtattgagaacttgaaggttcggcgaaggacggcggcggacaaaaatggtcctcgtccaatgtcctgggagggcgagctgagcgatactgaggtcaacgggggcgaagagctgatggaaatggagccaacaattaagagtgaggtggtccctgctgttgcacccccacaacccgtctgcgcactacaaccgataaaaacagagctagagaacattgcaggcgagatgcagattcaagagaagtgttacccccagtccaacacacaacatcacgctgccacaaaattaaaagtggccccgacgcaaagtgatccgatcaatctcaagttcgaaccgcctctgggagacaattctccgctactggctgcacgtagcaagtccagcagtggaggccacctaccactgccaacgaatcccagtcccgactccgccatacattccgtctacacgcacagctccccctcgcagtcgcctctgacgtcgcgccacgccccctacactccgtctctgagccgcaacaacagcgacgcctcgcacagtagctgctacagctatagctccgaattcagtcccacacactcgcccattcaagcgcgtcatgccccacccgccggcacgctctatggcaaccaccatggtatttaccgccagatgaaggtggaagcctcatccactgtgccgtccagtgggcaggaggcgcagaacctgagtatggactctgcctctagcaatctggatacagtgggcttaggatcttcgcaccccgcatctccggcgggcatatcacgtcagcagttgatcaactcgccctgccccatctgcggtgacaagatcagcggatttcattacgggattttctcctgcgagtcttgcaagggcttcttcaagcgcaccgtgcaaaatcgcaagaactacgtgtgcgtgcgtggtggaccatgtcaggtcagcatttccacgcgcaagaaatgtccagcctgccgcttcgagaagtgtctgcagaagggaatgaaactagaagcgattcgggaggaccgaacccgtggcggccgctccacataccagtgctcctacacgctgcccaactcaatgcttagtccgctgcttagtcctgatcaagcggcagcagctgccgccgcagcagcagtggcaagtcagcagcagccgcaccagcgactacatcaactaaatggatttggaggtgtacccattccctgctctacttctcttccagccagccctagtttggcaggaacttcggtcaagtcggaagagatggcggagacgggcaagcaaagcctccgaacgggaagcgtaccaccactactgcaggaaatcatggatgtagagcatctgtggcagtacaccgatgcagagctggcccgcatcaaccaaccactgtccgcattcgcctctggcagctcttcgtcgtcgtcatcgtcaggtacatcctcaggcgcccatgcacaactcaccaatccactactggctagtgctggtctctcgtccaatggcgagaatgccaatcctgatcttatcgctcatctctgcaacgtggctgatcaccgtctttataaaatcgtcaaatggtgcaagagcttgccgctttttaagaacatttcgatcgatgaccaaatctgcttgctcattaactcgtggtgcgagctgttgctcttctcctgctgttttagatcaattgatactcctggagagattaaaatgtcacaaggcaggaagataaccctatcgcaggccaaatcaaatggcttgcagacttgcattgaacggatgctcaacctaacagatcacctgaggcgattgcgcgttgatcgctacgaatatgttgccatgaaagttattgtgctgttgcagtcagatacgacagagttacaggaagcggtaaaggtgcgcgagtgtcaggaaaaagctttgcagagcttgcaagcttacaccctggcgcattatcctgacacgccatccaagtttggggagcttttgctacgcattcctgatttgcagcgaacgtgccagcttggcaaggagatgttgacgatcaagactcgcgatggagctgatttcaatttgctaatggagcttttgcgcggagagcattgacaattgataactaagacggaaatcttttaccattggcaaaacaagtttcacatatttagtattagatatatatattctatagataagatccttactgtaagttctgaaaacatgtgcctaaaaaccaaagccacgatagcagtcacatcaggcccactggtcgagattaaatccaagagcaagattgccaaatttttacaccaatatatattttgatatgagccatgtgcagggcctcagatcgctgttgttgtcggctaaagtttcagtaagaaaagtatatattgattttgctatttatacatatttgacttatgtatagtgtaaactaaagcacacatggaaaatgaaaagactaaacaaatttatttaaagattacttttactattatagaaaaaggggaaaaataaaaaacacaaaggcagagaagaaaatttagttacaacaggtagcgacatttttatattttcttatataaggaaatattcaatgtattttaaatataaagccaaacccgatttggtttgggaaagagctactgaaatttttgatatctatatattcatcactagaagacgaatgaatgtatccaatgtttaaatgttgtagcgtttagttttagtgcaatttcacacatgtctacatacatgaatattcagcgagatatgtttgcaaactattataaagcaaaagaccactcgaaatcgccatcactgggttggctaagactattccagttatgctgtttgttgcataaaaaaccacaactacgtacatcaataaaatgtataattttttattggagttttagatttgtattaacttcttccttataattacgattattattattattactaattttatgaatattgtgtaacactgacttaaatagctgaaaaaatcctgcaacaggatttaaaacacctgaatacacaaaacattataacatgaatacattttgcttatggcctagatagtttgatatgtactttgcatatgtatgcatgtgtctatatgtgagtacgtaccatacaaattcctgtcccaccagaaaaatcacacgcaataaaaaattccaaaatactaagctcgtatctacaaagaaagattaaaagacaaattgatgaataggaatatgttgccggaagtccaagagatttggctgaaagtatcgacaaattttcaacacatcgttcatggatattgtgctaacactctcagtttgaaaatcattttctgttaaactttctatataataagttctccattcgattttgtatttacaatttgtttctttaattttcctttatcagttgtatctatgaaacatgaggatctcagttcatattgatcgtgttcttctgccgtacaccgcttctgtccgttaatgtaaaccataagtataaatgaaattagttaaatgtttatttataaataaagcgctataataaatttcaatacatttatcatagttaactgattaagaccactgaaatcaaaaatattttatttactaagcaaagcacacgcaaacaatttataatgtttattacgttaacaacaaactcatttttaataattctttatgaatacacaaagttacgcaattttccctctaggcgcattgcttaaatagttaaagaaaaataataaacccatagcgcaatatttaatgtaaaacagttttccttgcgtgtgatgtttgctctagctacgtacaaattcatcatttattaaatttaaaactcaattttgcttttaaataaatttaataagtaaaattcaacaataattgatatacaattgtcaatgcaatattttgtaataaaaatgcgaaaaatc

SEQ ID NO: 2337 - protein, 808 aa, DROSOPHILA [sequence omitted]

SEQ ID NO: 2338 - DNA, 3105 bp, DROSOPHILA
atgaataaatatcaaaacatttttcaaaagtttgattattatcctcgtttttctcgatgtttatgtaggcacgctccatatctgcttttaatcaaaacattgaacaacacaaaaaatgtaacagtaactatgtttgggatagaatgattgataaatgagtgcttgcaacaggtcctgaaatttatagactgaacggttacccgatatatatatatatatgtatgtatatgttgttagttattcattggttacaaattaatttattttattgtattgcttatataaagacatgagtttataatttaatggtggatacagattttttctaatttaaagtagcaaccgaaagttacaacaaaactagtatgtgtaatctatacatcccacattagtagtacagaataatttagtaataatatatatacatactttataatggtacgaattaatccatttgaaaatttgtatgttacaactttagaacatttgtttgcccaaaaataaggattcatatttttaaataaaattcttataaaggaatgtgtttagatggttagaaagagccaccactatcttagaatatgttgctaaagtttcagcgttgcaagcttatttcagaacgttgcctcaatcatactaacgcccacaactgtcactgctacagttttggaaaaggttttgattttatcatttgtcttgcacattgtatcgatgtgccaaaaatatgatgaggccaaacatatacaatggtcatatccaatagtcagaaattaataaaaacaaacaagttttttaaaaataccgcacatgcaattagtgcgcatagtgacatctgcagtcgctaaaagagacccaagtgttaaaagcttactcgactagaagctataaatggcgattaattcctctaagggaataccctcgatgtccttatgaaggcagtggagtagcacagaaaggtaaacagtacctacgactgatttattgagatttgtggaaaaagtactacagccacactgaaaactcaactctgctgttaaacagctgaagacaagtagacaggcagacaaactctaaaaatgaacggaaagtatgtagttagcgccatccgagctctccggttgaccaatttcagccagtgcaaaggagccgctagcagtttcactgtgcgccactatggtaagccgcgatagccagaataaaaacgtgtgttgccatttcataacatcccgcgatcggcggttcttctcctgcagcctctcctcccaagcgattctacaagaagacttccgtactgagcggcgacagcggctatgaagtggtgttggatcaccggaaactgaaaacgcccaagggcacacccttcatcgtccgcagcgaacccctggccattgctgtagccactgagttcgacgctcagaaggaaaacatcgagcgttcccgcatgcacttatccgcgctctgcttcacggccattgacaatcccaatcacctctccaagttggacatggtcaactaccttctcaacttcatcgccacagacacggtgctcttccagtacgatgtgagtgaatcaactgagaattagagtgcacattccacagacatatatcttttgcaggacgaaaaggacctgcaggaccttcaggtgaatgaatgggacccggtgatcgcctggttcaaccagcgctacgacacaaacctgcagaagaccatgaacataacgccgcctcaggtcagcgagcaggataaaatgaatgtcgcaaagcattttcagtcctacagtttggaaactctgcatggtaatgcagaccataagtctggagttcaacgtctattaaatatattttcctccaggcttcattttcgctgtggacaccttaaagtcgattgtccttgcctgcgccgtcatcgagcagatgcttaccgtggagaaggctgtggccctggcgcgtctagaggaagaataccaacttaagttctggggtcgcgtggagtgggcacatgatttaagccaacaggagttgcaagcacgcctggcggctgccgtgctcttcgtacaccttaactgttcggaaaaccttgttaagcaaaagataattctttaaaattaaaatacctgttcaacatacatatgagctgactaccacagggttatggtagcacgtatgtaggtctcctaggacctaggacataataatagatgtatataaatcgtgcctagtttgaaacttatcaaggtcaggtcatcctccctttttttttagctcttaccggtttttttttgttgtaataatacggtttatattatcattttttcatactttctttaagcacgaaagtaacatactcttttgacgtctcttataacacaactgaattttagttctgattttaattagtaagccacaaggattctggtacagcaatacgtggaggcagtgaacataaggaagtacattaagttttttggaactacacatgtacaaatgtgtaggatatatgtaacatttttaaatttgaatgagattactaaattttagaaatatttagtttgtttaatcctaatttaaggttcggtttttttgcaccttgacatagaaccctatttttggaacccattggcaaaacatggacatttatttatcttacttaagaaaaaattaagtgctagtgtaataggcgcttagaggaagtctcaaaaaacaaaaataattaagcaattttttttcgtaggtgtggtatattctgataaatacttgcttggtattttaaaatagttacggtacagtcctactgtacactgcggtcacactggttcggacgtgggtggcgcatcatcggtggtattctgttgctaattaatcaagtgcaaaactacatttttcgccagtaaatccgaggaaagctaagtttgcaagaaaacaaacgaaagcaaaggcagttgataatattactggcgcgtttggtaagcagcgtcgttcgagtgcgtgattgttccaatgtttgtgctggtgtgcgtttgtgagtgccttttcactaaaaaaaaatgtaaaaaaaagtgttgccaaagcagtgaggcatacattttcccagtcgctttgtttc

SEQ ID NO: 2339 - DNA, 916 bp, DROSOPHILA
tactacagccacactgaaaactcaactctgctgttaaacagctgaagacaagtagacaggcagacaaactctaaaaatgaacggaaagtatgtagttagcgccatccgagctctccggttgaccaatttcagccagtgcaaaggagccgctagcagtttcactgtgcgccactatgcctctcctcccaagcgattctacaagaagacttccgtactgagcggcgacagcggctatgaagtggtgttggatcaccggaaactgaaaacgcccaagggcacacccttcatcgtccgcagcgaacccctggccattgctgtagccactgagttcgacgctcagaaggaaaacatcgagcgttcccgcatgcacttatccgcgctctgcttcacggccattgacaatcccaatcacctctccaagttggacatggtcaactaccttctcaacttcatcgccacagacacggtgctcttccagtacgatgacgaaaaggacctgcaggaccttcaggtgaatgaatgggacccggtgatcgcctggttcaaccagcgctacgacacaaacctgcagaagaccatgaacataacgccgcctcaggtcagcgagcaggataaaatgaatgtcgcaaagcattttcagtcctacagtttggaaactctgcatggcttcattttcgctgtggacaccttaaagtcgattgtccttgcctgcgccgtcatcgagcagatgcttaccgtggagaaggctgtggccctggcgcgtctagaggaagaataccaacttaagttctggggtcgcgtggagtgggcacatgatttaagccaacaggagttgcaagcacgcctggcggctgccgtgctcttcgtacaccttaactgttcggaaaaccttgttaagcaaaagataattctttaa

SEQ ID NO: 2340 - protein, 279 aa, DROSOPHILA
MNGKYVVSAIRALRLTNFSQCKGAASSFTVRHYASPPKRFYKKTSVLSGDSGYEVVLDHRKLKTPKGTPFIVRSEPLAIAVATEFDAQKENIERSRMHLSALCFTAIDNPNHLSKLDMVNYLLNFIATDTVLFQYDDEKDLQDLQVNEWDPVIAWFNQRYDTNLQKTMNITPPQVSEQDKMNVAKHFQSYSLETLHGFIFAVDTLKSIVLACAVIEQMLTVEKAVALARLEEEYQLKFWGRVEWAHDLSQQELQARLAAAVLFVHLNCSENLVKQKIIL

SEQ ID NO: 2341 - DNA, 20541 bp, DROSOPHILA
agtctggagttcaacgtctattaaatatattttcctccaggcttcattttcgctgtggacaccttaaagtcgattgtccttgcctgcgccgtcatcgagcagatgcttaccgtggagaaggctgtggccctggcgcgtctagaggaagaataccaacttaagttctggggtcgcgtggagtgggcacatgatttaagccaacaggagttgcaagcacgcctggcggctgccgtgctcttcgtacaccttaactgttcggaaaaccttgttaagcaaaagataattctttaaaattaaaatacctgttcaacatacatatgagctgactaccacagggttatggtagcacgtatgtaggtctcctaggacctaggacataataatagatgtatataaatcgtgcctagtttgaaacttatcaaggtcaggtcatcctccctttttttttagctcttaccggtttttttttgttgtaataatacggtttatattatcattttttcatactttctttaagcacgaaagtaacatactcttttgacgtctcttataacacaactgaattttagttctgattttaattagtaagccacaaggattctggtacagcaatacgtggaggcagtgaacataaggaagtacattaagttttttggaactacacatgtacaaatgtgtaggatatatgtaacatttttaaatttgaatgagattactaaattttagaaatatttagtttgtttaatcctaatttaaggttcggtttttttgcaccttgacatagaaccctatttttggaacccattggcaaaacatggacatttatttatcttacttaagaaaaaattaagtgctagtgtaataggcgcttagaggaagtctcaaaaaacaaaaataattaagcaattttttttcgtaggtgtggtatattctgataaatacttgcttggtattttaaaatagttacggtacagtcctactgtacactgcggtcacactggttcggacgtgggtggcgcatcatcggtggtattctgttgctaattaatcaagtgcaaaactacatttttcgccagtaaatccgaggaaagctaagtttgcaagaaaacaaacgaaagcaaaggcagttgataatattactggcgcgtttggtaagcagcgtcgttcgagtgcgtgattgttccaatgtttgtgctggtgtgcgtttgtgagtgccttttcactaaaaaaaaatgtaaaaaaaagtgttgccaaagcagtgaggcatacattttcccagtcgctttgtttcaaacgaacgagatttgcaaaatgcgatttatagaccagaaaacaaatctgtatcgttgcgctggggatatttatcatttgaaccatcccttttcactgttctcggtagaggggatgtgaaaaaaccagcgactacatcaacaaaagcgtgtgtgtgaatataacaatctcgttgttccctagtttagttgctaagaagcattttaataattgtgaaatcccagtaccgaggacgacaacaaatgtagattttttcaaagcacaaacaactgcagcacgacgttcgtcgcccttcgggagcggttgtattggtgttccgtgctgttgtgtttgtgctaccaccttgttcgattttaatgtgttgtttctgtttttcacatcaaagctccgtatttcgtgcggaaagtgtaaatggcgtgttttaaatattatttcggatgtgtctccgctatataatcagctgtttgcaacgttagcgttgacgcccacatttgagcccactgtgtgcagaattcaactaaaaggtaagtccgattgagataattgtattgtaagcaaacaccaaacagtcacactttttactatttatatacatggcttacagtgttacctccttaaaccgaatttcatgtgtgtacacatttacacgtatacgcattgacttcttttgttctttgtttttattccctgtcagagagtatattgattttaggtggacatttgcgaccatataaaatatatatattcctgataaagaatatttaatatatcttctttttcggtatacaccagtgtttgacagtatataatttcggttttaaacagaaatctggatgaagctgttctatctttaatatcaaattacggaaagggtatataagctccggtttgttgaagctactattcttaattttaattttaagttggtctatgctaattgtgttttatcctgatttgtttttatcttttactgttttttttttgtacattttgggaagctgaaacaatttctgattaatttttaaaaaagcgcgccctataggtaaattttactgtgtaatttagtcgaatgatattgggcagattgggcatgcagattgcagtgacgtcggcggagcttaagaatgtttatgacttcgtcttctaaaatgttaatgtttttgaaaaaggctcttagagaatacaattgattttcttgccaattaaaaaatataattctgtcataatcgtggacgtctgatatagaatctgcgaaaggtcacgcttttaactttgcgtcaatatttggtcacccaccgttggtttggcatataaattgccgggctttggaatttcagtttcgcaatgaagtgtaaggtgtgaaaaatgtttgcaataatcaaatcaaatcagcaccaatgaggttaaacgggggagggcaaccctgaattgctcgttcagatctgacttcgtctgcttctgtaatgaggatgtgctcaattagattcaaatccatgtgggttcataacgagaaacagggaaagttctacggtttcggctttttagtgctttactaactagaaaaatggaatgggtgtgccctttaaaatataactaaagaatacagaacataattggggctgtcaatgccttttgtatcaccttgcttatttatagtttgtatattttatacatatatcaatttaagcggtttttgaataataatagggtatattgatttaagccagaactttgtgccgcagtgaagtatatagagattttaccagattcactcgatttgttaaaaagtatgtaaaaggttttgagtccttcctaatgaactcctcgatctcgggaactataaaggctagaagttgatattaagcatgcagattacagagacatagacgcagcccaagtatgttttaaatgtttcattttaatatagtatttcctgatctgtatcgtaagacaacaaaattatgaaactttgcgttcgtattcccactagctgagtaacgggtatctgttagtctgggaattcgactttagcattcacttttgttataccccttactctacgagtaatatgctctacgagtaacggtatgtaataggtacgaatatgtaataggcagaatgaggcgtttccgatcatgtaaagtatatatattcttgatcaggatcaatagccgagtcgatttggccgtctgtccgtgtgaacgtcgagatctcaggaactgtaaaagctagaaggttaagactcagcgtatagattgtagaaacaaagacgcacaaaccgcacaaaactgccacgcccacacttttagaaaatgagttgatattttttcatatttttattggttttgtaaatttctatcgatttgcaaaaaaaactttttgccacgcccaaaaaccgcatttactgcttgcttttttataattttataatataataataaaaattatatataatataatataatatatataatgtaatataatagataatataaataatataatataatatttataatataatataatatttataatataatataatatatataatataatataatataatatatataatataatataatataatatatataatataatataatatataatatatatatcataatgttcattatgaactatttataccagttactcgtagagtaaaaggttttactaggttctttgaaaagcatgtaggtagaagaaagcgtttccggtagtttaaaatatatatatattttttttttatctgaatcataagaatttaatacattatatttaacagggacttaatcgaacacttaactatcccaccaaaaaatttaacgaacatatatatggtaaaaccgactagcccactagccaaattacaaagatataatactattcccgtatatatacaatattgatcaggatcgcgcgccaagtcaatccatgtgggtgtcaagatctctggaaatataggaactattaagtatgtagattctagagacccctatgttgtgaaagttaggttaggttgcgacgccaacctaacgcacttaaaccaatttctatcgatatgacaacaatgctttgttaacttacattctgacgcccacaaacactaaattatcaagctcacacttttccaatttttttttttttctgtatatcacatctcaatttctgcggatctgccaaataaattaaggtatttttccctgctcttccactagctaattaacgggtatctgatagtcgagaaacgcgactaaagcgttcgctctgtttttaacgctatttcgcttgtaatttttttttcaattgatattcaacctattcaaaatttcttcatacttgtaatataggcttcgtctccttctttacattcgttatccaaaagcagattcggtagtcgtcgcaaattatgatctcttcaaagcagtttccatcctctttttctatcatgcagaaaagtgtttccgacttccgtatgaatgcatcatttaatgtctggttttgcgctgcctaagacaaaacaagtcactgtctcagaggacaaagaggattccagccccaaccaacaacaactaactcgaaaacacatgtttattgattttctacaactttgtgatgtttcaacagcatttaaatttagtttgcttggccatcgtggcccgtctattcatcaaatgagcctttccactccaaagtgggtctaaccagatattggggatcactagagtctttgggacgggttcaggagttaataaagtagaatattcttattttcggatttagtaaggatttagcaaatgttgctgaataatttaaaaatatctatattaggatatgtacgtatatactattgtgtataatatataattttttaataatattcttacaaaatggcgaaccctgaatatgaaatttaaaatattttgatataaaattaataacgaaggttttgacgtttgattaaaatacattcatacctgtgcaaatttttgttgttaaaaatacttcattttatgagctgggcaaataaaaaaaaaccaatttaaaaataattaatagtaggcatattttgttttttgacaaaaattttggtttcgatgtgactaattagtgacgatttagtgattaaatgaataaaatccgtaatgtttataaaattactaaaagtcattttgtaaaatgttaaaaaatgttgtaactgaatgtggtcaaactttcgccctttttaattttaaagtttcagttttaaaggaagttcaagtgcgaaacagtcaaaaaattttaatttgatttttatacccgttactcgttcagtaaaagggtatactagattcgttgaaaagtatgtaacaggcagaaggaagcgttttcgactatgtaaagtatatatattcttgatcaggatcattagccgagtcgatctggccattgcaacgatcactcaacgccctaaaatcacccaaaactgccaagcccacatttttaaaaaaatttgatatttttccacaatattattagttctgttaatctctatcaattcggcaaaaaacgttttgccacgcccaccctaaagtcgcacacacactttggaacaatttttaagttttttctcattttattccccaatttctatcgatatcccagaaaaatgataaaatttcgcgttcccatttacactagctgagtaacgagtcggggaactcgaccatagcattatcttttgttttttatttaaagggcgatatattggcaccgttaaaaatctattttgttggtccccatgagaggagttatttcttagcacatcgtaagcaatcacatatctcgtttattcattgtttcccgtttggcatatgtgaactacgagtctccatttataaaagccatctcagataaagtttgtcagatctgtctgagcctctggattactcgaaatgtgtaaataatttttgtgtcgttttcctctttatcaataatatgttttgacattcgcttgaacgcggggttctctatacaatagaagcggctagtctggttgttattattaattttttattatcattgtttgatttcaagctgtttgcgctaattgtttgccttatcttatctttactgggtacacaggatcatataaacactttcttggaagagctgactaagtgttttaagtgcaactagatatcgataacactatttcattaggtgtaaattttgtttcgaaaagtaaagcttaaaatagaaagtaccttcaaggtgggatctaacctagatttacctggataattttcttcaacgattctagtatacgggactaagaccaagaagtatattaggactgtttgttgtagatagagaattagtcaatcttcaacaatattataatcacaaataagtcaaaaacagtatggctctatggctctatgattattaagtgagtttgtatgtgtactgcgacccagtcggatctatcgtactaccccttcatgactcaaagatccccctgaagtccaaagcactgtataaatgccagatttttattggggttcagggctgcaattgtttcctgtgggactacatacatgcccaggagtctattcctcctgatggaaagcaccatgcagtcacatataatgtgtgcagagctctcctcctccatgcagcagaagcgacagagttcactttctgcaatgtcaatcttgtgcaaatggctgtgaagtcggcagtgccccgtaagaaggccagtcaaaatgcgcacggtgtttttcccgtgtgtcattaaggtcttgaaccttttatgattatattcacggaggataatcttagactgcctaacttctggcaggtgttcccagaagggcagacgtttttcttcctctagtgactttagtaagcccagtactctgtggtgaccaacaccacagaatggttcgggcccaattagaggtttctctgcccctttcctggctaggttgtccgctagctcatttcccgggatgttgttgtgtccaataaggacccaccttattgtgagtttgttgacagctcctagtttgtctagggctgtcctcacttcatttactagcttagatgttaacttagctttgctgagcgcctttatggctgcatgactatcagacagtatagcaatgtccttgccatgatagttcctttgcagattaaactccgcacagcgtccagtagcacagacttcagcttgaaaaatgctggtgtatctgcccattcattcgtggtattttaacctggggcctaaaacctccagcccacttccctagtcggtgagggatccgtctatataccacaatattgtttgtggtttcatagtgtgtactttccccagggatgtccaactgtttttattactgagatgagtgctggagttctgagcgaacctatgctcagctggcatctcatcccttggttgcatcagcaaagggatatccctctttaggcttttagcatccttacttgtgaggttgcagtcatttcctgctccctcaattcttattaggatggctttccgtttcatttcaatgccgatatgaagtcacctccattagtacttctagggctgcagtgggagaggtacgcattgctcctgtcatgcatacgcaggccattctttacagcttatgtagtttcaccttagtggtgctaaggcgtgctctatcactccaggctattgcccataggttattatcggtctgactaccatgaggtacagccatcttattatgcgtggtgaggttccccacgacttaccagcaattaccaatgcagaagcacgtgaaaagtgctctggtgcacttatcaattgtgttatcgacatgagttttgaagctaagtttggagtcaatggttatccccagatacttaacttttttactgtcctctatgcgacattctgacagggttatttccttcattctctgtagcttgtacctatttgtgaaaggaacaataaaagttttgctagggcttagggtcaggcctacttcattgcaccattcgccggtcatattgaggcccagttgaatgatatcgcagagtgtttcctcatatttacctctagctataatgacaatatcgtcagcatagccttggcaaagtatacccctgcgggtcagtctctccagcaactcgtctaccagcaagctccacaggagtggcgagaggacacccccttgggggcaaccccttgtggttgatcctgtggacgactgtcctcctatagtggttcgcctagatgccagtagtgatttgatccatctgctgtccatctgatctgagggatgcgttccctcatgggaggcattgtcgaaagcaccctgtatgtttaagaagacgcataacgccacttccttatgaatcagtgtatcctcaataaggctttcaggtgatatagggcagtatcagttgatctgcccgctctgtaggcatgctgcgtccgttggagcggttgctccacaagcagagtgattctaatgctgacgtccactagcttttccaacgttttctagccttggagctaaaaagttagccgcaaaagagttcacacacctaggaaatgtaaaatccagactgaatacaaaatttaaaaatatcggctcttagtgtttcctttctaaatatttaagtgctcggttaggttttaacgtgcttaattctcagttttacaagggctatttaaaccgtcgtaagttccagctcgcacaggatccgaaacagttttataatttcgttaccactaagcacaaaacaatttcttacccttcttcgatacttttgaaaataatacggaaacatcggatcaggcactagctgatctatttgccaagttctttaaaacaacgtattctacgttacctcattccaaacagctataatcttacgcgaatctactagttggtcccactcactgctttacgatcttcagcctgcctagtcaggtcccgacgaaatccatgactgtgggctcagattctctgcggaagccttgtgcaagcctctactgaaactgtttaccttatctctgtaatcttcacagttccctcatatatggaaggagtcctttgtgattcctcttcataaaaaaggtagcaaactgaatgcaaacatcaatcatatcaccatgtcagtacggttttatgaaacgcagatcaacaaccagtaacccctttaagctaatttcatatacactgactttagtaaagcatttgactttctcatctagcaaggaaactttcctagttgatcttctaaattggttattaagttatctggtatgcttggtcttataaaatgggggacaaaggaatttgataattcttacacgaccaaaaccttattcatttcgctagtccgtctgattcctaagtatgaatcacatgtttgaagtccccaatacgtagttcactcggaccgcattgaatcggtccaaaaaacttcttaccgtttgccttgcggatgcaaaccttatattacctccctgttccagtagactacttttaataaatttacctttcctattaacttttaactttccgaacgatgcttggaacagtctatttttgtaagcttattcgttcgaccctacttagttggtcggcttaacttttctgttccaaatagattcactaggaactacacacccctaatcttaagtcattggtctaactatgcattgcatgacccttacagagtgttatgttctgactataatagactttatcctattatcccgtatcttgactctgccgctcttaaagcaatgaatttttttttttaaatacataattactatatacataaatacatcttactaatatttatattttttttataaacctcggtcatgcgggaggtcccgctaaaaacattcccaaatgtcttggccggattggataaaattattttatttccatttaagagatatttttttttgtcgaatctttgcatttgtggccatttttgtttgccgaattcaataccaaattgttaattgtaaatagctatttttgggtactttcaatttattcttgctatataaaatagcctgtgttataagacatgaacgtattgatgttttctttactacaattacaattgtgatgaaaactcccagcttttgttggaaaacgtaatacagaattaaaagggtctgagggactgatgttgacacagacaaattgctgacaaaggtctaaaaaaacaaaaatactgaatacaacatacaaatttccaaatgttactggaaaaatatttaaagacaaaatgtattactgtttaggaaaaggccgcgatgttgataaaacaaaaaatgctatagtcgagttctccgactgtcagatacccgttcatctagttttctactatattgttagaaattggtgctataattgggggtgtaaaaaagttttttttattaaatcgatagaaaactaataaaaaaaatggaaaaagatccaaatgtttttcataagagtggacttggcagtttatggaggttttcgatattttataatgactgagatctcgacgtttatatggacaagaccagttcgaatcggctattggtcctgatcaagaatatgtcttgcttatatggtcggaaacgcttccttcttcgggttacatacattccgacgaatgtaagctgctttttacgcgtggagtgacgggtaaaaatatatggaaataagtgtgggcgaagatatttccgtaaattttagagaaataataaatcgaattttaaaatgcgttgattgggaatgcagtttatgtaaatacttttgtccaccgcaaaatatatgagtatacaattaggttaaaaccgtatgtaaatttgtcagataaaaattaaacaagaatgcttatcctggggtcggttatagcctacacttgccacatttgtcaggacggattaatattcaagtgttactgaattttgatagattaattttccaatttaaggttaaattagtattcgcggctaataagcgttgtaattttggtttttatttacttacaggtttgtaaataaccggccccaaacacaatttactgctcagagacaaagtcgacaatgaaagcaattgctaaggaaccagcccaaaaaaaaaggaaaaactaaaaattctagaaagtgtatcacatctataactactaaaggtaccgtgattctataaccgtcaatcaactgattcaaaggctaagttgaggcggtttggcacaaccgctgagagctctacattcattttgtggtaggagggcgaaagaacttacgttgttggacggaaattaatgacacttcttgggcctagcgccccaggcatggcctttatgatgaaaaagaagaagtacaagttcaacgttgaagtgcagctgcaggatttggtagaggtggccctggtcaatgaggtgctgttcgcaaagatacggttgctcgatggaggttcctttcaggagtacagtagtcggtaagatatcattaaattcatagaaatggttcagttataataaatgcttttcccagcgaggaagtgcgcaaccatcgagtagaatggaaccgcagctttgagtttccttgcaagatgagcgcgaatgcttcaaccggcgttttagatccttgccatctgcgtatatcaatacgcaaagaaatgaagggcggacgaagttactataagcttggttttatcgacctcaatctggccgaattcgccggcgccggcctcacctcccgtcggtttctcctggagggctatgactcaagacaccgcctagacaactcgatgttgcgtgtgagcattaagatgcatatgcttagcggtgacattctgttcaaagcgtaaggaatccctttttcaaaaattaataattttttgtaataaaccttatacctctacagacccacgccaaatctaaaaagcaagcagagcaagccttcaatagatgatttttcaaatgcagccactggagtcggcctgcaaattccaacggctaccgcattgcccagtataggtggcggaagcggtggcgcatccgtttccttgggcggtagtggagtcactttgggcggcatccccggtaatcagtcgttacccggaacccgacccgtttccaccacaaaggaggagggtaagtagtagttacaaatcaggattttgtttattgtagaacaaagttaacatctggatgagaaactttgaaatagtgatgttaatttatagggtcggaagcggttcttttttttgttctttatacgcatatacgcatcataacgcatctagtataccattttccccttaaagtaataacaatacaatattacaaaaaattttattttcaatgtattgtaaataatcggtttcgataggttatttccttattattatagttggtaaaatggtatactagattcggtgagaagtgtgtattaatcagacgtcacacctacgtaacgtttttatctctgttttacatgaactatttaaattattttgtcatgaaatggttacgtttccatccatgtaaattatgtatattcttatatcaatatccgtctgtccgtgtgaacgtctggatcttaggaactatacgaaagattaggcatgcaggtttcagagatttcagagactttcgctgtgcttgtttgtatcgaaattttgccactcccactctgacgcccacaacccgctcaaaacacacactttgaatatttgttgtacatttattcatttgaatgtttccaaaaatctagcgatattgcagaaaattatacagtttctcattcaactgaaattagctgaataacgggtatctgctatttcgaactcaactaaaagcaatctcctttgattttgattgaaatgttcgttttatcgtatatctattgtagtcgctttcgtgttctttcctcgtgcatttcgtcattagatgcacagctataagaggcgctagcctgtaaaaacggatgttttgttcacctataccgcatactataaagcccacaaataagcatatactttatcgctaaaatttagaagtgtttaatcggtacagaattttactactgcaatacttacagatatcgataaccaggctttgatagcagctattgtgacagactccggcttgtcggagtcctcggaatcgggggtaacgttgactacggataatctccagcagcatggctcagtcgtcgtagctaatcctattagtcctgtgacgcaggcgctaccgcaactgggaatcattggcagcaacaattacggaacaacaggaggggctatcggatttactggcgccggcaacgccaccctcatagaaatgggtcattcaagaaattccagtaatactagtcaagtgagtatagggttgaatcacttgactttacatatacgtgatgttctgttaatgttttctgaaatagatgtcaaaaggttcgggttacagtagtttttcgcacagtcaacattcaaggcaaagttctgagggtgattcgggacatgctaggtaagttaacaagaccattttaaaacgcgcttaaattctgtaaaaagctttgaacatttttcttgtgttattacttttgacatattttagaatagattcgaataatcgatatctacatatcgtttcttataaaacaatgcttaaaactcaacaagtactatatatgctaaggctttacttaacagcatattttaattgtgtctaaaacctctacctaacttcttgcgttacactgaaataaatgaatatcatatgtggcaagtcattccttactggaatagtttaaacattacattctgtactaaaaatataattaatttactatatagaaaaacacttaagtatagagtttcctatagatatgtctccattcctgtgtttattgtatttgaaaatgctatattcctaaactaatttatttttcgtctatgtatattatattttattggctaatatattttgcttggcttagattttgtttcacagagataaatatccattaattatattaagttctatatcatttaagatactttagctaagaacatactaataggtactttaattcaggccttaacggaaacacttttcataagggttatgcaactgacttaatgactgagagtttaaatgtatcttatagtaactacggtaaaaagaatctagcttaatcaaattgtaagcttttaatcaaacacaatttggtaattattaaatcaactattcggtataatagttttcgtaattatctaatctatatcaatacaaaaaataagtgcagaaatggggaaaatttcacttttgttattatgttattattttctgtcatgcaggcagagcccccacactctgctagctcaaagggagtagtttatttacagaaggcacaaagaggcgcattaagacaggtggtaaaatccttttcgttttcgggtccgttttggcagtatgctttttgtttgttaagtcctagccttgcttggaccattggccttttcaagaccaagaaatctgtaaaagtttagtattcttatttaagcggtgtataagttgttttaattcctacagtttctaaaagtagtgcaatttatattattattcaaaagcgatggcttgaacaagcctgtttagggttccattaatactaacattaacacctaacatatttgtttttgtttaattttacttatactttatacttacgttatttattgttgcatttttgtactaattctgctttcttaataatttctgtctttctttttttaactaacattatgttttatgtataaactggggtaaatggccaactaaccaaccaaaaattacatctttaaatacaatcataaacgactgcctgcgctcgaaatatataacaaaaaatctacagtcgctttagaaaatccgtttctctacttaatagactcaatcagagagcaattaatgtcatgaaattcaatataccacatagccgacagaacggtcaaaagggagatgagcatcaacaatgtaacagcttgcgagtggtagtagccaaaagccaccatgttcatactcatctcagtctcagcaccactgttgaatacgccagcgatgaacagctctaccagactccaaacgccaccatgaccaattctcaaaagttggcctttgaggacttccgtactccgatggcagaacttgcagctcctctctttcaaccgatgggagctgggtgtagtggtactcccagctctacatatcgcagtgccggatctccatcccacaacacgcaatattatgacagcggagaggcgagcgacactgacgagtgtcttaacgacgaatcgggcgataatgattctggcctagaggaaaactttcatactccccgtgtagctaagattaagtcgatggagaatctctctattctggagatggagtttcacaaggcttctatggaattggaccgcaattcaccgcgccgtctaaagcaactggctgagcatgcgcagatcccaaagatgaagtcgctaaacaacctctgttttgaccattatgcagagcagtctgtgcgcgaagagtttcagcgcatgcacgaacagtcgcttgaggagcgaatgcgttttcaacagcaccatcaattgcggaagaactccaacgcatcaaacgggtcggcgacgaagatttacgttaagcatttgagtcatcagaatcattatcacataaaagtcggtaacgccaagttcatcgggcaggacggcaatgacagtccacaatcaatgcactatcccattcagaagatgcgatcaatgggtaccatacaggacattgtaagcgaccgcattgagcctgacccgttcctcactccaaccaccgagcgaaagcctaatttctcgcgactcgtccagtccgcagagaagccggtgctgggcagcagctatgtcaatcgtctacttacctacgatgccgtggactcgccgtcggagccgtttaacagctcagtgtcctttatgtcgcgtaccccctttcagagagcttatcggcgtaacatacaacaaggcagctcttcgacgcctttggctactcaggatttcttcgccgtgcgaccacattccacaaatgctgcctatgagctaatgaggtgcgtcgcgttaaaatatcaaaacttcatgcagtaaattctattaaaaactactctaatttagtctagaaaccagagcgttactcgttactcgttactctttaaaatgtatctgttactgtcgaactgttttctaaatgtttagtctaagacttcgttttcgggacctagtcctagtctaggaattgccattggtctcctggtattggtccactaccccaaaatgccgatatcattttcgcttactattttcactggttttttcgatagatgattgttttacttctgttttgtttaaattcgcactaattattttttgcttttgttgagtggatttttacattttaaaacagttctattgcaaagaaggttgtacagtatttcagttgccactgacggttttagtttaatcaccatattaatcacctaatcaaggcatcctaattatgtattacatgatatataagctattataaacattcacaggtctcaaaaatgaattgattccatttttatcaccaccaaataacatttctgcaacatatttcgctcaacgaaatccatagtattagtcacttaaggagatatttgggaacaacagaaacgtgctttcaaaatcaaaaactgaagataaaaatataagtaaacacaacagatcaagaattatgtagcaagtagaaaaatatgacactgacactgatttcataggccatttgattctctttttaacattaataaactagtataaataattaattgatttgccgaaaatattaattcggtagcggttttgctttaaaattacatgggcgttgaaaaatatgctacgttcataagacaaaagcacgtagaacgtgtgctacgtttcataagagaaaagaaaacaaagatgttcagatgcatttcccgatcatgaatatgtatactgtatataggattgatcacacttgaaaaccatattttattactattatttttctgtctaaatttttgtttctattacgcagttattgagatcgcgaacaagattttgccccgtttctttagaataccgatagaagttagcaaaaaaaaaatatttaaaaaaaaatatttgcaagaaaatcacgtccacaatttatttaatattaatacttgttctgctaatttctatcaatttattaatttttcattaaatcagcaagtatacatacatatatgtatatacatattaaatagtagcccctgccaatctcttatgttacgaagaacgcttttgctaagcttattcgctttatttaagaggagttacactatgagtaaaatactatttgtttgttcgatttcttttataattttactctattgtttttttaaatgttaaccgctttaattatttatacgtgtttttataatatggccgtaatgttctgtgtctaaaacaaatattcgcatttatggacgcgttcattcagaaacttcagtggagttcctcgacgactctttgatggcaatatcactactgcaggccagaacagcaacatgggtgctgtcagcaccaatagacagcagcaaccctgtgctccaggaactaacagttttattggatccaattcatcaccttctggaactttggccagtatacactcaagccattctgcctcttcttcaaatggcagcaacagcagcagcagtggagccgtcattaccttccagtgtaccgcaggcagtggacaggatacagtagactcggcaaaccatcaacagcaaatgacagtgggatcgcccaacggtcatggaagtaacccccggttgggcaatgtcatgtcaggcgatgtcattagctcaatggccgccagtcccacagacgcttgtagcatccgttctaatccgtcggctgcctcacttcttctttccacgtcggcagctgcagcagaggcttctgcattggcctcggcaactactatgtccgtttcgggagcaacactatcacctctagccaccacccaaatcattcgccgccctagcatcacaatgatgtgggttcatttgcagtttctactttttatatattcacctcatcctcatactttgagcttttaagttgtaatgtcatacttcagacaacttctgggttctgcaaaaatatttttctttttcaaattgtgaactatttaagcagaaagcagatagtttgagctgtattctctagtaccataccgaactaaaagtttttttttaatgtaaaaatcagttttttcaacttttgtaaacaaaccactctaaagaaataattctcaagagtttcagaatatgtagctgcgtgtaaaatgtgaattttatttttatagcttgtttttatcctctttttagaaaatttgtttagacaaataaaaatctttatggtttttaaaaaaattaatcaatctgttaattgatcttattgatttaataccatttaaagatttttcacaagccctgcataagcgtaattattcatttattaggaggtccgtgtttaattggcatggtacaaccaaaaagtgtgcaaacgttttattgttttgccaagatattgcctgtgcttttgttgccttgtttatctcgcaattattattaatttcttatttacaatttaaattaatttgattgttgtttaaataatttcatgtatttactcatttctatcaacgaaattgattattctcattttgttccttcaggaatcccagctccggttcgttagttattagtgagacgggatctctagatcggacgaaaagcagcggtgagaagcgcaaaaagggcgcgctcgatgacgggccacgtgtttccgaccgagtggaggagacacgggtcaatccagactcattaattgatgagattttaaaggacactaaacttgatcagctggaggaatccgcagaaagtatgtaccttgatgattttcattaatgggtatataagtacaatattatttttcttagcctcaggccttcaactgtacatcgctcgcgatggaaccgcctccctgggcggacatgaggttaaatcaagcgtacgagcgggcgccctaaagcaggtggtaatgcaggatagaagatagtagtatccgagactcacaactcctttttaaaattaattagaagacttattgatcaattaaaatggagtattgaactaaaagaaatagtttaggtaatacaaacatgtttactctcaaacaaaagtgagaatgcaaatacgctatataagagtatataaaatgtttgtcggaactacactgctatgaatgtaattagctaactacacatatatatgtttatagacaaatacgcatgtatattatagatttgttaacaggcataacttgtctagttgtatttgcaagtgttgtgaatcaggtaaacaaccgttaacaattaggaaaaccaaaaatgaaattcataaagctgcacattatatatgcattataaattaatcgcaatggattacgataattaagaaaagttttaaattttattttcgaatatataattctatgttttgcttccatcaatatgtccagccttaaggcatttataaatatattaaaaaggtaatagaataaataacgcaaatgtcatgctaaacaaaaagcttcaaaattaaaacaccgaattgtaatagtcatcgaaatatagcgcaatcaaaaactaagtaagcctaattatttttaccaattcagcccattatatgcatttttcttttgaacatatacacaatcattaatcaatatttgcaaataacattactcttttaaagtcaacattgttgtagatgtctggtattttagttgtcttaaatattttttaaagcttccggaagttttaatgtaaaaatgttttttataaacaatatttttaaatcgatagaaaaagctgttagatgggaacacaaaaaataaaattagttatcacctttatgtttatgttaaaaaatttggtgtaaaattatgtagttattttttaacaatttgtaaggggagaactggaatagctccatataagtttatttaaattgtatccgcaacaaaacagaaaaataaaaatggacatacatgacat

SEQ ID NO: 2342 - DNA, 3589 bp, DROSOPHILA
gttcggacgtgggtggcgcatcatcggtggtattctgttgctaattaatcaagtgcaaaactacatttttcgccagtaaatccgaggaaagctaagtttgcaagaaaacaaacgaaagcaaaggcagttgataatattactggcgcgtttgctccgtatttcgtgcggaaagtgtaaatggcgtgttttaaatattatttcggatgtgtctccgctatataatcagctgtttgcaacgttagcgttgacgcccacatttgagcccactgtgtgcagaattcaactaaaaggtttgtaaataaccggccccaaacacaatttactgctcagagacaaagtcgacaatgaaagcaattgctaaggaaccagcccaaaaaaaaaggaaaaactaaaaattctagaaagtgtatcacatctataactactaaaggtaccgtgattctataaccgtcaatcaactgattcaaaggctaagttgaggcggtttggcacaaccgctgagagctctacattcattttgtggtaggagggcgaaagaacttacgttgttggacggaaattaatgacacttcttgggcctagcgccccaggcatggcctttatgatgaaaaagaagaagtacaagttcaacgttgaagtgcagctgcaggatttggtagaggtggccctggtcaatgaggtgctgttcgcaaagatacggttgctcgatggaggttcctttcaggagtacagtagtcgcgaggaagtgcgcaaccatcgagtagaatggaaccgcagctttgagtttccttgcaagatgagcgcgaatgcttcaaccggcgttttagatccttgccatctgcgtatatcaatacgcaaagaaatgaagggcggacgaagttactataagcttggttttatcgacctcaatctggccgaattcgccggcgccggcctcacctcccgtcggtttctcctggagggctatgactcaagacaccgcctagacaactcgatgttgcgtgtgagcattaagatgcatatgcttagcggtgacattctgttcaaagcacccacgccaaatctaaaaagcaagcagagcaagccttcaatagatgatttttcaaatgcagccactggagtcggcctgcaaattccaacggctaccgcattgcccagtataggtggcggaagcggtggcgcatccgtttccttgggcggtagtggagtcactttgggcggcatccccggtaatcagtcgttacccggaacccgacccgtttccaccacaaaggaggaggatatcgataaccaggctttgatagcagctattgtgacagactccggcttgtcggagtcctcggaatcgggggtaacgttgactacggataatctccagcagcatggctcagtcgtcgtagctaatcctattagtcctgtgacgcaggcgctaccgcaactgggaatcattggcagcaacaattacggaacaacaggaggggctatcggatttactggcgccggcaacgccaccctcatagaaatgggtcattcaagaaattccagtaatactagtcaaatgtcaaaaggttcgggttacagtagtttttcgcacagtcaacattcaaggcaaagttctgagggtgattcgggacatgctagtctcagcaccactgttgaatacgccagcgatgaacagctctaccagactccaaacgccaccatgaccaattctcaaaagttggcctttgaggacttccgtactccgatggcagaacttgcagctcctctctttcaaccgatgggagctgggtgtagtggtactcccagctctacatatcgcagtgccggatctccatcccacaacacgcaatattatgacagcggagaggcgagcgacactgacgagtgtcttaacgacgaatcgggcgataatgattctggcctagaggaaaactttcatactccccgtgtagctaagattaagtcgatggagaatctctctattctggagatggagtttcacaaggcttctatggaattggaccgcaattcaccgcgccgtctaaagcaactggctgagcatgcgcagatcccaaagatgaagtcgctaaacaacctctgttttgaccattatgcagagcagtctgtgcgcgaagagtttcagcgcatgcacgaacagtcgcttgaggagcgaatgcgttttcaacagcaccatcaattgcggaagaactccaacgcatcaaacgggtcggcgacgaagatttacgttaagcatttgagtcatcagaatcattatcacataaaagtcggtaacgccaagttcatcgggcaggacggcaatgacagtccacaatcaatgcactatcccattcagaagatgcgatcaatgggtaccatacaggacattgtaagcgaccgcattgagcctgacccgttcctcactccaaccaccgagcgaaagcctaatttctcgcgactcgtccagtccgcagagaagccggtgctgggcagcagctatgtcaatcgtctacttacctacgatgccgtggactcgccgtcggagccgtttaacagctcagtgtcctttatgtcgcgtaccccctttcagagagcttatcggcgtaacatacaacaaggcagctcttcgacgcctttggctactcaggatttcttcgccgtgcgaccacattccacaaatgctgcctatgagctaatgagaaacttcagtggagttcctcgacgactctttgatggcaatatcactactgcaggccagaacagcaacatgggtgctgtcagcaccaatagacagcagcaaccctgtgctccaggaactaacagttttattggatccaattcatcaccttctggaactttggccagtatacactcaagccattctgcctcttcttcaaatggcagcaacagcagcagcagtggagccgtcattaccttccagtgtaccgcaggcagtggacaggatacagtagactcggcaaaccatcaacagcaaatgacagtgggatcgcccaacggtcatggaagtaacccccggttgggcaatgtcatgtcaggcgatgtcattagctcaatggccgccagtcccacagacgcttgtagcatccgttctaatccgtcggctgcctcacttcttctttccacgtcggcagctgcagcagaggcttctgcattggcctcggcaactactatgtccgtttcgggagcaacactatcacctctagccaccacccaaatcattcgccgccctagcatcacaatgatgaatcccagctccggttcgttagttattagtgagacgggatctctagatcggacgaaaagcagcggtgagaagcgcaaaaagggcgcgctcgatgacgggccacgtgtttccgaccgagtggaggagacacgggtcaatccagactcattaattgatgagattttaaaggacactaaacttgatcagctggaggaatccgcagaaacctcaggccttcaactgtacatcgctcgcgatggaaccgcctccctgggcggacatgaggttaaatcaagcgtacgagcgggcgccctaaagcaggtggtaatgcaggatagaagatag

SEQ ID NO: 2343 - protein, 1008 aa, DROSOPHILA
MTLLGPSAPGMAFMMKKKKYKFNVEVQLQDLVEVALVNEVLFAKIRLLDGGSFQEYSSREEVRNHRVEWNRSFEFPCKMSANASTGVLDPCHLRISIRKEMKGGRSYYKLGFIDLNLAEFAGAGLTSRRFLLEGYDSRHRLDNSMLRVSIKMHMLSGDILFKAPTPNLKSKQSKPSIDDFSNAATGVGLQIPTATALPSIGGGSGGASVSLGGSGVTLGGIPGNQSLPGTRPVSTTKEEDIDNQALIAAIVTDSGLSESSESGVTLTTDNLQQHGSVVVANPISPVTQALPQLGIIGSNNYGTTGGAIGFTGAGNATLIEMGHSRNSSNTSQMSKGSGYSSFSHSQHSRQSSEGDSGHASLSTTVEYASDEQLYQTPNATMTNSQKLAFEDFRTPMAELAAPLFQPMGAGCSGTPSSTYRSAGSPSHNTQYYDSGEASDTDECLNDESGDNDSGLEENFHTPRVAKIKSMENLSILEMEFHKASMELDRNSPRRLKQLAEHAQIPKMKSLNNLCFDHYAEQSVREEFQRMHEQSLEERMRFQQHHQLRKNSNASNGSATKIYVKHLSHQNHYHIKVGNAKFIGQDGNDSPQSMHYPIQKMRSMGTIQDIVSDRIEPDPFLTPTTERKPNFSRLVQSAEKPVLGSSYVNRLLTYDAVDSPSEPFNSSVSFMSRTPFQRAYRRNIQQGSSSTPLATQDFFAVRPHSTNAAYELMRNFSGVPRRLFDGNITTAGQNSNMGAVSTNRQQQPCAPGTNSFIGSNSSPSGTLASIHSSHSASSSNGSNSSSSGAVITFQCTAGSGQDTVDSANHQQQMTVGSPNGHGSNPRLGNVMSGDVISSMAASPTDACSIRSNPSAASLLLSTSAAAAEASALASATTMSVSGATLSPLATTQIIRRPSITMMNPSSGSLVISETGSLDRTKSSGEKRKKGALDDGPRVSDRVEETRVNPDSLIDEILKDTKLDQLEESAETSGLQLYIARDGTASLGGHEVKSSVRAGALKQVVMQDRR

SEQ ID NO: 2344 - DNA, 10671 bp, DROSOPHILA
cgcaccacaatttcggtacaactgcaactgccccctatagcagaaacacgggcagttagcaggcacgacggactaccaataccacgcacacacgcgcaacacaaagcttctacgtagtttaatcacaatatagcacacattaacctattgcgggtagcgagccctcaccatcccatcagggttgtcaagcatttggtggctctgataaacagcaccctcttcctaaaaatggctgaaagctgcgagccgaaaaacgcaagaatgagcataatcaccccaaacgtaaagattgggaagggcagcatacgaggtcatatgtttcctgctccgaaattgcaatacaatgaatttaggacggctatttcccgtaattagtttccagttttatggaattgctattatatctttttccgacagcaccttgaaaccgcatcaataaaaagttaatgcgttgagactaataggaaaaactagaatatatacatatattatactcaaatgtaatgtgttttttaaacattgttgtgcttaagtaattaggaaaaattatgtaaaatggatattttccctttatgttcactatattgtttaagttagagaatagaatacccagaataaaattagtgatcacacatcaaaaaactatcgataaacattgaattagttccggttaaaatttaataataagtattcaaactgcacaccttgttacaaagtagtgtaactgcctaattctttatcagcagactagaggatttcgcactcccatgttcttttgcttaaatacctttctcgggcttatattagacattatactttcagagaattttttcatttgtactgttagaaggttcttaatgaaattgctgttcagttcaaaatttttatatagtcatttaataatactttacgaatgattttgtgcgctttagatttgtgagaaaaaggggtgggattatttagtagaaagtagcaaggcatttcccgatctggtaacactgattccaacactcattaccgttccaaatgaaacgcaaaaaggttcaattgttattttctctcacgatttcggcatttatattaacctaaagatggctctatagtttgcgcgcaagcaaaaacaagcagcacctaggtgcccaaacacaacaaaatggaaacgtataaaaatcaaaagtgagtatacaccaagctaaattctcgctaatttcgcaatttatcacgcacactgccgcacttggcgttctactcattcattgttgctgcacgtgtgttggtggcattgccttgtatggattttcaattgaccgggcgaacgtggcaaatcaaaactcagtggggcatgccacctggtaaaggtaaagaaattggctgacgcaatcgccgactggagttgagtaatgtgcgttgcaagtcgcctgcacgtgcgaaaatgagatgactcaccacagtaaggactaccccaagcggacacagcccaggacagagctgtttaaaccggctgcgcgattgcagctctacccttgcattctatatttacctaaaatgttaaaacataattactatattactaagctagaggggagaaagaagttttcaaaaagaaaattaaaatcaaaatttgcgtgcttaatctcaacttttttggtggtggacacggcaatattgactcttggtaataaaatgttaaaaatacatttatctttcatagttttcaatgaatgtagtctacccttagattaatttgaatataagaggtacagtaaaatgattaaaagtgtttttaaaagggtagcgactattcattatcactatgactcgtgataagtcattaaacagctgtgggctgaacagcgaaccaattaatcataattaattcgtttctttaattctcagcgccatcatggcattttcacaacaacaaaacacaccgcgaaaacaaccattctcattcttcggaccggatttcatactctcaaaacaaaacatatctttgacccctgatttgaactctggatatggacgcgacatttcaccaaaccatggagagcttgcagttgcccaaggagctgtactgggacctcaagatggagccacaatccccaacatcggttttgggctccgatctgtttccgctcactgactcaaacgatacggagtggctgtatgacgataactttgcaaatggtttgtggtgcctaaaagtttttttgaaaggatttttaaggattttaatttaaggcattactcttattggcgatgatgaagccttgaccctggaagaggtagcttctctccagttgcttagtgatgaggagatggttgtggagatctttgacctgaaagatgaaggtaggtatattttagtgtgcttacttttttgtacataataataatgtaaaataataaatgttcttgtaactgtagctgagcgcaaaatgtagataaacccatttgcgaggaggtcttaaacccataagaacgacctcttagagttcttattaaagcacccaaatgtttgctagtcttacatttttcaaagtccaaaataactttatttataacttgaagctcataatattaaagcaaagaccgttactatgattactatgataagataattggtagttatgcctgatactcgtagatcaatgggaaactaggctcattgaaatctaataaataaaagtaagcttttccgactctattcaattactagccgagtcgatttggccatgtccgagtgataatcaaaatctcaggaacaacaagagctagaaagttgatattaagcaagcatactcacgaccaattatttgaaaaagggattacatttctattgatattccaaaaatatttgagaaccttaaattgtccggatctttatattagaagtttttaataaattgagttttcaattagatacaaatatcttaaataaatacacctatggcaaatcagtaaaaatgaaatatttagatatttgcaggagctttgaacgtctgcaaaattcccgcaaaaaagatctttatataaatattaaaactcaacttttgttgtatagagctctttcttaataattagtgtagatcaagtggatttcattgtctgagtcattagggtctcgcacatcgcatttgaacctaaaattccgacaggtaaagttgaggaaccggtttcaagtttgctttgttttcgttagcgtatgtttctggtattttggccctctttagcttgagcatgagcgtgtttttgtattatggttttcaccgtgcattttattattgtttatcaacggagcgccaagcaagcgctgtaatggccaatttccaggccacaacaaagactcagatcaagcgagagcaatgaaatcagtttttgatcggttttttgcgtacttgatcacgcgttaagcgagtgatcggctggactctctcttctctctgtagcaatctctctcgactcattgctgacgttcgggtaatacattaagaattcaatagataacagctgggttgtatgattttaaaggtaggaactcgatccattctctggtggttatgactctgccccttttgaaagcttaatcttatagtgtatgttttgttagtgaaatatattaagtatctgcgatcaatgaaccatttgacattatgaccatcataattttggtatgtatttttcggtcgatcaggaagcttctttgtttgaaatgtaaatttttacggatgacgtgccccctgttttgagactgtcactaaggctcattcaggtagatttttataaataccttttaaataaaaggagatgaagttatattggttatttcaagatgctgggagattactactattaacatctcaagcatgtatattgtacatatatgcatatacgaacgattctgctaatactttaataattttagtatatcattgtacatagtttgtgtaatgcatatggaaagtggagtttcaattttactgaatttttctcagtaatataatctttattccaactaaaattgagagcaacctgcacagagacttgattgttgtcaagggtggaaagttactgactggtcaggtgcacactgcaagctgttgataatactgtatagaaaacctgtgtaatttagaaatgcaatttttgaagaactaaaagggctgagcaatgctgtggtaaaatattgattttgacataaagtaaacgaaagttaaacggaaaaatattcagaaaccagattccaaattcccagctattttcatttttgttcagctacagatcaataaaacaaaacacctaaatttgcaccactgtgcagagtccgttggcgcagattgtgactgtccgcttgtctcagctgatagcatctcgggctcgaaataaaccaacagattgatcttaatgcagggcgctctctgagcttcgctgccttccccagtggtgctcgctcgctcttgcccgctagttagccgagcaaaaaccatgcgcggtttccagtcggtactcagtacaattcgctactcagacgcgagcgctcgaattgaatctcggctttaactttgattgccgccccgcatttcacacgtcttgaacatatacgtctttactcaccaacacaaagaaaacggcttaaaataaaacaatacaataacaaataagaagagaggcagtaaccacacaagcacaggtcttcgcgttttataaacgctaaaaagccaatcgaaaataaaaatattattaaaaatgtgttaaataatttatatgaaggaaatctggtgtatcatttaaaataaagtgcagaatctttgcattgagcattaaagcggataccgctttcccactttgtgaagttggctggcagcgaaggccattcgcacctctaacttaagccacaggggaaaacaaaacggctagattccacttgaggtgatcatcgattggaaactatatgtagccgaacctcggaaaatctgcagattcacgggacaatcgcgaccacctgaaagttcgagtgcgggctccaaggactttgttagcatgataccacactgtggataccgttacatgtggaaccgtgaaattgtgataaactcgcaaaagttggttaaacgacgctaagcaggaacttcagattttcaaccacgccgaccactttgcggcagcagttgaatcctacggacagaaatccagcaaccgaaggacagacgcacaataaaaaccaatcactcaaatcccttcatgcaatttaaaacttttaatacttttcatatacgttttaccacgtttttaccgtttttaccacgtaccgtttttgttttttatttaataagaaaatgtggtgaacttataccagcctaacctacccattttccagctttttatttgtactttctaatttgattctgtgatttcttactttcatttggaaatttgattatacattactgctaatattttttctatcttcataatataaggaattctccttttaaatagctattgtttaaaactcgattattgttaggtttaggtaagtctactcatttgggggtatatatataccatttaccgtcttaatttttttttttaataaaaacttgtgggttaacacttaatattcgacaaaacgattcactgctgccgcaaaaatgagcacctatatatttatgcaagcatatggtaagttacaggttgctatgttataagtaattgcaagacataaaattaacattgagttagctaatcaagtctgccagcttgttacgtttgttttgggtcattccggtgtttctttatacttcctcgaaattcctttatgttattattgtgtataaatactaactaaattcaatattttttaaaattcgtttgcatatagtgactggaattgggtagcaagttattattgatattttgttagccattggctgtagctgtagcagtatatcagattgtggaacacgttcataaagtttaggttaatgcaagttctaagcccgtatgacattacaactcgtaaaacatcgatctacaataaacgttttacataaactttcgtggtttcatctcctacaatgtttttctaggctaaacagcccgagtgcacacttatttgcactcgcctatagagtaagtctagcttcaaggttttcgctaatcatgctctcatttaatataaatatgtatgtatgattatatttatttcccgtatgattgtgttgttgtccctgtcgttttattcgataatgcaaatggcaacattgttttctttatatttataaagctttttagtttttttttttttggaaatgaaggaaaactaaataatttatttatttaacttaacttaaaatctaattatagataatatataatgtaaatgctttccaaagtttttttcctcccttttatatatgaacaagtaaaatttaaagcaaatggcaacattttttcttcatatatataaagaaagaatacttaatatataatttatttcacatggattcaaaaattaacatcttattatagataatataatattatatataatataatagaatgtaaatgttttcaaacgattttttcgtcccttttttatataaataagtaaaatttaaagctaagcatttattaacttgcagtttagagtgtatattataatagagtttataatatttatatatgtaattactgaaatatataaacttttatatattataacgatgttataaaaagagagagaagaatcaagttaatctgctcatttctttcttaaaattcattaaagctatgaaatgaaatatttacacttccttgctattattgcaatacacaatatagtgttttatataacattatccagggctaggcattgtaacagctacagtttagtcacatttttatgtaaattaaaaacagtagttacagttgctctgaatttaacgaattcaaacgcagctgcctgcgagaagattgaacatatatgtatcgatcgatacgaaacttgttatgctaatttagaattgatcttgggagatacgagtgcttaggcaaacccaagcccaagttgtcgctgggtcagcttttacaagacaaacaggtgctgcaactatgcttttagaaggttgcactcccatgcgatttttctgtgaggaattacttattttattttaattgtgattgcttttgtaacaaataatcaaactgatgtcgtcgaactttgttcagtataaaatgtcttcgtcgttcttcaataaaagcaaattgaaaacaacagcaaaccaatcgtatactgaggaaaatatgccacaatcaatatgtaaatgtttactaaatttctgaacgagatacgagtattcgttgtccttcgttttaatggaaataggtttcaattgagagtgcaaaaatgtagacaaacaaaattcacttttataaaacacagtcgtattatgttgcttatgaagttgcaaaacatttttttgaaaaattctttatgaatatatatttttaatataatacatctgttgatggaaaagtaataaagacatctgcgtctttataaattacacacataaaataattgcatatatataaatagttatatattttcgtatttatatatatagtagagtaactgccacgcccaaatttttgcaaaattgttggatatagtatcataattttattagtcttttaaatttctatcgacttgccacgcccaccctaacagtctacagaccggtttggtcacgccagtacttttgaacaattttgaaattttttctcattttatttcgcaatatctatcgatatcccagaaaaattatgaaattacgaaaacgcgctcgcattcacactagctgagttacaacgggtatctgatagtcctgatagtcggggaactcgattatagcattcaatttttttgcttaaaattgtttggcctctttgatgaaacatgaagtttatttagttaacaatgaaatatataccctatacttgaagagtaaaatggtataatagatgtttaaaagacctaagtaaatatcaggagcatattcgaagctcattgtatttttttaaataagtcaataaatataatttttttacttggaagaaggtagtttttgatttttatttcattaaaagtgaaaatggaaaagctagttccggacgagttgtcaacagaatatttatggtctagaagtaattttgtgtgaattcaacattttttaattttttaaatttatatttttgtcttccattagaatgtcttttggaccaaaaggcaacgttgaactgcatcgattatgacagtaacagctttcagccgaacattaatgttataactcaggccatagtacccgcaaacaaagtacaattcggtgcatcttcagacgctgcttcgcttccttctgccgctgattaccagctcaatgatggcccatcccttattctacagcaattaacgccgccgcagtctccgcctcaattcgatgcttacaaacaggcgggcgatgcacagccaaaacccgtgctcgtaaaggccgagcaaaaggtggtaagtcatgatatgagtgtgcattggatataaatgtgttcttaatatacgttcaaatattgcagcaatgctatactcctgatgttacacacgcagcatctgccacgccctttaactttaccaactgggtaggcggcagcgaaattgcccgagagaaccaactggtcgatgatatcgtcaatatgcgtgctaaggagctcgaattgtccacgaactggcagcagctcaatgaggactgcgagtctcaggcgtcttcatctttagacagcagaagcacaggaagcggagtgtgcagcagcatcgccgacgccgacgaggactgggttccagagcttatcagcagctcctcctcgccagctcctacaaccatcgagcagtctgcgtcccagccaaaaaagcgtactcgcacttacgggcgcggtgtagaggatcgaaagatcaggaaaaaggagcagaacaagaacgctgccacacgatatcgccagaaaaagaaacttgaaatggagaatgtgctgggcgaggagcatgtgctgtctaaagaaaacgagcagcttcgtcgcactctgcaggagcggcacaacgaaatgcgctatctgcgccagctgattcgagagttctaccatgaacgcaagcgctaggctttattttctttgaaatcaattttatcgtcgtttgcaaagttattgttatagttaaacccaagcctcttccataaactaattgtcatcataatgtttcaatgtaatactatcaataacaatctccgggttgcccaaaatctacaaatcaccaaagtacgcagcctgtcctttgtcctacatttttggcactaatgacgagtctctgaattcggaaatatttgttgccagtggggcctaaaggcgaccccatatcccaagcagcacggtccaatgtaaaaacacattaattgaaaagctcattgatttgtttttctgcaaatcggacagtgttgcggctgctgtgctatttcaaaaacacttatatttttaatctggtagcatctcgaaagatgtagatttattttaatgtttcattatttttttcatattcaacattgatcagtaataaatcaaagggtttttaaaagaaatattaagagacatggcattttattggccgaatcatattaaattaacggtaagttatccttggtaaatttagaatgaaaaaaatgttgataatcttattaattgtattattttaaattagtagccaaaggcaaccaaccgccttgcaaaaactttcactaattaattttcaatctaagtttgtaaaattcaatccgctcgaagggcagagtctcttctttttttctgctttgcttgtaggggtacttcaacatgttggtaccccgccgtatgcatctcctgaatgacgtagttgtaatcggattatgattatgtcgatgaatatgatgcgaatattatcaccaattccgagtctcacgtgctttataaagtgcattaaaattataaagtccaattaattgaagaactggaaatataggcacatggagattaatacagataaaattgttacaccaggggctagaaaaagaaaagaacgataccaaaacaatccctcactgctgctgagattgagattggggttgggatatgggaatcggcatgggtcgctttgggattttctcgcctggacattttgactgatgagccggcgacgtgagccgtacaactgactttgcgtcgctgattgccgctttttctttgggtttcactactaaactaaattttccacatcgttaatttatattaatatgatttctgtgtcaacggtcgatgtgtgcgccgtctagagctcgccttcgacggcgtcgccttagccggtcaggtctgagctgtgttgtcgccgatgctgactcccgccgtgtatgacaaggcagccacgacgccgatggaggtcgccggcgcaatatttatctaaattgttatttttcacactcacgcagttcaatgaattcatgaaaattacgtttgggactttgtgtttgctcgtcgccgaagtcatccccctcctcctgtcacgccatcgattcttcaatccacgagccgaatgactctttaagc

SEQ ID NO: 2345 - DNA, 1914 bp, DROSOPHILA
gattccaacactcattaccgttccaaatgaaacgcaaaaaggttcaattgttattttctctcacgatttcggcatttatattaacctaaagatggctctatagtttgcgcgcaagcaaaaacaagcagcacctaggtgcccaaacacaacaaaatggaaacgtataaaaatcaaaacgccatcatggcattttcacaacaacaaaacacaccgcgaaaacaaccattctcattcttcggaccggatttcatactctcaaaacaaaacatatctttgacccctgatttgaactctggatatggacgcgacatttcaccaaaccatggagagcttgcagttgcccaaggagctgtactgggacctcaagatggagccacaatccccaacatcggttttgggctccgatctgtttccgctcactgactcaaacgatacggagtggctgtatgacgataactttgcaaatggcattactcttattggcgatgatgaagccttgaccctggaagaggtagcttctctccagttgcttagtgatgaggagatggttgtggagatctttgacctgaaagatgaagaatgtcttttggaccaaaaggcaacgttgaactgcatcgattatgacagtaacagctttcagccgaacattaatgttataactcaggccatagtacccgcaaacaaagtacaattcggtgcatcttcagacgctgcttcgcttccttctgccgctgattaccagctcaatgatggcccatcccttattctacagcaattaacgccgccgcagtctccgcctcaattcgatgcttacaaacaggcgggcgatgcacagccaaaacccgtgctcgtaaaggccgagcaaaaggtgcaatgctatactcctgatgttacacacgcagcatctgccacgccctttaactttaccaactgggtaggcggcagcgaaattgcccgagagaaccaactggtcgatgatatcgtcaatatgcgtgctaaggagctcgaattgtccacgaactggcagcagctcaatgaggactgcgagtctcaggcgtcttcatctttagacagcagaagcacaggaagcggagtgtgcagcagcatcgccgacgccgacgaggactgggttccagagcttatcagcagctcctcctcgccagctcctacaaccatcgagcagtctgcgtcccagccaaaaaagcgtactcgcacttacgggcgcggtgtagaggatcgaaagatcaggaaaaaggagcagaacaagaacgctgccacacgatatcgccagaaaaagaaacttgaaatggagaatgtgctgggcgaggagcatgtgctgtctaaagaaaacgagcagcttcgtcgcactctgcaggagcggcacaacgaaatgcgctatctgcgccagctgattcgagagttctaccatgaacgcaagcgctaggctttattttctttgaaatcaattttatcgtcgtttgcaaagttattgttatagttaaacccaagcctcttccataaactaattgtcatcataatgtttcaatgtaatactatcaataacaatctccgggttgcccaaaatctacaaatcaccaaagtacgcagcctgtcctttgtcctacatttttggcactaatgacgagtctctgaattcggaaatatttgttgccagtggggcctaaaggcgaccccatatcccaagcagcacggtccaatgtaaaaacacattaattgaaaagctcattgatttgtttttctgcaaatcggacagtgttgcggctgctgtgctatttcaaaaacacttatatttttaatctggtagcatctcgaaagatgtagatttattttaatgtttcattatttttttcatattcaacattgatcagtaataaatcaaagggtttttaaaag

SEQ ID NO: 2346 - protein, 381 aa, DROSOPHILA
MDATFHQTMESLQLPKELYWDLKMEPQSPTSVLGSDLFPLTDSNDTEWLYDDNFANGITLIGDDEALTLEEVASLQLLSDEEMVVEIFDLKDEECLLDQKATLNCIDYDSNSFQPNINVITQAIVPANKVQFGASSDAASLPSAADYQLNDGPSLILQQLTPPQSPPQFDAYKQAGDAQPKPVLVKAEQKVQCYTPDVTHAASATPFNFTNWVGGSEIARENQLVDDIVNMRAKELELSTNWQQLNEDCESQASSSLDSRSTGSGVCSSIADADEDWVPELISSSSSPAPTTIEQSASQPKKRTRTYGRGVEDRKIRKKEQNKNAATRYRQKKKLEMENVLGEEHVLSKENEQLRRTLQERHNEMRYLRQLIREFYHERKR

SEQ ID NO: 2347 - DNA, 5151 bp, DROSOPHILA
gtaaagtggccaccataatccccagaccttaatataatagaaaacgtgttaggatggttgagtttgatgctcttgaaaacaaaggaagattaagtcattattaatttcctttaaaactttaatatttaaatgttaatcaactaattttttcgaaatgaatcgaaaaaactttaaacatttcatttataaaattgttcaacttttgagcgataaattttccaaagctatcgcaaattttttgtgcgtttcgtcccttcgtagactgccgtccgcagcgatatagtttcggaaatcagcgttcatacttgacttggtcagatcaaagacttaatatatacgcgtccttctacctgtcttcccaaaaacaatttggccatttgtcataaaacggcaaaaaacgtgaaacccacaacttaaaagcaattaattatttattattactgtaaacaatccaatatcgcaaaacccaaccgtcctggaaattgtaatactttaaatcgaatgctaaatcaatcaattggaatcatcggtattcgagcgattaagacatgtcatttttattattttcccttctttattgttgtctcaataacgtctttcattagcctatttacattgcacatattcatattccattgctcagcattctactctactctgaaatgttagcaagcaatacatttaaaaagactgattttgataagtcctttctgaatgagagagaatgctatagtcatgttacccgactatcagataaacgagagtcaacttttaaaagtttgttgaaatattcataaataataataggtaataaataaataaaacaaacaaatgtttatttttcttcgtaatagcataccaacccaaacaaattaataagctttaactattttatgaatttttatattaaggggaaactaatatttgatgtagccaacccaaacaaatgaaaaaaatccttctaaaatttgttcctttttatttcaatgcgcttttcagctaaaaatgagaatcgcaattataggacagagcaattttgctgctgatgttctggagcttctgttggatcgctcaaatatccaaattgtaggagtcttcactattccagataaaggcagtcgagaggatattttggctactactgctaccatccacaatatacctgtttttaagttcgcatgctggcgtcgcaagggcgtggcactacctgaggtcttggaacaatacaagtccgtgggggctaccctgaatgtgttgcccttctgttctcaattcattcccatggaggtgattaacggggcgctattgggcagcatttgttaccacccttctatcctcccacgtcaccgcggagcgagtgccatatcgtggacactgatcgagggggacgaggtggccggcttcagcatcttttgggcagatgacggtcttgacacaggacccctactgctaacccgacaaacaaacgtggaatccacggacactctggacaccatatacaagcgctttttgtaccccgaaggtgtgaaggcgatgggcgtcgccgtggacatggtggctagtggtacagctcccaagataattcagccggaagtgggggcaacctacgacccggctatgtttaaaacagaaaatcaggttatcaatcttcaggctacagcagaaaaaatttggaactttgttcgtggtctggactcagttcctggagccatagcaacggttctgcacgggaatggcacagaggagcaaattcgactctttggtgctcatttgtactctgctggccccgtgtcgaatggaaaggttcttcgtctaagaggcttaacaaagaccgcctggatacacagcggtggtcttcttatagagggaacagacggtgcctttgtcaacattcgccgcattaagcgtggcacaaaggtaatcagtgccagcgagtggtttaagcaagctgaggaccagtctatcactgacttcagcgaggacgaattggtaaagcgatcgttgctggctggaatttggaaggcaatacttaaggaagatgtcgagtcatcgactgatttctttgcatccggagctggttcaatggacgtggtgcgcttagtcgaggaagttaaagaagcctttgacgtgcccctgcagaacgagcaagttttcatggcgcctgtgtttgaagagttctttagcctgctggttaggttccttcgacagggaagtgccggtttcggtaaccagcagctcgattttgaggcattcacgctgaaagccaacaaaagagagattcgagtgcccacacaactttttatcaacggagagtttgttgacgccgaggctcaacgcactttggaaattgtaaaccctactaatgaggaagtgctttgcaaagtggcatgcgcttcggccaccgacgtggacaaggcagtgcgagcagcgcattctgccttttatggatcttggaggcaaataacacccagacaacgaggccagttgatgctgaacttggctgatctgatggaacgaaataaggaggagctggccacaattgagtcagtcgattcgggagcggtttacacgctagcccttaaaacccatgttggaatgtccatcgaagcgtggcgctactttgccggatggtgcgacaagatccagggcaacacaatccctgttaaccctgcgagacccaacaacgtactgaccttcacccgtaaggagccaattggtgtatgcggtttaataacgccttggaactaccccctgatgatgctttcctggaaaatggccgcctgcattgccgccgggaatacctgtctcataaagcctgctcagacctgtcccctgaccgctctaaagtttgcagagctaactgtccgagccggattcccccccggcgttatcaatgtcctgcctggaaaaggttcagatgcaggccaggcagtggcagaccatgagctggtccgcaaactggggtttaccgggtccacacccattggcaagcacattatgaagtcatgcgcagactccaaccttaaaaagtgctccctagagctgggcggcaagagcccgctaattatctttgcagattgtgatatggacaaagccgtcaaacacgtgagtgaagatctataaataatataaataaagagcatttatgatttagctttaaattagattgggaacaatgttgttgatgcggtcaactctgttggctaaagatataaaatgtattagtacgatatcatacagttaattctatagagtttatcttttgtttctgcttctttgttaatgaaagtactgttaaaaataacaaattataattaaaaatgttactttaaagttaaatacttatacctgttacgagttaattaaatgtatattatgtattttcattgaaaaccgtatacgggacattccgtatgtcaaaattatttataatgggttaatcgtatcttgcttagcttaatgtaccaaacagtctaacgatacaatgtataagtaacagtaacttcctctttttcatttagggcatgtcctcggtgttttttaataaaggagagaactgcatcgccgctggacggcttttcgtggaggatcggatacacgacgaatttatccgacgcgtccttaaggatttgcgcaccatgacaatcggggacccacttgaccgctcgacggcccacgggcctcagaaccacaaggcgcactttgacaaactgctggagttttgtagacgtggggtcgacgagggcgcaaagctggtgtacggaggatgtcgagtcccaaacctcaagggatattttttcactcccacagtgtttacgaacgttacggacgatatgtttattgcccaagaggagtcctttggaccgatcatgataatatccaagttcaatggcagcgacatagattcattgatgcagcgagctaatcgcacagagtatggcctggccagtggcgtttttacaaaggatattggcaaagcgcttaactttgcggatcgcatcgaggccggcactgtgttcgtcaatgtatataataagactgatgtggctgctccatttgggggctttaagcagagcggttatggcaaggacttgggtcaggaggcgcttaacgagtatcttaagaccaagtgtgtcacagttgaatattagaaggcggcagtccgcgtgagcactatgagcactccaactgctattgtaagtccaaaatgagtggaacaccgttaagagacgggaattttcaacattaattcttttcggtttgtcttactgtattaaatctttgtttcacgccttggaacaacatataatgttaaacagctgaaaaataaaaatggattgaagtttttctaaataaacctagtttagcggaaaatttacaaatttagatagtgggaagcaaatttgaaattcttgtaggaaatctttagaaatgggaaagataaacaataaaatatgccaaaaaaggtttggtcacgttaacgctcacaaaccgaacaaccctgccacgcccacaaatgtatgttttgttttttaagaaagcgtttccgaccatataaagtatatatattcttcataaggatcaatagtcgagtcgatctgaccgtgtccgtctaatcgtctgtctgtccgcatgaacgttgagatattaggaacttttgaaatttgttttgatattttttcatatttttaatagtcttgttaattcgtatatttcttcacatttttattagtcttgaatttttttttatagatttgacaaaaaactttttgccgcgtccaccctaacgccctaaaaccacccaaaactgccacgcccacatatttgaaaaattgttagatattttttcatcattttattagtagtgtaaacatttatcgatttgcaaaataaattttttgccacgcccaatttttaaattttttgttattcttatgtctttggtttacccttattaagatggttggttaagttaattgtatagaatttaaaaataccgcggacatagattcaaaaagaactttaagttttctccatgtcaagcggaaaatagaaaaatcaatacctcgcatattaccggaaaaatcgagagcttcttcttcagtccgttctctttcgcttactgcgcaagaccactggattcggcgtgct

SEQ ID NO: 2348 - DNA, 2735 bp, DROSOPHILA
taaaaatgagaatcgcaattataggacagagcaattttgctgctgatgttctggagcttctgttggatcgctcaaatatccaaattgtaggagtcttcactattccagataaaggcagtcgagaggatattttggctactactgctaccatccacaatatacctgtttttaagttcgcatgctggcgtcgcaagggcgtggcactacctgaggtcttggaacaatacaagtccgtgggggctaccctgaatgtgttgcccttctgttctcaattcattcccatggaggtgattaacggggcgctattgggcagcatttgttaccacccttctatcctcccacgtcaccgcggagcgagtgccatatcgtggacactgatcgagggggacgaggtggccggcttcagcatcttttgggcagatgacggtcttgacacaggacccctactgctaacccgacaaacaaacgtggaatccacggacactctggacaccatatacaagcgctttttgtaccccgaaggtgtgaaggcgatgggcgtcgccgtggacatggtggctagtggtacagctcccaagataattcagccggaagtgggggcaacctacgacccggctatgtttaaaacagaaaatcaggttatcaatcttcaggctacagcagaaaaaatttggaactttgttcgtggtctggactcagttcctggagccatagcaacggttctgcacgggaatggcacagaggagcaaattcgactctttggtgctcatttgtactctgctggccccgtgtcgaatggaaaggttcttcgtctaagaggcttaacaaagaccgcctggatacacagcggtggtcttcttatagagggaacagacggtgcctttgtcaacattcgccgcattaagcgtggcacaaaggtaatcagtgccagcgagtggtttaagcaagctgaggaccagtctatcactgacttcagcgaggacgaattggtaaagcgatcgttgctggctggaatttggaaggcaatacttaaggaagatgtcgagtcatcgactgatttctttgcatccggagctggttcaatggacgtggtgcgcttagtcgaggaagttaaagaagcctttgacgtgcccctgcagaacgagcaagttttcatggcgcctgtgtttgaagagttctttagcctgctggttaggttccttcgacagggaagtgccggtttcggtaaccagcagctcgattttgaggcattcacgctgaaagccaacaaaagagagattcgagtgcccacacaactttttatcaacggagagtttgttgacgccgaggctcaacgcactttggaaattgtaaaccctactaatgaggaagtgctttgcaaagtggcatgcgcttcggccaccgacgtggacaaggcagtgcgagcagcgcattctgccttttatggatcttggaggcaaataacacccagacaacgaggccagttgatgctgaacttggctgatctgatggaacgaaataaggaggagctggccacaattgagtcagtcgattcgggagcggtttacacgctagcccttaaaacccatgttggaatgtccatcgaagcgtggcgctactttgccggatggtgcgacaagatccagggcaacacaatccctgttaaccctgcgagacccaacaacgtactgaccttcacccgtaaggagccaattggtgtatgcggtttaataacgccttggaactaccccctgatgatgctttcctggaaaatggccgcctgcattgccgccgggaatacctgtctcataaagcctgctcagacctgtcccctgaccgctctaaagtttgcagagctaactgtccgagccggattcccccccggcgttatcaatgtcctgcctggaaaaggttcagatgcaggccaggcagtggcagaccatgagctggtccgcaaactggggtttaccgggtccacacccattggcaagcacattatgaagtcatgcgcagactccaaccttaaaaagtgctccctagagctgggcggcaagagcccgctaattatctttgcagattgtgatatggacaaagccgtcaaacacggcatgtcctcggtgttttttaataaaggagagaactgcatcgccgctggacggcttttcgtggaggatcggatacacgacgaatttatccgacgcgtccttaaggatttgcgcaccatgacaatcggggacccacttgaccgctcgacggcccacgggcctcagaaccacaaggcgcactttgacaaactgctggagttttgtagacgtggggtcgacgagggcgcaaagctggtgtacggaggatgtcgagtcccaaacctcaagggatattttttcactcccacagtgtttacgaacgttacggacgatatgtttattgcccaagaggagtcctttggaccgatcatgataatatccaagttcaatggcagcgacatagattcattgatgcagcgagctaatcgcacagagtatggcctggccagtggcgtttttacaaaggatattggcaaagcgcttaactttgcggatcgcatcgaggccggcactgtgttcgtcaatgtatataataagactgatgtggctgctccatttgggggctttaagcagagcggttatggcaaggacttgggtcaggaggcgcttaacgagtatcttaagaccaagtgtgtcacagttgaatattag

SEQ ID NO: 2349 - protein, 909 aa, DROSOPHILA
MRIAIIGQSNFAADVLELLLDRSNIQIVGVFTIPDKGSREDILATTATIHNIPVFKFACWRRKGVALPEVLEQYKSVGATLNVLPFCSQFIPMEVINGALLGSICYHPSILPRHRGASAISWTLIEGDEVAGFSIFWADDGLDTGPLLLTRQTNVESTDTLDTIYKRFLYPEGVKAMGVAVDMVASGTAPKIIQPEVGATYDPAMFKTENQVINLQATAEKIWNFVRGLDSVPGAIATVLHGNGTEEQIRLFGAHLYSAGPVSNGKVLRLRGLTKTAWIHSGGLLIEGTDGAFVNIRRIKRGTKVISASEWFKQAEDQSITDFSEDELVKRSLLAGIWKAILKEDVESSTDFFASGAGSMDVVRLVEEVKEAFDVPLQNEQVFMAPVFEEFFSLLVRFLRQGSAGFGNQQLDFEAFTLKANKREIRVPTQLFINGEFVDAEAQRTLEIVNPTNEEVLCKVACASATDVDKAVRAAHSAFYGSWRQITPRQRGQLMLNLADLMERNKEELATIESVDSGAVYTLALKTHVGMSIEAWRYFAGWCDKIQGNTIPVNPARPNNVLTFTRKEPIGVCGLITPWNYPLMMLSWKMAACIAAGNTCLIKPAQTCPLTALKFAELTVRAGFPPGVINVLPGKGSDAGQAVADHELVRKLGFTGSTPIGKHIMKSCADSNLKKCSLELGGKSPLIIFADCDMDKAVKHGMSSVFFNKGENCIAAGRLFVEDRIHDEFIRRVLKDLRTMTIGDPLDRSTAHGPQNHKAHFDKLLEFCRRGVDEGAKLVYGGCRVPNLKGYFFTPTVFTNVTDDMFIAQEESFGPIMIISKFNGSDIDSLMQRANRTEYGLASGVFTKDIGKALNFADRIEAGTVFVNVYNKTDVAAPFGGFKQSGYGKDLGQEALNEYLKTKCVTVEY

SEQ ID NO: 2350 - DNA, 10688 bp, DROSOPHILA
aaaatgggcatgtaacgaagggccctaaaacaaaagagaatacaaaataagtaacatgaagtacaaagtgtgcgtgtgctaatttgaagtatagggaaacttatatttcataagcatttgcagtggaagtgaatagaatagaatgtataagagagcgattgaatgaggtatagctaatgacgattgacatttaattaagacgggtcaaggacgtatttctttaaacagaatggtgttcctattgattttttatatttagaatggaaattcgagtaccaaacaaaattgtacaaaatttcctaaggcaaataaatgtgtgtattcccaacaccctttgtgattcgtaggaaggaagctggtgttgcctacatttctgcgctttgcccttttccattcaaagccaatagcagccaaattgcaggttcagaaatagaagcaaaagctgtggctaacgcagggccgagtccattggggcgcgttgcgcaatgagcaccgcagaaaggcagcaacggcagcggcgtcactatttgcagaaaaagagtaagtcaagtcatgcgagcttgagtgtcgggactttccatgataaaaagagagatcagaagcagggcgacatttcaacgtaattaagttgtgtagcctgtcaggcttggccagctgtcccagccacatcccattgcccgctgctgtttgctaaaacgatcggatttgcccaggggccaatgctaatggaaacacacacaacccggccatagcaaaacgcaccgaatatgctattaagctggcgcccagctgtcaaattttgtggaatggatttctcccacaacctctactcaaaaagggaacacataaatttgcgagcttagattccagttgcgttctctttagtgcttttcggctaccgtaacttctctgcgcatgcttgtggattcttagcttgacttcccaatgcttttttccacacttaatattacataaccgttgtcagatagtgtggctaaaatcagcagaggtgactcaaatttatttaatgctagttggcctatattctttcaacaaataattttcaaaacatttgcaaagtaccacaaagtattggataaacagaaagtttaaataacatttaaagcaggtatccttttgccaaatcgcatcgttaatgaaaaaaattaattggtaggaaaaattgttcatataagcagcagtagtaataatgattctattcaaaaaccattcgtacagaaggggctaccgcatatataaaggaaatcaataaaaaaaaatttgaaaaactgcgttttcttttcaaaaacaaaacaatctaaaaattataaatttttgtatataaataatattttttagtaacgattcacattaaatgcaagtcacaacaatactatggttacagacgtttaaaaatatataaaaaaaattttgcaccagaacagttgataaaagaaacttaaaataacgacttaaaacaaaaataaattcgaaataattcaacttgaaagacaatacgcccatcaacacactacaaagttaaaatggccgataaaaaaattggtgaatactatgcaccacctgtgaaaatgggcaaatgggagggtttcaaaaaattcctatggaacagtgaaactagccaatgccttggacgcaccggatccagttggggtaagtacattgaatcccttcatttttatttaatattatgtctaataacaacaatttactgagtggattttggtatgtccagacctaaatatacattgctacacaaaattaaaaactattaaaacagcttatcaataaaatcgatatcggcgtgtgatcccaatatatgtatatattttgtaggacgtataaagtttttctacttctcatcgacgtaatatagattgatggttatcggcatataaatacagatattttattaaattatattaccaaccaaaaatcaattattgatcaagtagttcaagctattcggtttcggaaattgaagtagctaataaaacaaattctagccccattgaatagatttctataattgtaccagctttgtaataggtcatgtaagaaacgtcagaattgtgtcacctacttactggcaaacgggagtatgtcactacagttaaatttaaggtaaacctctattctctttttgtaatgcaaacaatggctgtgttgtcctaattcttacaagggttagttagattatgggtatggctaactgttttatttattacggtcttattaatttatcttaaaatatacatacacatacatacatacaatacctattatgatattaacattaaataatttaaactttgcagtcaaacgaagtatgtgtacatttttagatgaaaacacatttgttagcaaggtatcaaaatctcggtccatttatcaattgccacaattatcgtaaaggcaatttaaaaaatagattcatctggggctcaattattgaaatcaacttgcggcgcagcaatctgtgctaccagtaaagcaattaaatgaatatcgtttcaatttacagtgatactcgaaagttagctaacaacatgctaaataaaacgctgcgatttttaacgaaaccgtaataattcaactaaatactataacctttacacaagtgacaccgtaattagcttgcgaatcataaaaaatttgaatgaatttccccgactaacagatacccgttactcagctagtggaaatgcgagcgcgaaatttcaccatttttctggaatatcgatagatattggaaactctcttgatttttattagtcatgtaaatttatatcgctgtttacattttttatacccgctactcgtagagtaaaagcaaagacgctagaataattattctagtgtctttggtgaaagggtattctagattcgatgaaaagtatgtaacaggcaggaggaaacgttttcgactatataaagtatatatattcttgatcaggatcaatagccgagtcgatttagccatgtccgtataaacgtcgagattccaggaactataaaagcatacagattctatagacaaagtcgcagcgcaagtttgttgatccatgttgttaagcccactctaactctaaaatgtgttgatatattttcatatttttattagtattgtacatttttattgatttgcaaaaaaaaaaattgccacgcccactctacctcctaaaaccggccaaaactgccacgcccacatttttttttaacaatttttcgatattttttaataattttattagtcttgtaaaatctatctatttgccaaaaaacttgttgccacgcccactctagcgccataaagaacaattcctctttggaacaattttgataatttttcttattttcttctccaatatctatcgatatcccagaaaaattatgaaatttcgcattcacacttgctgaatagcgggtatctgatagtcggggataataatcaagatcaatttatttcaaattatctaatactggcaatgttttattgtagataagcagattcttacatgcatatttccttttcattttctttgaccaccttatagttagttcagaagattggtctcacttgttggtatctcgttcgccctctcttattcactaactattaactaactattcactaactaatcactaactatttaacgggtatctgatagtcgggaaactctgctatgcgaactcgtttgttatttattaagctaagaattatacctatgagtactttataactgttgactctttccgtgtttcacatctttccagcgaaaattctcctattttacataattttttatgcggcgttaactggtttttttgctgcaattttcactgtattttatcaaactttggacaatgaaaagccaaaatggatgcttgacaatggtttgatagggtccaacccaggtaagtaacgaaaaaacatactacctttaaatccccatgaatcttgttaaaatgaatatactgtgttggggaatacagttaagattaaaaaaaaaaattaaaaaattaggttaatttaacatacaaatttaatatttacttaatttttacatattatttgaaaaaagggttctggattctatattctttttcattgtgatgttctctgtactaagtgtttcgcacaatattccagatagaaagaaatacaatatttcattttaaatttctgtaaccacagttttttcaaacaggaaaccaaagttctgagccaaagagtaagaaatcagattaagaatgcatcagtaaaattcattactttacgtttcattaaaattatgaaaaggaaaactaaacgtttacaaattaaagtttatttactttgaaatttcaagatgtcgaccacatcttttttattttaaataccaatagcaaatttactgataatttatgcttatttacggagataaaacacaagtctctttggccggaattctaaaaaagacaattacgaatgtaaccagagagatgaatgtttaaaaaatgtatatacaagtaacctgccttaaagagaaaatagttacaataatttatattttctcaactcaactcaacgacgataatatttttccctctacatcaggtctaggctttcgaccaatgccaccggaagcgaatgttgagagcacattagtttggtacgagtcatcaaagaaggataactataagtactgggtggacgagacttcacgttttctgaaatgtaagtaatataatgaatagagcactctcaaacatacttataatggaaaagttttaacaatttactttatattgcgtttggtcttcaataagttgcgttcctaataataacaaataaaaatccaataaaaaagtattgttttttacaacatttttttgtattgcaatacgttttcggaaaattaaatatatattatatattatattatatatatattaaatatgtgtattcttggtaaggaacgccatctttctgtccgcgtgtcgatctgtctctacgtatgaacggccacatatttcacttttaataccctatcagacaatacatcgattttagtcagaagtttacaacgcagtaaggataacattaactacataaccatcgtaacgtcgccaccgcactatgggaaatttgacatattttttggcataaattaatacttcgtaaactatttaagatacgaaaattttttttactcaatatatttttccctatctatttcaaagggaaaaaataagtcattttcatttcctctccacaacgagaatcatccaaacattcgtctgcatgttcaaatttgcgacagcaattcaatgacttctcgtcttttagtctgcctgcctaaatttgtagatgatattatggggcccgaagttttcaaatcctctgtgaaacacatctgtaaagttggaaactcgattgtgctgtctggcatgatgtcggatgtcggatgtcgggtgtcgcatttgtacattttatttctggatttcgatcctcctcgccaaaataaccgactgaaagaactgtgttttcaaaaatctgtttcgagtgagccagaaccttgtgaacggtagctgtcattggaagccggggaagcttgtcaataatatgttccccggtcttatggcatcgttgtccatacttatactggtaatactggcaattgacatgacatgcttattaaaattgtactcatgtttaaaataatttggatgtcaacgccagttatatcggagaagacttggaagttggtggttgaatacttccgaattcttcctgttttggttggtcaaccacaagcgatagctttttcaaaaataattgctgaatgttctttttctttttgagcccttgcttttgtagacgagactcgcgattctcaatttttttacatcgacttccagcatgaagtacaaattcaaaaaatcaaatccagaaatgtagtggaccatgttttagattctttcagaatgctaaacgttacctgaagaatctatagggcgcaaaggcgttactgtcgttgcaaaaaggcatgaatctttcatcgtatcttcatctgactgggaatcagttcgttagattgtccggtgcttccatcaaaatcgaaactttatatcaattcagcggataaaaagtttgaagtttgaagtttgaagtcttgaggcttactatcgctacgacaacattttttttcggcactgccttatagttgggataaattacagcctttctgttctttgcgtcttcctgaatcgcacagtactggtcctttgtgactacatgatccggaattaaggccagagcctcttcagcggtggagcacacaggatgttgtacgggcttgcttaaccacttccaaatattccttgctttagctggtttaaaggctagtatttttagtactgtagccagattcttgagcccattcttacgtacagccatactcgactcttgcaacaataatccagggttatgattccgttgtcttgagaggtcggttgcttgcttcctctgccctcttgctcctcttaacccgaatgttatttttggaccagcttgatgtctttcaggctcaactttgtttgaattttcaagtaagttcaagctaagattgactttcgtccatatcgggtattttgctgcaaacttatccaactttctattgcacattgttcatgtctgcaacaaattcacatgaaatatgatcaatcaataaaatatgattttattgatttcaaaaaaaaggtgctatgtcgtgatggtgctatgaggtgatgaggtgatgtcgtcggtatgcccacaaataaatttgaattttgtattcagtttttcacgagctacgaataggtgcgccacattgctaactgagaggatgctaaactgaggtcgcaaattaaataaatcctaaatagggaatttatcagtctacttatatggacagtttttaacagttttttgtttagtttttgaacaatatacaattccggttttaatttaagcttaatcgttcgactatagaatttatatagatcccatgagaaccgataaatataaattgaaaagaaaaagaataaaaaagcttcactattttaattcagaccaagccattttttatacttttaaatataataaaaaaaaaacactagatcaatagttatacccttcagttttttcctaaactgaacatagctttgttccaacaccatcaaataaatttttgtgtcacttccattgtttgaaatcatataaagctgaaaacataatatttaaaggtgacacgattcgaacttacattcgcgagtacgattaattcttacatataaaataactgtttttgggaaaaataatctgctatggttacaaattatatatgttttttatattctcaacattgctcaatcacgtttaggactattgtacctaatatgctggaacgatttgtcttcagggtccttatcatataaataaatttataattgacataaacttcgtattttataatttatggcatgattgcttaggcgtgggcttctggtattgcatattcattttaatgatatattttgttttgtcatttttatgtttgataaccaacaataataagatcacagtaagttatacacagctcgaacaaatagcaaactgaaatgattatcgctattgtatagtcttgcaaagcctattaatgagtaaactaaaggcgcacagtaaataaaaaatagtaacctatgaacaaatttaaatgtactttacgtttccaaacaatacaaagtaatacgatcttaaggctttaccctaattaaattctgttaacggacttcgcagcgtaccaagatcttgagaagcaaaatcaagtgaactgtagctttgaacatccaccacaagacgacaaggtctgcggcattgacttctccagcttctcgccatgtacagctgacaacaactttggctaccacgttgcccggccatgtatattccttaagttgaataaggtaaaagacttcatctattaggcaacattaaagttaacattaaagttacattcgaattctagatttacaattggataccagaaatttacaacgattctaagactttgccagatcatatgccagaggaactaaaacagcacatcaaggaaaagcaaagtcttaggcccaatgaagtaagcttagaaagaatattttaataatattaaattttaataaaaaatggttatttaaatactacttccagacaaatgtagtttgggtctcgtgcgagggagaaaatcccgctgatgtcgagaacataaaagcacgcgactactatccccgaatgggatttcctcgttactattttccgtttaaaaacattcagggatatataccgcccattgttgctgttcaatttaccgttgaaagtaagtaaaaattacattgcattacatgagtaattaacaattattctataaaaactttgcaatattgtttttattgttagaagttttatacaaatacaaatgtgtaattattgttataataatgtgttattatagtataagaaggtaggaaatgcattatttaatgaattagcaaactttactctcaagtcagttagtgttttcatcgcgttacctacatttttgggctgtaattacttacatatttttagctgccattgaccaagttatttaaccgtgacgtgcttctcaagtgttgcttagtttaaaaaaataatgtagtatactctacgatcaacggttttaaaaccattttataagcgggttaatatactactagaactttgcaaatcattttgattagaataactacccttgtcaatattgtcatgtccgttaacttaattaactgtccgtacagatggagaaatatataaaacccaataattatgatcaaaaattctatagttacttgataccgacacagacagtcacgcccacacttgtatttttgtatttattctttttatacccatttctatagatatgtcaacatcatattggcccactctaatgcctataaaccgcaaatagcggaaaaatttttcaagcttacgatttatttgccgaatacgaccgctaggctaatggctgagtaacgagaatctcacagtctaattatttttaaaaaatgtttccccttttcaatagtattattaatatattcaattgtattattttattgacataatgcataacggaatttctgttccttaacattttgcaaaactaaatcattttttttaacgaagctaagggtttcattggaaacgactatagcgtactttgttgttacgcatagtatttaagtgatattttaagccatacatttgcattgtggtaaatcttaactttggtaactctttattttagccggcgttttgatcaacattgaatgtaaagcttgggcccgcaacattaatcacgaccgttcagacagaagaggatccgttcacttcgagttgatggttgattaagagagtcgttgggaagatgtcattggagagaagagatcggccgtattataaagtgggcatcaaaaaataaatgagaaaataaaataaaggaatggaatatagaaaaaaaaaactgacaacaaaacccacacagaatagatacgagaaaaatgtagtagcgcagaaacgtcaggttaaagcaaaaacaaaaacaaaaaaaaaacaaaaaacgaacgtgcgaaatacagcagcaaccaaagagaaaactaacaaaaaaaaaaagctacaaaaaccaatgaaaaccttttagataaaataaaactagctccataaagcaaaacaaaaagctaagaatatagagccctacccaacgctaaatacacaaaaccccacgcatattcaaggaaaaaccttatttttttatttttattcatagcttcattttgacagcaaataggcagaagcataaaaaaaacgtgttacctctttcaattattgtttgttttttagtttaatttttttacccacatatagcaagaaacgataagtaccacagtcaagagtacttaaatgctaacatattttgtacttaaacaattaccaaagttcaataccttatcccatccttaaaagcaagcaaaggtttttgaaatatcatttggtttattcaatataatgtaaaaaaatattattttccccacttggaaaaattataattacataatgcctaatacttttttgtgttaatactgcgtttacaatgcatcgagaacataaattgtagtttcttgaaaagaattaaaccacaactggaattagaaaactaaaacgaaaaaatctttatgaaaacttaaataaaggaaaactgaaaagaaaatcgaggcatatatctattgaagcctctttaattattattgaaagctgcaaatccgggatcaccgatggataaatcgcattaagctacataaattaaattaataaaaccgaagaaaacagaataaactgcataaataactgaataaaatgtaaaaatattactggttgcaataataatgagcatataaaattaaaatatataatgtatactacactacagaaataaattcaagttgctttacccaatttacccgtgtccatcatatgtgtgttttacagcgaaatccaggagagttcagaatttcttagtccatccgttcccatagttaagttcctg

SEQ ID NO: 2351 - DNA, 1442 bp, DROSOPHILA
tcagcagaggtgactcaaatttatttaatgctagttggcctatattctttcaacaaataattttcaaaacatttgcaaagtaccacaaagtattggataaacagaaagtttaaataacatttaaagcagtaacgattcacattaaatgcaagtcacaacaatactatggttacagacgtttaaaaatatataaaaaaaattttgcaccagaacagttgataaaagaaacttaaaataacgacttaaaacaaaaataaattcgaaataattcaacttgaaagacaatacgcccatcaacacactacaaagttaaaatggccgataaaaaaattggtgaatactatgcaccacctgtgaaaatgggcaaatgggagggtttcaaaaaattcctatggaacagtgaaactagccaatgccttggacgcaccggatccagttgggcgaaaattctcctattttacataattttttatgcggcgttaactggtttttttgctgcaattttcactgtattttatcaaactttggacaatgaaaagccaaaatggatgcttgacaatggtttgatagggtccaacccaggtctaggctttcgaccaatgccaccggaagcgaatgttgagagcacattagtttggtacgagtcatcaaagaaggataactataagtactgggtggacgagacttcacgttttctgaaatcgtaccaagatcttgagaagcaaaatcaagtgaactgtagctttgaacatccaccacaagacgacaaggtctgcggcattgacttctccagcttctcgccatgtacagctgacaacaactttggctaccacgttgcccggccatgtatattccttaagttgaataagatttacaattggataccagaaatttacaacgattctaagactttgccagatcatatgccagaggaactaaaacagcacatcaaggaaaagcaaagtcttaggcccaatgaaacaaatgtagtttgggtctcgtgcgagggagaaaatcccgctgatgtcgagaacataaaagcacgcgactactatccccgaatgggatttcctcgttactattttccgtttaaaaacattcagggatatataccgcccattgttgctgttcaatttaccgttgaaaccggcgttttgatcaacattgaatgtaaagcttgggcccgcaacattaatcacgaccgttcagacagaagaggatccgttcacttcgagttgatggttgattaagagagtcgttgggaagatgtcattggagagaagagatcggccgtattataaagtgggcatcaaaaaataaatgagaaaataaaataaaggaatggaatatagaaaaaaaaaactgacaacaaaacccacacagaatagatacgagaaaaatgtagtagcgcagaaacgtcaggttaaagcaaaaacaaaaac

SEQ ID NO: 2352 - protein, 311 aa, DROSOPHILA
MADKKIGEYYAPPVKMGKWEGFKKFLWNSETSQCLGRTGSSWAKILLFYIIFYAALTGFFAAIFTVFYQTLDNEKPKWMLDNGLIGSNPGLGFRPMPPEANVESTLVWYESSKKDNYKYWVDETSRFLKSYQDLEKQNQVNCSFEHPPQDDKVCGIDFSSFSPCTADNNFGYHVARPCIFLKLNKIYNWIPEIYNDSKTLPDHMPEELKQHIKEKQSLRPNETNVVWVSCEGENPADVENIKARDYYPRMGFPRYYFPFKNIQGYIPPIVAVQFTVETGVLINIECKAWARNINHDRSDRRGSVHFELMVD

SEQ ID NO: 2353 - DNA, 12135 bp, DROSOPHILA
acgctttcttcagcctgtttcataattttcaacgaatctagtataccctttcactctacgagtcacgggtattaacctttgtagcgacagaccatcataaataccaaaaatacatgagacaactcagattaaccgtttgaaacactagcgtcctggtcgcattgtgatttgattcttattttgtaatcttaattcttatttttgtatcctcaagggatcatgaaagttggcaaagagtaagttgccgacctttactgaaaaataaaccacttcggagtcgctctgggtgtcaagaactctcattgcttgaatgccaggatggcggccaactacgagtgggatccaattctcaatttgcatctttccactctcaggctgtgactacactggacctttcatactcaatgaatagaaagtacgcaatctgcaaaaaactaaaggcatacatacatatgtttgtttttgtgttgctttataacatcagacattcgcctggaattggccaccgactttagaaccgacacctttctgtcatggcaacttaagtagaggtgaacgtacccagaacattagcaacaaagtcacgtaagcgagcaatagacgggatgcagccattttttgtccttgcatttgttagtcgagccacgtcatttagcaacgcatcaattcagatgtggattaagcagatttatagcctttgcgtaggcaaagttttgcagctattggacggaaataacgtccaagctggtcgtctgtcatatagaggtcgcaaacgaagctacatatctgttccagcgccaactcgcatagccctcagctgagcggaaagctatgtgcgcgaggagagcttaagcccaccgcccccatacgcagctggcggcacacacccccttagaacgacgaaactgcccggagccgaatacgagtgcgagccgaaccattgtcgatatgcctggtggaagttgcggcgacgatggcactatcattggcgttttaactgtggacggttgctactcgcactcgctggcggattaacggcataaatatttaaatagatatatgtatttcgcatacatatataccgttatatctggagctactatgtactagtagaggggaagcgtttgaagacgaaaaaaatttcattctgtatgtgtgtcattcaaacataagtcttacatattcctacaaagcgctggttacataaaagcccacaaacaaacaatttaaccaattcaattatctatgtgttcggcagtgttcaaagtaaacgaagtttcaaatccgaatcgatttaagaattaaaatattgctataaattaatatatacctcgttgttgcgaaatcaaattttcactgattacgtcgacgtcggctaaaatatccttgtaaaagttatatacatacatactgaaattcgattttttcttatctggctgtaccgataaaaatgggcatgtaacgaagggccctaaaacaaaagagaatacaaaataagtaacatgaagtacaaagtgtgcgtgtgctaatttgaagtatagggaaacttatatttcataagcatttgcagtggaagtgaatagaatagaatgtataagagagcgattgaatgaggtatagctaatgacgattgacatttaattaagacgggtcaaggacgtatttctttaaacagaatggtgttcctattgattttttatatttagaatggaaattcgagtaccaaacaaaattgtacaaaatttcctaaggcaaataaatgtgtgtattcccaacaccctttgtgattcgtaggaaggaagctggtgttgcctacatttctgcgctttgcccttttccattcaaagccaatagcagccaaattgcaggttcagaaatagaagcaaaagctgtggctaacgcagggccgagtccattggggcgcgttgcgcaatgagcaccgcagaaaggcagcaacggcagcggcgtcactatttgcagaaaaagagtaagtcaagtcatgcgagcttgagtgtcgggactttccatgataaaaagagagatcagaagcagggcgacatttcaacgtaattaagttgtgtagcctgtcaggcttggccagctgtcccagccacatcccattgcccgctgctgtttgctaaaacgatcggatttgcccaggggccaatgctaatggaaacacacacaacccggccatagcaaaacgcaccgaatatgctattaagctggcgcccagctgtcaaattttgtggaatggatttctcccacaacctctactcaaaaagggaacacataaatttgcgagcttagattccagttgcgttctctttagtgcttttcggctaccgtaacttctctgcgcatgcttgtggattcttagcttgacttcccaatgcttttttccacacttaatattacataaccgttgtcagatagtgtggctaaaatcagcagaggtgactcaaatttatttaatgctagttggcctatattctttcaacaaataattttcaaaacatttgcaaagtaccacaaagtattggataaacagaaagtttaaataacatttaaagcaggtatccttttgccaaatcgcatcgttaatgaaaaaaattaattggtaggaaaaattgttcatataagcagcagtagtaataatgattctattcaaaaaccattcgtacagaaggggctaccgcatatataaaggaaatcaataaaaaaaaatttgaaaaactgcgttttcttttcaaaaacaaaacaatctaaaaattataaatttttgtatataaataatattttttagtaacgattcacattaaatgcaagtcacaacaatactatggttacagacgtttaaaaatatataaaaaaaattttgcaccagaacagttgataaaagaaacttaaaataacgacttaaaacaaaaataaattcgaaataattcaacttgaaagacaatacgcccatcaacacactacaaagttaaaatggccgataaaaaaattggtgaatactatgcaccacctgtgaaaatgggcaaatgggagggtttcaaaaaattcctatggaacagtgaaactagccaatgccttggacgcaccggatccagttggggtaagtacattgaatcccttcatttttatttaatattatgtctaataacaacaatttactgagtggattttggtatgtccagacctaaatatacattgctacacaaaattaaaaactattaaaacagcttatcaataaaatcgatatcggcgtgtgatcccaatatatgtatatattttgtaggacgtataaagtttttctacttctcatcgacgtaatatagattgatggttatcggcatataaatacagatattttattaaattatattaccaaccaaaaatcaattattgatcaagtagttcaagctattcggtttcggaaattgaagtagctaataaaacaaattctagccccattgaatagatttctataattgtaccagctttgtaataggtcatgtaagaaacgtcagaattgtgtcacctacttactggcaaacgggagtatgtcactacagttaaatttaaggtaaacctctattctctttttgtaatgcaaacaatggctgtgttgtcctaattcttacaagggttagttagattatgggtatggctaactgttttatttattacggtcttattaatttatcttaaaatatacatacacatacatacatacaatacctattatgatattaacattaaataatttaaactttgcagtcaaacgaagtatgtgtacatttttagatgaaaacacatttgttagcaaggtatcaaaatctcggtccatttatcaattgccacaattatcgtaaaggcaatttaaaaaatagattcatctggggctcaattattgaaatcaacttgcggcgcagcaatctgtgctaccagtaaagcaattaaatgaatatcgtttcaatttacagtgatactcgaaagttagctaacaacatgctaaataaaacgctgcgatttttaacgaaaccgtaataattcaactaaatactataacctttacacaagtgacaccgtaattagcttgcgaatcataaaaaatttgaatgaatttccccgactaacagatacccgttactcagctagtggaaatgcgagcgcgaaatttcaccatttttctggaatatcgatagatattggaaactctcttgatttttattagtcatgtaaatttatatcgctgtttacattttttatacccgctactcgtagagtaaaagcaaagacgctagaataattattctagtgtctttggtgaaagggtattctagattcgatgaaaagtatgtaacaggcaggaggaaacgttttcgactatataaagtatatatattcttgatcaggatcaatagccgagtcgatttagccatgtccgtataaacgtcgagattccaggaactataaaagcatacagattctatagacaaagtcgcagcgcaagtttgttgatccatgttgttaagcccactctaactctaaaatgtgttgatatattttcatatttttattagtattgtacatttttattgatttgcaaaaaaaaaaattgccacgcccactctacctcctaaaaccggccaaaactgccacgcccacatttttttttaacaatttttcgatattttttaataattttattagtcttgtaaaatctatctatttgccaaaaaacttgttgccacgcccactctagcgccataaagaacaattcctctttggaacaattttgataatttttcttattttcttctccaatatctatcgatatcccagaaaaattatgaaatttcgcattcacacttgctgaatagcgggtatctgatagtcggggataataatcaagatcaatttatttcaaattatctaatactggcaatgttttattgtagataagcagattcttacatgcatatttccttttcattttctttgaccaccttatagttagttcagaagattggtctcacttgttggtatctcgttcgccctctcttattcactaactattaactaactattcactaactaatcactaactatttaacgggtatctgatagtcgggaaactctgctatgcgaactcgtttgttatttattaagctaagaattatacctatgagtactttataactgttgactctttccgtgtttcacatctttccagcgaaaattctcctattttacataattttttatgcggcgttaactggtttttttgctgcaattttcactgtattttatcaaactttggacaatgaaaagccaaaatggatgcttgacaatggtttgatagggtccaacccaggtaagtaacgaaaaaacatactacctttaaatccccatgaatcttgttaaaatgaatatactgtgttggggaatacagttaagattaaaaaaaaaaattaaaaaattaggttaatttaacatacaaatttaatatttacttaatttttacatattatttgaaaaaagggttctggattctatattctttttcattgtgatgttctctgtactaagtgtttcgcacaatattccagatagaaagaaatacaatatttcattttaaatttctgtaaccacagttttttcaaacaggaaaccaaagttctgagccaaagagtaagaaatcagattaagaatgcatcagtaaaattcattactttacgtttcattaaaattatgaaaaggaaaactaaacgtttacaaattaaagtttatttactttgaaatttcaagatgtcgaccacatcttttttattttaaataccaatagcaaatttactgataatttatgcttatttacggagataaaacacaagtctctttggccggaattctaaaaaagacaattacgaatgtaaccagagagatgaatgtttaaaaaatgtatatacaagtaacctgccttaaagagaaaatagttacaataatttatattttctcaactcaactcaacgacgataatatttttccctctacatcaggtctaggctttcgaccaatgccaccggaagcgaatgttgagagcacattagtttggtacgagtcatcaaagaaggataactataagtactgggtggacgagacttcacgttttctgaaatgtaagtaatataatgaatagagcactctcaaacatacttataatggaaaagttttaacaatttactttatattgcgtttggtcttcaataagttgcgttcctaataataacaaataaaaatccaataaaaaagtattgttttttacaacatttttttgtattgcaatacgttttcggaaaattaaatatatattatatattatattatatatatattaaatatgtgtattcttggtaaggaacgccatctttctgtccgcgtgtcgatctgtctctacgtatgaacggccacatatttcacttttaataccctatcagacaatacatcgattttagtcagaagtttacaacgcagtaaggataacattaactacataaccatcgtaacgtcgccaccgcactatgggaaatttgacatattttttggcataaattaatacttcgtaaactatttaagatacgaaaattttttttactcaatatatttttccctatctatttcaaagggaaaaaataagtcattttcatttcctctccacaacgagaatcatccaaacattcgtctgcatgttcaaatttgcgacagcaattcaatgacttctcgtcttttagtctgcctgcctaaatttgtagatgatattatggggcccgaagttttcaaatcctctgtgaaacacatctgtaaagttggaaactcgattgtgctgtctggcatgatgtcggatgtcggatgtcgggtgtcgcatttgtacattttatttctggatttcgatcctcctcgccaaaataaccgactgaaagaactgtgttttcaaaaatctgtttcgagtgagccagaaccttgtgaacggtagctgtcattggaagccggggaagcttgtcaataatatgttccccggtcttatggcatcgttgtccatacttatactggtaatactggcaattgacatgacatgcttattaaaattgtactcatgtttaaaataatttggatgtcaacgccagttatatcggagaagacttggaagttggtggttgaatacttccgaattcttcctgttttggttggtcaaccacaagcgatagctttttcaaaaataattgctgaatgttctttttctttttgagcccttgcttttgtagacgagactcgcgattctcaatttttttacatcgacttccagcatgaagtacaaattcaaaaaatcaaatccagaaatgtagtggaccatgttttagattctttcagaatgctaaacgttacctgaagaatctatagggcgcaaaggcgttactgtcgttgcaaaaaggcatgaatctttcatcgtatcttcatctgactgggaatcagttcgttagattgtccggtgcttccatcaaaatcgaaactttatatcaattcagcggataaaaagtttgaagtttgaagtttgaagtcttgaggcttactatcgctacgacaacattttttttcggcactgccttatagttgggataaattacagcctttctgttctttgcgtcttcctgaatcgcacagtactggtcctttgtgactacatgatccggaattaaggccagagcctcttcagcggtggagcacacaggatgttgtacgggcttgcttaaccacttccaaatattccttgctttagctggtttaaaggctagtatttttagtactgtagccagattcttgagcccattcttacgtacagccatactcgactcttgcaacaataatccagggttatgattccgttgtcttgagaggtcggttgcttgcttcctctgccctcttgctcctcttaacccgaatgttatttttggaccagcttgatgtctttcaggctcaactttgtttgaattttcaagtaagttcaagctaagattgactttcgtccatatcgggtattttgctgcaaacttatccaactttctattgcacattgttcatgtctgcaacaaattcacatgaaatatgatcaatcaataaaatatgattttattgatttcaaaaaaaaggtgctatgtcgtgatggtgctatgaggtgatgaggtgatgtcgtcggtatgcccacaaataaatttgaattttgtattcagtttttcacgagctacgaataggtgcgccacattgctaactgagaggatgctaaactgaggtcgcaaattaaataaatcctaaatagggaatttatcagtctacttatatggacagtttttaacagttttttgtttagtttttgaacaatatacaattccggttttaatttaagcttaatcgttcgactatagaatttatatagatcccatgagaaccgataaatataaattgaaaagaaaaagaataaaaaagcttcactattttaattcagaccaagccattttttatacttttaaatataataaaaaaaaaacactagatcaatagttatacccttcagttttttcctaaactgaacatagctttgttccaacaccatcaaataaatttttgtgtcacttccattgtttgaaatcatataaagctgaaaacataatatttaaaggtgacacgattcgaacttacattcgcgagtacgattaattcttacatataaaataactgtttttgggaaaaataatctgctatggttacaaattatatatgttttttatattctcaacattgctcaatcacgtttaggactattgtacctaatatgctggaacgatttgtcttcagggtccttatcatataaataaatttataattgacataaacttcgtattttataatttatggcatgattgcttaggcgtgggcttctggtattgcatattcattttaatgatatattttgttttgtcatttttatgtttgataaccaacaataataagatcacagtaagttatacacagctcgaacaaatagcaaactgaaatgattatcgctattgtatagtcttgcaaagcctattaatgagtaaactaaaggcgcacagtaaataaaaaatagtaacctatgaacaaatttaaatgtactttacgtttccaaacaatacaaagtaatacgatcttaaggctttaccctaattaaattctgttaacggacttcgcagcgtaccaagatcttgagaagcaaaatcaagtgaactgtagctttgaacatccaccacaagacgacaaggtctgcggcattgacttctccagcttctcgccatgtacagctgacaacaactttggctaccacgttgcccggccatgtatattccttaagttgaataaggtaaaagacttcatctattaggcaacattaaagttaacattaaagttacattcgaattctagatttacaattggataccagaaatttacaacgattctaagactttgccagatcatatgccagaggaactaaaacagcacatcaaggaaaagcaaagtcttaggcccaatgaagtaagcttagaaagaatattttaataatattaaattttaataaaaaatggttatttaaatactacttccagacaaatgtagtttgggtctcgtgcgagggagaaaatcccgctgatgtcgagaacataaaagcacgcgactactatccccgaatgggatttcctcgttactattttccgtttaaaaacattcagggatatataccgcccattgttgctgttcaatttaccgttgaaagtaagtaaaaattacattgcattacatgagtaattaacaattattctataaaaactttgcaatattgtttttattgttagaagttttatacaaatacaaatgtgtaattattgttataataatgtgttattatagtataagaaggtaggaaatgcattatttaatgaattagcaaactttactctcaagtcagttagtgttttcatcgcgttacctacatttttgggctgtaattacttacatatttttagctgccattgaccaagttatttaaccgtgacgtgcttctcaagtgttgcttagtttaaaaaaataatgtagtatactctacgatcaacggttttaaaaccattttataagcgggttaatatactactagaactttgcaaatcattttgattagaataactacccttgtcaatattgtcatgtccgttaacttaattaactgtccgtacagatggagaaatatataaaacccaataattatgatcaaaaattctatagttacttgataccgacacagacagtcacgcccacacttgtatttttgtatttattctttttatacccatttctatagatatgtcaacatcatattggcccactctaatgcctataaaccgcaaatagcggaaaaatttttcaagcttacgatttatttgccgaatacgaccgctaggctaatggctgagtaacgagaatctcacagtctaattatttttaaaaaatgtttccccttttcaatagtattattaatatattcaattgtattattttattgacataatgcataacggaatttctgttccttaacattttgcaaaactaaatcattttttttaacgaagctaagggtttcattggaaacgactatagcgtactttgttgttacgcatagtatttaagtgatattttaagccatacatttgcattgtggtaaatcttaactttggtaactctttattttagccggcgttttgatcaacattgaatgtaaagcttgggcccgcaacattaatcacgaccgttcagacagaagaggatccgttcacttcgagttgatggttgattaagagagtcgttgggaagatgtcattggagagaagagatcggccgtattataaagtgggcatcaaaaaataaatgagaaaataaaataaaggaatggaatatagaaaaaaaaaactgacaacaaaacccacacagaatagatacgagaaaaatgtagtagcgcagaaacgtcaggttaaagcaaaaacaaaaacaaaaaaaaaacaaaaaacgaacgtgcgaaatacagcagcaaccaaagagaaaactaacaaaaaaaaaaagctacaaaaaccaatgaaaaccttttagataaaataaaactagctccataaagcaaaacaaaaagctaagaatatagagccctacccaacgctaaatacacaaaaccccacgcatattcaaggaaaaaccttatttttttatttttattcatagcttcattttgacagcaaataggcagaagcataaaaaaaacgtgttacctctttcaattattgtttgttttttagtttaatttttttacccacatatagcaagaaacgataagtaccacagtcaagagtacttaaatgctaacatattttgtacttaaacaattaccaaagttcaataccttatcccatccttaaaagcaagcaaaggtttttgaaatatcatttggtttattcaatataatgtaaaaaaatattattttccccacttggaaaaattataattacataatgcctaatacttttttgtgttaatactgcgtttacaatgcatcgagaacataaattgtagtttcttgaaaagaattaaaccacaactggaattagaaaactaaaacgaaaaaatctttatgaaaacttaaataaaggaaaactgaaaagaaaatcgaggcatatatctattgaagcctctttaattattattgaaagctgcaaatccgggatcaccgatggataaatcgcattaagctacataaattaaattaataaaaccgaagaaaacagaataaactgcataaataactgaataaaatgtaaaaatattactggttgcaataataatgagcatataaaattaaaatatataatgtatactacactacagaaataaattcaagttgctttacccaatttacccgtgtccatcatatgtgtgttttacagcgaaatccaggagagttcagaatttcttagtccatccgttcccatagttaagttcctg

SEQ ID NO: 2354 - DNA, 1439 bp, DROSOPHILA
tggacggttgctactcgcactcgctggcggattaacggcataaatatttaaatagatatatgtatttcgcatacatatataccgttatatctggagctactatgtactagtagaggggaagcgtttgaagacgaaaaaaatttcattcttcacaacaatactatggttacagacgtttaaaaatatataaaaaaaattttgcaccagaacagttgataaaagaaacttaaaataacgacttaaaacaaaaataaattcgaaataattcaacttgaaagacaatacgcccatcaacacactacaaagttaaaatggccgataaaaaaattggtgaatactatgcaccacctgtgaaaatgggcaaatgggagggtttcaaaaaattcctatggaacagtgaaactagccaatgccttggacgcaccggatccagttgggcgaaaattctcctattttacataattttttatgcggcgttaactggtttttttgctgcaattttcactgtattttatcaaactttggacaatgaaaagccaaaatggatgcttgacaatggtttgatagggtccaacccaggtctaggctttcgaccaatgccaccggaagcgaatgttgagagcacattagtttggtacgagtcatcaaagaaggataactataagtactgggtggacgagacttcacgttttctgaaatcgtaccaagatcttgagaagcaaaatcaagtgaactgtagctttgaacatccaccacaagacgacaaggtctgcggcattgacttctccagcttctcgccatgtacagctgacaacaactttggctaccacgttgcccggccatgtatattccttaagttgaataagatttacaattggataccagaaatttacaacgattctaagactttgccagatcatatgccagaggaactaaaacagcacatcaaggaaaagcaaagtcttaggcccaatgaaacaaatgtagtttgggtctcgtgcgagggagaaaatcccgctgatgtcgagaacataaaagcacgcgactactatccccgaatgggatttcctcgttactattttccgtttaaaaacattcagggatatataccgcccattgttgctgttcaatttaccgttgaaaccggcgttttgatcaacattgaatgtaaagcttgggcccgcaacattaatcacgaccgttcagacagaagaggatccgttcacttcgagttgatggttgattaagagagtcgttgggaagatgtcattggagagaagagatcggccgtattataaagtgggcatcaaaaaataaatgagaaaataaaataaaggaatggaatatagaaaaaaaaaactgacaacaaaacccacacagaatagatacgagaaaaatgtagtagcgcagaaacgtcaggttaaagcaaaaacaaaaac

SEQ ID NO: 2355 - protein, 311 aa, DROSOPHILA; identical to SEQ ID NO: 2352

SEQ ID NO: 2356 - DNA, 5645 bp, DROSOPHILA
ccagctccagcaattatatagcctccaacgccagcaactcaatctcgaccagcgccagcaacccaagctccaccggcgccagcaatccaattaccaccagcgccagcaacgaatcggccagcagtcgtcgagccaagttcaggataaatcagatgagtcgcgatgtgcccgttgggctgccggacactcatcaaaccgtgaatctggaggaggcggccaacaccaccaaggattgcctgctgcatttgttggagaaatacaacgagacccgcatccgcaatccggtgggtcgtcaccagagcatcagcgtggactggcgggtcagcgacaatctggagtaccgctccatgagctccatcaacgccttcttccagcgccacaaccccaatggcggcggccacaacgtacgccacattcaagcccagctggaggagaaggcggcgggcaagtaggtgcccatatccacagccctctgtatatatgcgatatatatatttgtatgtagagtacagatcaactaattggcacataggtaaatctacaaagcgtcgaatggaacaaattaatatttatgtacttgatgtaagcaataaatcaaattaatttattgaataaaactgaagcaatgattcgtttctattgacgcgggattgaattttgttggcatcccacgatattttataaaaatgaaattaaaaattaaaaacgcgatttatgtactaccaactagaaaatcaaaaacaatttattgcagaaaaacaaatattaacttataaaatgtacaaaattgttttagtaaactacattttactgctacgtctacaaccaaagtaatgcggatgtgttggtaattttgaaacaggacaatcgcgttgtttttgttttgtttattgatgtatgagttgaatatggtttaattatacatagagtgtctatacatataaatattaggagaatactttggatttgttcttagttaggccttacaaattaatgctttgtataagtgttatgaagaataggctctgcctatgtgtatagtatgtataataatctagtttttgtacatgatagtttcaggcaaaattgttttcataatttgcccagagatcatagcaaatcataaaagacatttttagcactggttaagaaatgagagcgcgacaatttgtgtccattcggcggcattcatataaataaggcatccaaacgtgcagaaattgacgaagttaattcaaaggcattcctcttttttttttttgttttccactggtcgaattggttacaatgttagtaggtcgcaaaaacaaagcagcaatgagccgaaatgcggcttattggggcatcgttttggcgcccttaatatgcaagacaaaactcaattctactctcccctcagtttcagtacttggatgaagtggcagggcagagaaaggatgagttttgttcacccggcaaatttcaaatgcaaaagttgccggcgaaatttgcaaggatttcacaaagttatgtaaagttagtattccatcgttataaaggttaaatttcggttggcttcaagatagttaagactaattccatttagcttgcggtctctctcttcttgttcaatagttgtttgttgttaagaactaatcacttagtttatggcatttctcactagagaaatctaaaaagtttcatttagctcgagcttactggttgacttacaactaattactggttacgagtagttgaagactaacgattaatattcgcaactgtcgcccttgcactgcataaaaaggttcgtaataaaaaattaggaaatactacacaatcgcagtggcttgtaaaaaataaaattacaaattgcaattcggtgggttggccagcgaatctggagcattagttgtggcgcggccgcttcaacatcgccccaaagtgtgcccccaacccaaatccaccgctggagctggagctggaagtggcggacgaactgggagaactggtgcgcatgcgctttgcgggcgatagtttcttgggtgcctgggccagacgtttgcgctccttcatgaattctgtaaacaaaggaaggaaaacgagtgttattaatacgtgttaggtggaattgccaaatcaaagtcagctgctgcatttccggttgcccctgttcacaagtcactgatccctaaacagcaggcgccgcctgtttttctgtttttgcacattttgatttcggtttcgggtagattcccagattgtggcacgtggacggcagcacttccctaccagagggttgcagatccgcacaggggtagcaaataaatgccagacggcagccagacagtcggtctttagccggttttcaggtagtccggtgaaagcaagagtggtggtgctacataactgcataaattatgagctctagcttactggccaaagcagcaaaaagtgcactttaagtaaagcgagttgaggcgttgggggattcaaaggcttccctactgaccacccgatgcgggtgcatttattatgttccgaacagacacaatttttttatgattataattacacatgcatgtgctagtggcatttataaaaaacgctcagtacaaagcaatcaaagggaggtttgataagaccatggactctggatggtggtgcattgaaagccgatccccagacccctctcccgttttctataatgaggtcaggccatagacaaagcggagtcacagctgttggcatttatagatgcagccagccagcccgcatgctatcgatctggaaaccaacccccgcgttgtggaggatcagaagagaatcattcggtttagggagatgaggagctgaaacagctgcagtcagctttgacttacccttctggacgaaaataaatctcccacaaagcattggctaattgctataatttgggtctaagtttcacgaaaaacgcccacaactaaaacgtgaatataaacaataaatgcgaaggagtggacttaaaaccaatcaaacaaccccttatggagtttagtattgtaagtacaaaatcctgcacaaaatattggtttggcataaaatcattgatgaaaatcgttttcatcgagtttgcaaaacaaagagcacgaatctacttttatatctcgagcactatattcggaaatttttagataatactctctactctacagataattttgaaaaataatatcgtatcagtccgattacaaaacaagcctgataagttaaaaaaaaaaaaaaaacaccctcaacttcctcctgagaaccgaaaataaacagggaataaaaggaaagctatgggaaaacactttgtaacgtctatcgaagtgaaatgaagcctgaccctgggaaccgtcaagctctactgatcaaaatggtgtagaacatcccccaaaactcacctgtgatttttggctgtctcttgcgcaggactatggaggatgtgcttgtcgtgctggaggagctaagccgcattgccagcgactcgtcctgggagtcgtaacaagattcattatccgtgttcgactctagcgaggaattgaccagattggagccaaagttctcccgttctgagcgctcgttgaccaaaatgtccatgtcgctaggacttgcatccgcggaagggcgtacgtgggcggcccgtgttagggtgtacatctctggggcgaagctcgactcctggaagctgacgcgctcccaaatgtagggtgatttttcagctaaagggcagccggcgcggaagtcaaagccccatttttgcgtggccagttcttgatggcgctccagttcggaattaaagggtctaaagaggatatattgttagctattggtcaaaatccaactgttattatagaaactcacgttttgttggctgtaccctcggcggatttggagctaccgaagaggtcacgctttatgcgattcaactgacgaccgcatgccagattgcgactcaccgccgggctgctgctcatcttgcagaactcactgatcatcacaggattcaggactcgggcactgaccatgttgagtcaatatatatttttttgggatcccctagtgttttctactctgttttgagacgcacttttcttgccacttgtttgcgaattacacgccaaagcgaactgtcaaacttttggcgccaaaactttgtgttcagacagccccaaaagagagagaggcagtctccacacgaatacaaatcacggtctccacacgcgagcgtgtgtgtatgtgagagggagagcgagtgttctgtgtgtgcgttgtgctgcagcttattttacgtcttgctgcgttcaaaagtgaaatttcacgctgcaattgtttataaaaataattataaacaaatgccttggtccaatagcacttggtcactatctttgaatggcgattcgaacacactgcactgctagtcgactcacaaaacgaaacgtttgcgggtctcgttggagtttttgtatgagttagctgccaatggcagcacctttgtattatatttgtctttacaacttgaagtcgtttttacagcgatgtttgttaaccttttcggctatgagcgcactgcgcactagatttttaaatatagcgctaccgatcgaagcgaacctctctcgacgaactcggagaaacgaataaaagataaataaaacactgggcaaaagcaaacgtcaaacaaccaccagaggcgttgccaactggaaattcagagcggttcacgctctctctgtagcaaccctcgaattcgaaaagatcggaaaagcagcaggagcgaaagagatagggaaaaagaatgcgcttttaatgttaatcatatcgaaagagcaatgcacttcctttgaattgttctttaaacttatatagcaaacgtataaaaaatactcagaaaaataaaagtttcctaacaaaatttaactaaggcatctgagtttaaaagttttgatattatgagctttaatataattattgattgttggaatcatcatatagtacaatatataatacgtattcattattattattattattattattatcattattttcattatttcctgtcaaataatattcacagctcataagcccatagttcatttgtaaacagtattcaaccagattttatttttaatgtttttgaaataaccaatttaattatattttaaactgtccaaggttccttcatagagcgtatcaagaaagtcgtcacaacttccacaacctctctctctctcaccatatgtctcccactctctcgcacgccatctacccatccctgccatttccatccgtgtgttctgttcgctgccttcttggttgttgttgcatcggtggagctgtacttttagttgcgattgcgatgggaagatacgaaaaaacgatgttatggttttggtttgtttggcctcaaactggatttttagtcgtcggagggaagtggcagggggcatttggggcaccaattcttttcactttcctcgtgttgccaaggggaaaatcgcgcttgcattgtggggcactggtccaccaaatatacatttgtacgatgtatgtatgtatgtatgtaaaataatgtgcacgtctagttcgaatttccttgtggtgtttgcatagcactgggtatttcaaatttccgttat

SEQ ID NO: 2357 - DNA, 2239 bp, DROSOPHILA
attcgtttctccgagttcgtcgagagaggttcgcttcgatcggtagcgctatatttaaaaatctagtgcgcagtgcgctcatagccgaaaaggttaacaaacatcgctgtaaaaacgacttcaagttgtaaagacaaatataatacaaaggtgctgccattggcagctaactcatacaaaaactccaacgagacccgcaaacgtttcgttttgtgagtcgactagcagtgcagtgtgttcgaatcgccattcaaagatagtgaccaagtgctattggaccaaggcatttgtttataattatttttataaacaattgcagcgtgaaatttcacttttgaacgcagcaagacgtaaaataagctgcagcacaacgcacacacagaacactcgctctccctctcacatacacacacgctcgcgtgtggagaccgtgatttgtattcgtgtggagactgcctctctctcttttggggctgtctgaacacaaagttttggcgccaaaagtttgacagttcgctttggcgtgtaattcgcaaacaagtggcaagaaaagtgcgtctcaaaacagagtagaaaacactaggggatcccaaaaaaatatatattgactcaacatggtcagtgcccgagtcctgaatcctgtgatgatcagtgagttctgcaagatgagcagcagcccggcggtgagtcgcaatctggcatgcggtcgtcagttgaatcgcataaagcgtgacctcttcggtagctccaaatccgccgagggtacagccaacaaaacaccctttaattccgaactggagcgccatcaagaactggccacgcaaaaatggggctttgacttccgcgccggctgccctttagctgaaaaatcaccctacatttgggagcgcgtcagcttccaggagtcgagcttcgccccagagatgtacaccctaacacgggccgcccacgtacgcccttccgcggatgcaagtcctagcgacatggacattttggtcaacgagcgctcagaacgggagaactttggctccaatctggtcaattcctcgctagagtcgaacacggataatgaatcttgttacgactcccaggacgagtcgctggcaatgcggcttagctcctccagcacgacaagcacatcctccatagtcctgcgcaagagacagccaaaaatcacagaattcatgaaggagcgcaaacgtctggcccaggcacccaagaaactatcgcccgcaaagcgcatgcgcaccagttctcccagttcgtccgccacttccagctccagctccagcggtggatttgggttgggggcacactttggggcgatgttgaagcggccgcgccacaactaatgctccagattcgctggccaacccaccgaattgcaatttgtaattttattttttacaagccactgcgattgtgtagtatttcctaattttttattacgaacctttttatgcagtgcaagggcgacagttgcgaatattaatcgttagtcttcaactactcgtaaccagtaattagttgtaagtcaaccagtaagctcgagctaaatgaaactttttagatttctctagtgagaaatgccataaactaagtgattagttcttaacaacaaacaactattgaacaagaagagagagaccgcaagctaaatggaattagtcttaactatcttgaagccaaccgaaatttaacctttataacgatggaatactaactttacataactttgtgaaatccttgcaaatttcgccggcaacttttgcatttgaaatttgccgggtgaacaaaactcatcctttctctgccctgccacttcatccaagtactgaaactgaggggagagtagaattgagttttgtcttgcatattaagggcgccaaaacgatgccccaataagccgcatttcggctcattgctgctttgtttttgcgacctactaacattgtaaccaattcgaccagtggaaaacaaaaaaaaaaaagaggaatgcctttgaattaacttcgtcaatttctgcacgtttggatgccttatttatatgaatgccgccgaatggacacaaattgtcgcgctctcatttcttaaccagtgctaaaaatgtcttttatgatttgctatgatctctgggcaaattatgaaaacaattttgcctgaaactatcatgtacaaaaactagattattatacatactatacacataggcagagcctattcttcataacacttatac

SEQ ID NO: 2358 - protein, 245 aa, DROSOPHILA
MVSARVLNPVMISEFCKMSSSPAVSRNLACGRQLNRIKRDLFGSSKSAEGTANKTPFNSELERHQELATQKWGFDFRAGCPLAEKSPYIWERVSFQESSFAPEMYTLTRAAHVRPSADASPSDMDILVNERSERENFGSNLVNSSLESNTDNESCYDSQDESLAMRLSSSSTTSTSSIVLRKRQPKITEFMKERKRLAQAPKKLSPAKRMRTSSPSSSATSSSSSSGGFGLGAHFGAMLKRPRHN

SEQ ID NO: 2359 - DNA, 3165 bp, DROSOPHILA
atactgccatcttgggatccaatggcacacacctcgccatccgggctgaagctcagtgctagcactgcggatggttcctgagatacataaagacccctatcaacatctgtgtcgtagtcgtatttgaaggagtagcccatgttgttgccgcacacgtagattcccttgttgggactcagcgatgccgcagtcaccttgtagggcagcttgcgatgcttgagcacttcgaagctcttggggtccaggaagatcactccgccggcataggctatggtcactatatcgccgctgtggtgcagctccaacgacttgacgtggtgcggcaggaaaatagagttagttctcgtgccggtccggcagtcccacatcctcacagtgcgatcatatgaagaggagaggaagcagtgttcctccaagcagaagattacatccctcacaccgcggctgtggccacggaactccatcaggggagctttctccgattgttccatgtcgaagagggcgagtggagattcctgatcgatgcagccggtcaacaggcgagtggccttcggattcaagtccacacacgccactgttttggtatgtctaagcttcttcagctgtttccccaacagggcatcccagactcgcactttgcagtctgcaccgccactggccaggatcttggcatcgtggcttaaggataccgaccacacactgtccgtgtgctttcttaggtgcgtaatacagtcgccagtgtcgccgtgtcgcagtgctgcaacgccatccagtccggctgaggccaaaaagtatccagtatcgtagtccctgttaaaagataactccaccactgagtccgagtgtcccggacacaggactccgatttcatgcctcattttatgtatttgattttaaattacttgctatacaaatgaacgacacaaaatcatggactactagatcgtacacattaataattcacatctttttcaagttaaggaaaaatcgaaaattatcaacaccagtacgtttacctatgcaaacttcctttaaaatccgataattctgccatcttggcgagtatccagggcacataggtgggtacatccatgtagtaggccttctgaccagcaccgcagttttggcttccagtgctgaccacaccaaattgtacggttcgagccttgccaaacaacgtggtcttccatatgagcggtccaccggagtccccagtgcacgtgtccacataatctccattggcgcaaaggaaggaagtatccctgccgtcggtgcacttctcagtgtttatatggacctccattgtactgttggcgaagcgccgactttccgttctcccccagcccacagccatgtaggattgtcccagctgcaaggtaaacgccaagagttcatccgtcaggggtagacatatgggtcgtatgtgatctaaagaagcatattatcaaaggaatatatttcatacttttcatacttatttgcatgtaaggctattcttacctttaaagaccactttcttgtttagttttatcagagcaatatcatacccgggatagaagaggttaaactcctcgtgaagaatccacttgtcgatggtaaactcctccacgggcagtgcgcaaacccgttgataattgtaggtgacgcagtcacttgtggaactaatgtcgagctctcccagccacactcttatcctgtttatgacccaggctcagaaaaataaaaagtcaagaaagaataatacaagtcatacttactccttagatcggggacacattttgaagcagtgcgcggcagtcaaaacaaagactaaatcaagcaaaatgagtagtttaaagaaggggaagtgattttggcataaatacgttctgagagaagagagcctccacagcggcacatctctatatcaccggaaatgtggagaaaagccatccaaggctgggacaacagcgaagatttcctgccgccggtgatccgccgtcgaagcctttgggcgggaatcagattcgataggacaccgcaatcctgttgtgtcaactgttcgtaagccagaagctcgtgtggtgtccaatcttcccttccggcttgagaagaaggtggacagctaaggcagagaatgccccaaattagggcagtgatcccgagaggactgttcatgatccgagctcagatgagaaactgaaagcctatgcactttactgtcaatagcatattcttatcgccgcatgtaatcagttcgtattcccagaagagcaagtatataaggtagcattttataaatatagaattttcttcatcattgtacaatatcatcaaaactcaagattttttatttttttataaccgttaagcgtagagtaaaagagtatataagattcgttgaaactcatgtttctcatagaaggatgcgtttccgactatataaagtatatatattattgatgcggatcaatagccgagacgctctggtcatgaccgttcgttgtccgtccgtctgtccgatgtacatggtaatctttggaacaataaatgctagaaagttgagattaagcaattaagatttcagagacgaaagtacccattactgcagtcccttttaaaagtttactccaccaccgagtccgagtgtcccagatacaggacaccaatctaattactcatattgtgtaattggttttaaaattcttgcaatacaactgtgcctaatgtgacttttccgatttcgtatttcgctatacatatttcttgatgcgactaccgatctgaacaacacaaaaacgtgagctactagatctgacatctttataactaagcttatagaagttaaggccttcgggtgaccaaaaagaatcgaaaattatcaacaccagtgaaacgcgcatgcgtattcgcatctttagttaacagagtttacttaaacatccgagaattctgccatcttttcaagtatccagggcatataggtgggtacatccatgtagtaggccttgtgaccagcaccgcagttttggcttccagtgctgaccacaccaaattgtacggctcgatccttgccaaacaacgtggtcttccataagagcggtccaccggagtccccattgcatgtgtccacataatctccactggcgcagaggaacgaagtatccctgccgtcggtgcacttct

SEQ ID NO: 2360 - DNA, 950 bp, DROSOPHILA
ctcggatcatgaacagtcctctcgggatcactgccctaatttggggcattctctgccttagctgtccaccttcttctcaagccggaagggaagattggacaccacacgagcttctggcttacgaacagttgacacaacaggattgcggtgtcctatcgaatctgattcccgcccaaaggcttcgacggcggatcaccggcggcaggaaatcttcgctgttgtcccagccttggatggcttttctccacatttccggtgatatagagatgtgccgcttctttgttttgactgccgcgcactgcttcaaaatgtgtccccgatctaaggagataagagtgtggctgggagagctcgacattagttccacaagtgactgcgtcacctacaattatcaacgggtttgcgcactgcccgtggaggagtttaccatcgacaagtggattcttcacgaggagtttaacctcttctatcccgggtatgatattgctctgataaaactaaacaagaaagtggtctttaaagatcacatacgacccatatgtctacccctgacggatgaactcttggcgtttaccttgcagctgggacaatcctacatggctgtgggctgggggagaacggaaagtcggcgcttcgccaacagtacaatggaggtccatataaacactgagaagtgcaccgacggcagggatacttccttcctttgcgccaatggagattatgtggacacgtgcactggggactccggtggaccgctcatatggaagaccacgttgtttggcaaggctcgaaccgtacaatttggtgtggtcagcactggaagccaaaactgcggtgctggtcagaaggcctactacatggatgtacccacctatgtgccctggatactcgccaagatggcagaattatcggattttaaaggaagtttgcataggtaaacgtactggtgt

SEQ ID NO: 2361 - protein, 309 aa, DROSOPHILA
MNSPLGITALIWGILCLSCPPSSQAGREDWTPHELLAYEQLTQQDCGVLSNLIPAQRLRRRITGGRKSSLLSQPWMAFLHISGDIEMCRFFVLTAAHCFKMCPRSKEIRVWLGELDISSTSDCVTYNYQRVCALPVEEFTIDKWILHEEFNLFYPGYDIALIKLNKKVVFKDHIRPICLPLTDELLAFTLQLGQSYMAVGWGRTESRRFANSTMEVHINTEKCTDGRDTSFLCANGDYVDTCTGDSGGPLIWKTTLFGKARTVQFGVVSTGSQNCGAGQKAYYMDVPTYVPWILAKMAELSDFKGSLHR

SEQ ID NO: 2362 - DNA, 5066 bp, DROSOPHILA
gcgcaggaattccctaatgttcccgacctacatgtacttctgatagttgccgaggtcaaatgttgttgtatttgtattatacctcaatattggtatattcaatatctaatagtacccaattcaattgcaaagatagtcattaaaaaaacctaaatcacttgcaaattgacttttctgccggaaaagcaaccttgacacacaaagttaattagtttatctggaagtcatgtgagaaatttgtaaataaataaatagaaaatttttcgcagtaatttaagtgggcctaatcccttttaagcatcttggttttacgatgacaccgcaataaggtacaactttatattgtttttgcaatcagcttgagtctttattaggcatcagtctttctctctaagtttcttcgtgcaataaatgaggttccaaactccgtagatttttccttctttgttgaatccagatcctgcaaagaaaaaagagcaaacccctaggtctgtccaggaatgtattttcgtgtttgtcgacggtctgagctttggtgaagcgtgaaaatgtggcagtcactgagtggaatcgatggggggattgacgcgtgcccaactggtgggccaaacacttcggattgctacggttcgtattgctattgagccaaagggacccggagcgcatcactccggtccaaaatgtaggcggatgtgtgtctgtttcggggaaagatggtcttctgtcggcaagacatatacataggtgttaaatatgattgcattagttttatactacgtataaggaagctttgattggatcgaagcgactgaaggcgaccctcgtccttgaaattcggtagcagtgattataactcatagcccccatttggagctaggctccgctcaggtctttgaaagtcttggggggcacagtgcccctttgattttcggtttgcttttgctaagtccaactctcgtttttggaacttttggggtggtggatggagaagggggctttgtggggtttggcacacacgatacacacatcactgattgatcactgctcatgttaacttaagttcgttcatggtgttgttgttggttgtggttgttgttgttgggcgtctctttaaagtctctttctctcgctttctctcgctacttttcgctttgggaggtaaataaagttcacattttctctctttcattttgtatttttgtggtttaaaatatttaattagcattaagatctctgctgtattgaaatttgcttaagtcgtaagtttgtttttaatcttagtgtgggtggtgggggtgtttggtgagcgggacagagagaaaggggaaagagagttgtatcgactttagacgatagccggttttatcatattaactttttgcttataccgtaacgcattcaatatttctctttagattttcacacgcgagaggattaggattacactttccgattctagcgaggccaggagcacgatctcgttttaaacctcgatgcggcctagcgcctgttgtcccgatagcttcgctggccgccgccgccgccacgctcgcgaaacggtcgcgaatcccgcgaagatccgccgccaccgctgcgatttccgtactcccgtcgacgaccgcccgcggagccgttgttgccgtcccgattccgatagccgccgggtccacccataccgccaccggatcctccaccggctcccatgccaccgcccgcagccgccgcctgggcagcagctaacccgccagctccattgctaccgccattggctgctccgccgtagacggggaagccaggcggtggcactgtgggtaggccagcattcttccaggcagcaaactcctcgtagctcggcgccttgtcgaagcccggtggtggtggtcgctggggaggcggataatccggtagaggcggggcaccgggtccatcgtagtaccgcaccggtggcggcagctgctcgtacatggcagctgctgctcccggtggaagggcacctgctgctcccgctccagctcctggaatcggcagctgggcgaacggaggaacgaagggcaacggcggaagttggccgtgcatgttgcgcatgtagtccgccacgtatgcttcagcagctgccgccgaggacatgtagcgttcccatgacggcatggccatgtcgcccggtccgccgggtggcgctcctgctgcacctcccatctggcggtacggggaaccgcttcttttaaagccaccgcccggcggaaggcccatgccatgatggtgacggtacggccgatggtgtggtgctccgtggtagctcctcttgtgccgcatcgggcccaggtggtcgtgatttgatcctctgcctccgccacgacctccccctccatggccacgcgaggatagactcctgggcggcttgtagatcacgtgtatacctttttctcgcataactcgagccgtctccttggatttcttgagtatgggagtgagttcgatttgttcatcctcgggaaagagacgacacagctcgccgccaatcttgggctcaatctcctggccatcgcgaccgatcttcaccggcttgccctcgttccaggtgttgtgcaggtgcagggtggcgttgaaagacaattccttgcggcagatccagtcaagctcgatgacgccgcccagtgccttgggcgaaatactaggcggcaatacccaggccacctgaggaatgtcccgccgtgagggggctgccatccgggcgaatcctgcaaatttacctaaaagcaaaatcggattataatagaggttttgaagacatagacattgtatgtatcttattcttaagaaactaagaaagtataagaaatgagaaacattgtttactccttgaacctaccactctcgttgaccgagaaaatgagcaggacgtttctggcctccttgaaagcctggttaagattggcgtcgttctgcggcagcgtggcccacacactcttgttcttagacagctggacgttgtcgctattgttcgacttgatgaggaagaaccgtgtgtctcggaataggtagttcagcttggtcatgtagtcgtagcccttctgcgaatgtgagtgcgtaccgccaccgacagaatctttttccggcgtggagctcttggaactgggtttgccccggccgttgccgccaccatttcctccgtttctcttgtgctgagtgcccgaatccgagtcagaggactcgctgtcggactccaaagttggaaggcttggtttctcgtcctcagcctcgctgagatcgctcttgtggccagcagaatcgttggcattggagggtatcttggtgcgcgacttcttggcggacggctgtcgatcctcggtatccggggatttggatttgaccttatccgacgcctcagatgaggttgttttcttcgtcccgctatccgtgcgcttctttttcttcccaccatttagctcctcgggagtgggttcccgtttggctttgttcttggcggaagatttggaggatttggtctcgacagcgggttgagggctttgcttggcaggcttcttggttttccgcttgctactgcccgccagggaagatgtggcagtgctgacggagctgatgctcggctccgagtcggatgagtctccaccattcgattcggaagcctcactccttgtgttgaactcaaagtcttgcagctcctcggcaatgtccgcctcgttctcgtcgaggcccaggtgcactgcatccaagtccgccatctcgcgcatcggcagcgtttgtttacctgctccgaaatcggaaatcggagtaccagatgaatggagcacccacgcacacgcacacacgcaaaccaagaaaaatatatagagaaaaaagccgatcgatcggcaaggtaagaaaaggtcagggaaatacaggtattcccaaactcacgggctgctcttggcattaattgtgtggacaccggtctagcgccactttttgttcacttttaacgcaatatatccctttaatatcgcgaaattacgccaattttacaatgcttacacacaaattctgcgtcacagcggcgacgaattggcgatggcgtcagaagagtgcggctatatgtctgcaggccgcgactatcggaccactatcgataggcggatgcagctgaaaaaggtagctagaaatagctgaaaatgcactgcaatcggttatgttatcgttcctaacgaagcgaggtaaacaaaatgcaccacaatcagtcggatttcccgacttttccgctttccttgctggacgacagcgatctagagccacagagatgttatatacccgcgtgggagaactctactggaactggatggtaccgttgtcacctttgcgatggcagctacgcagtttgttgggtaactccgcgtgcaggcagtgaaacttgttgcttccttgatggaattgtaacctccttgacgcggttctcccccaccaatcagcggttggtgcttctggagccacttaaattagttccctgcgtgaagaggatttcatgcgtgattacagtcacccaggagctccttcagcgacctccggtttccctggaggatctgaaggacgatgtgcgaatcttcctgcgccacctgaagcttaccaaaggatgctccgtgcagcacagacgccttgtgcagctgggcattgccagtgtggagatattcgatgctccaggagttgctgatgacgagtgttttgaaatagcccacgatgctgagctactcctggcggacatacgcctgggaatgcccttttctttagattttatcttcaagtatttgccacacagcttcgagcgacccatggagcagttggagaagctcctggaaacctctaaaatcagcttttcgcatagatttcctactacagcattggttgtgggtccggtggactgtggaaaaagtggtctactcagtgagttcctgcgtcgtcatagctgcaactgtttttacattacagccagccaggtgctgcgctcatatcccggcgaaaccgaagaggagttgaggaggatctttcaggctgctcagactttcaaggagaaacta

SEQ ID NO: 2363 - DNA, 2801 bp, DROSOPHILA
ccaattcgtcgccgctgtgacgcagaatttgtgtgtaagcattgtaaaattggcgtaatttcgcgatattaaagggatatattgcgttaaaagtgaacaaaaagtggcgctagaccggtgtccacacaattaatgccaagagcagccccaggtaaacaaacgctgccgatgcgcgagatggcggacttggatgcagtgcacctgggcctcgacgagaacgaggcggacattgccgaggagctgcaagactttgagttcaacacaaggagtgaggcttccgaatcgaatggtggagactcatccgactcggagccgagcatcagctccgtcagcactgccacatcttccctggcgggcagtagcaagcggaaaaccaagaagcctgccaagcaaagccctcaacccgctgtcgagaccaaatcctccaaatcttccgccaagaacaaagccaaacgggaacccactcccgaggagctaaatggtgggaagaaaaagaagcgcacggatagcgggacgaagaaaacaacctcatctgaggcgtcggataaggtcaaatccaaatccccggataccgaggatcgacagccgtccgccaagaagtcgcgcaccaagataccctccaatgccaacgattctgctggccacaagagcgatctcagcgaggctgaggacgagaaaccaagccttccaactttggagtccgacagcgagtcctctgactcggattcgggcactcagcacaagagaaacggaggaaatggtggcggcaacggccggggcaaacccagttccaagagctccacgccggaaaaagattctgtcggtggcggtacgcactcacattcgcagaagggctacgactacatgaccaagctgaactacctattccgagacacacggttcttcctcatcaagtcgaacaatagcgacaacgtccagctgtctaagaacaagagtgtgtgggccacgctgccgcagaacgacgccaatcttaaccaggctttcaaggaggccagaaacgtcctgctcattttctcggtcaacgagagtggtaaatttgcaggattcgcccggatggcagccccctcacggcgggacattcctcaggtggcctgggtattgccgcctagtatttcgcccaaggcactgggcggcgtcatcgagcttgactggatctgccgcaaggaattgtctttcaacgccaccctgcacctgcacaacacctggaacgagggcaagccggtgaagatcggtcgcgatggccaggagattgagcccaagattggcggcgagctgtgtcgtctctttcccgaggatgaacaaatcgaactcactcccatactcaagaaatccaaggagacggctcgagttatgcgagaaaaaggtatacacgtgatctacaagccgcccaggagtctatcctcgcgtggccatggagggggaggtcgtggcggaggcagaggatcaaatcacgaccacctgggcccgatgcggcacaagaggagctaccacggagcaccacaccatcggccgtaccgtcaccatcatggcatgggccttccgccgggcggtggctttaaaagaagcggttccccgtaccgccagatgggaggtgcagcaggagcgccacccggcggaccgggcgacatggccatgccgtcatgggaacgctacatgtcctcggcggcagctgctgaagcatacgtggcggactacatgcgcaacatgcacggccaacttccgccgttgcccttcgttcctccgttcgcccagctgccgattccaggagctggagcgggagcagcaggtgcccttccaccgggagcagcagctgccatgtacgagcagctgccgccaccggtgcggtactacgatggacccggtgccccgcctctaccggattatccgcctccccagcgaccaccaccaccgggcttcgacaaggcgccgagctacgaggagtttgctgcctggaagaatgctggcctacccacagtgccaccgcctggcttccccgtctacggcggagcagccaatggcggtagcaatggagctggcgggttagctgctgcccaggcggcggctgcgggcggtggcatgggagccggtggaggatccggtggcggtatgggtggacccggcggctatcggaatcgggacggcaacaacggctccgcgggcggtcgtcgacgggagtacggaaatcgcagcggtggcggcggatcttcgcgggattcgcgaccgtttcgcgagcgtggcggcggcggcggccagcgaagctatcgggacaacaggcgctaggccgcatcgaggtttaaaacgagatcgtgctcctggcctcgctagaatcggaaagtgtaatcctaatcctctcgcgtgtgaaaatctaaagagaaatattgaatgcgttacggtataagcaaaaagttaatatgataaaaccggctatcgtctaaagtcgatacaactctctttcccctttctctctgtcccgctcaccaaacacccccaccacccacactaagattaaaaacaaacttacgacttaagcaaatttcaatacagcagagatcttaatgctaattaaatattttaaaccacaaaaatacaaaatgaaagagagaaaatgtgaactttatttacctcccaaagcgaaaagtagcgagagaaagcgagagaaagagactttaaagagacgcccaacaacaacaaccacaaccaacaacaacaccatgaacgaacttaagttaacatgagcagtgatcaatcagtgatgtgtgtatcgtgtgtgccaaacccca

SEQ ID NO: 2364 - protein, 722 aa, DROSOPHILA
MPRAAPGKQTLPMREMADLDAVHLGLDENEADIAEELQDFEFNTRSEASESNGGDSSDSEPSISSVSTATSSLAGSSKRKTKKPAKQSPQPAVETKSSKSSAKNKAKREPTPEELNGGKKKKRTDSGTKKTTSSEASDKVKSKSPDTEDRQPSAKKSRTKIPSNANDSAGHKSDLSEAEDEKPSLPTLESDSESSDSDSGTQHKRNGGNGGGNGRGKPSSKSSTPEKDSVGGGTHSHSQKGYDYMTKLNYLFRDTRFFLIKSNNSDNVQLSKNKSVWATLPQNDANLNQAFKEARNVLLIFSVNESGKFAGFARMAAPSRRDIPQVAWVLPPSISPKALGGVIELDWICRKELSFNATLHLHNTWNEGKPVKIGRDGQEIEPKIGGELCRLFPEDEQIELTPILKKSKETARVMREKGIHVIYKPPRSLSSRGHGGGGRGGGRGSNHDHLGPMRHKRSYHGAPHHRPYRHHHGMGLPPGGGFKRSGSPYRQMGGAAGAPPGGPGDMAMPSWERYMSSAAAAEAYVADYMRNMHGQLPPLPFVPPFAQLPIPGAGAGAAGALPPGAAAAMYEQLPPPVRYYDGPGAPPLPDYPPPQRPPPPGFDKAPSYEEFAAWKNAGLPTVPPPGFPVYGGAANGGSNGAGGLAAAQAAAAGGGMGAGGGSGGGMGGPGGYRNRDGNNGSAGGRRREYGNRSGGGGSSRDSRPFRERGGGGGQRSYRDNRR

SEQ ID NO: 2365 - DNA, 9402 bp, DROSOPHILA
tcgaatgtcaagttgaaacacttgtgcgtaatggaaaaaatatgaaaaatcatgcactgtttggtgtccacgcgcaggggaaccaggaaagtccaccgtccaggaatacacaagtaaacccatatttgtcacaatattcccactcgtcactgttgtcgtccccatttcatatcgttgcgttgcacaaattcaattgaatcaagtcatttttatttgtttggcaacttgtagacacacacaacgaatcaaattctgaaagggtttcctccgagcacaacaggaaaacttgtgtgcaatatgtcctgcgaaatatgtgacaagcacaaactgttgttgagcagtccttccagagcgacgtactggctccataatagccggtattaaatggactccgaactgggcaccggacaatggaaatgattgaaatgccatattgccgagggtgcactcccgaccacatttgggagcactagttgttttttagctccggccaggaagagaaaatctaatcaaatcacacagctgaggtcttaatcagaccgaaacatttccgaccatatatgtatatgtgtgtccacatatggcttgtcaatttatggcagcaaactggtatgctgataaggggaatgtcaagccaatggaattactgactgatgaaatggcttaacgaagtgcaatactacacctggattgatatcaatgcaccgttaagattacgccaatacaacgcgggctgctctataagtaacttttgtgcacaatccagaggtcacaaaataagatgcagtaataaggaatcacattaaattagttccttaaccatttttttttttttaactcagaactttaacctataaaataaacgttcaataaacttattgaagcaatcaaagctacttgttcttttttcaattttcagtacacttcttaaatgaaaaggttattgctgaactgttttatggcccaaacttaatacctcaccatttttccgtattttgcagttttggaaccggcgtttcccatgcgcgatgtgaccataaatcgcaacgtcgatgcccataaacattacgatgtgcttggtgaggtgggacggtgagtagtgatttccagcgactcgatcgccatgctccccgttgtgcggcctccatatgtaatcaatattatacctcttgtgcagcggaaaattcggtacggtgtacaagtgcagggacaaggcgaatggactgcagctggcggccaagtttgtgccgatccccaagcgcgaggacaagcggaatgtggagcgggaggtggagataatgaattcattgcagcatcacctcatcatacagttgtacgcggcatacgaatatcagaaaatgatgtgcgtcgtcctggaactgtaaggaagttttcaagaggcccattcacaggcccgtacaaatgaatgtgttcagtttgcttgtccctgtctcgtgggcgtgactccttttctgtgtttctctataaatacagtataaatgtttatgtatataggttagactgggctttatttggcgaccaagagttagagtcgtttggatagtcggataagatgcactttcaaagcataagaaatgaattagaatgttaaaattgtatttaagtaaagtaaacactctggtcaccgaatacggtccaccctaatttatacatttgtagtcctctattccactattcgttaagtttgttgtccctttgctgtttgccacattgttgccggggacacaatatcttgcaatcagtgggactgtgcataaaatgcgatttacacgtacgcacattatcgtaaactagtaaacttttccgccccacacccaaaacacgaaacactcacacaaagccagaaagaaaaacctcgagcaacaggttttccctcggcacccgagcatttatagaaatttacagcaacttttatttgcctcgcgaaagtttttcgcagcttctttgttcgcaaatgaatggtgacatgggttaagggtctaatggcccataaaaacgattgaggcaggtgtttcggcccactgattagtcaacggccttgacccacattcgcctctcagggtggcaaacaataaaacgaaagaaacatgaaacaattccgtttccatagacccaggacaaagccccaaaagactttgtcaacttaaattaattttcaacaaaacaaggaaactgcagtttggacaacttgtgctgttgttctggttggtcctgttctcctttcgccgttttccccctcccggaaaagttaattgttgactggcatagttctccttggcatattcatagcagaatattcaactactatcaacatattttccaaagaagggaattcctcgccgagatgaggagcaagccaaatggtttaaacatgctgcctttcaactatttagtttccatcgtggcaaagccactcaaaggaagtaagcagaattgtcaaactaaaacaaacagctagtagtttaactgaattaaaatggcacagctatcattttgcaataaatatttaaacattttggcaattgtttcacacatcccaagcgacgggaaaattgtcgggtgaaaagcttcattggattttctcaaatcactggatttactagatgaaatttttaatgaacccattttaatgaaatgcactttaagtgattttcatttggataatggacttttatgggcacccagagaaatgtttatcacatcagtgggtattcatttcaattagagaaaaatagctcgtcttgttagacaatttataaaaatattctatatcgatcgattataaatgcacacaaacatatacaatacattaccgaagatatttcacgtttgtttcacttcaagttacttgttcatgatttgcttgatttgtacaaattgttattgtatttacatgtatgtttttaaaaatagatgaaggggcgtccaaatattatcagagtatttacatcgttcaacacaagctgcataatcagagcaaacaaaatgtcagctactgtccatcagttggatagcaatattccatttcaaacgatgcacaaagatctacatgcaattttaatttactcaatttcggggtgaagtgcatcaactagctaacaacccgaaaaaacagagaaaaactaatgaattgcggcttttctcctatctttttcgaattttttcatgggcatctgatggaggaatggaacggcaggatttttgtgatgtgttgtcgacacttgaggcaaatctcggatgacatttgtccgagtgcctgaacataattccctccgattccaattctgattctgattctgattccgactccgattccaatcggcatgccgttagttgatgcccgtcactcgagcggatggatgctcatggattatctgattttcgtgtcctggcagggcaatctgtactcttgtaaataacataactagtttagtttgggtggtggtcaggtaaggtaactaaaaccgaagcttaaacctatggttacgaccaggtgaggagactaattgaaaagcaataactctgcttatggtgcttggtttgcatgattcgtttcgttttgtctgcagtccatagtatgcacttctgctttcacattttccctctgtctaatttaactcactttttttctgaccttcacagcatcgaaggaggtgagctctttgatcgcgtggtggacgatgagttcgtcctcaccgaacgagtctgccgcgtcttcatccgccaggtgtgcgaggccatggccttcatccacggcaatggaatagtccacctcgatctgaagcccgaaaacattttggtgctcacacagaagggcaaccgcatcaagatcattgacttcggactggctcgtaaatttgatcctgataagcgactcagagtaagtagatcttgctaaactctataaacaaattggttttcactttggaagtaatatcctaatgcctaactttttatgtaacaattaccagaaattaactgaaggcctaaaaaacatttttaataacattttcttaaaactcatgatgttagttagtccttatatcttagatgcatattatgattggggagctagtattttagttatttataattattatattattattaatgtaataccgaatatttcaataggttctcttcggcactccggaatttgtggcgccagaagttgtgaactttgactgtatatcgtatggaacagatatgtggagtgttggcgttatatgctatgtgctgtaagttttatacatttaatgtacaacatgtattacaaagcaaaaaagtttatacaagcctttgatgtctaatgttagatgtacgcattgggttttattaagttatatttaaatttcttgaacagagaatactgaagatcaaaactgaaaaaataatttgaaaaggaaagcacaatttttttacttttagatcaattctttaaataaatccactaatattctcttaataaacttacaagtcaaatagatgtttataaatcctattaacatctatagaaatcataaagtgtattcttgatcttacttaccaaagtcatcatttaaaaagaaaagcctatccgaggatgtttagtttagtcatctctagagtaaagctagctcaatattttcgaaccatttatatttcagcccgagcaattagaaatttaatcaagacccgcacttatatcttaagggtaggtgcttgggagaaaaccaattaaaagtgtgtaccagctaaaaatgtgataatcaaaaggtggtggttggcgtggcgtatctgctcccactccttggcgaatttaatttagttaattaagtgttggttttgtgtttttatttattctacttacgctgctttcacattacatgtttattgactctcccacacctcgaaaccacacacaaccccatatgatggtttggatacagcatctcaggactgtcgcctttcatgggcgagaacgacattgaaacaatgtcaaatgtaaccattgcaaaatacgacttcgaggatgaatgctttaatggcatatcccccgagtgtctggatttcatagccaagctgctggccaaggacctgaggtgggtgtttcgattctccccctaattagagtctggttgctaacccgtctccggatttccatttccccagcacccggatgacagccgccgagtgcatgaagcacaaatggcttcagcagcggccggccaccgccgccacggccacgcccatcacaaaggccgcctccgcggcgtcgaagtcgcgcctgaagtctgtgtctccggtgacagctccctcggaatcctccgaggactccacggaaaccattgaggacgaagacgacgaggaagaggttgccgtgcagcaggcgaagcagaaagaccagcagcaggacgaggagctggccaatctctgcggcgacgctgaacttgaggtgagaaattgggacacaagtcctgtgaggctttcaaactagcaaacgggtgtcacatatccagaactggtctgctaaagccattttgtagccattttgtagatgtactcgtgcatcactgttcctcgataagttatttgaaccttaacctatagctcggaaacttagaggtagttttccgttctcaacccacacaaacaataattgtacccttcgcaactgtttccttttccagaacaaagaactggatgccacgaaggacaaccttaagaacttcatcgtgcgctgggagacgcatccgaacagtccgtacgtgttcgacgtggaggggaatgtgattgctccgctgagcgagacgagctacccccatcccaggaggacccacggcgcggacagcctttcctcctccagaggtgagtacggatcccagcgacagcgcgaccgacacgccctcatccacggcaaatgaggcatccgcatcgcatcgcacctccaactgcatcctgcaatcggatcgactttgtatattacacgattaacttgtcaaactaattgttgttcttaacttgaatgtggaccaagctggctagctgactctctgtccgtatcttctatctttctttgtctctttgttaaccccacctctttgctagaatcaatccttgtcttcggacgagggaggaccagcttgccagacagaactgttgtttatgtttaagtaaccctagcattaagctatatgcctggcatccttgtagcggatgaccagccctattaaccactttacactgtgataaagacagccattgaaaaaaaaaagaaaacaactacatgaaaatatatggaaaatataattttaactttagcacaaagatacatctctgtagtttcttcgagatgagaaacccaaatcgatttcgctccttaccaatcccatccaatcccaaatccgaaacccctagaaactaccctaatccccagttcagatttagatcaacacacatgctcgtatagccacagtttctggtctgccagccaggtaagcccaacatccagctcagaacaccaatcatccgcagagatcgcagtcaaattccaaagtcagtctcatgttcatttgtggtttgtccgtcaggaagaattactatatatatcaaagtttcaaaaaaaagttaaaagttagatccaaaagttacgcacatgtaaaagaatatagctcattctcagtaaaattttcttttgaatcagaattaataacacaatttaattataaatatttcaattcgtaagagaaatattaattttgtataaccttttctttagcagctgtattgacgcatagcttttttttgtgtagaacattagtcaaacgcacattttgatgttccaaagagccatattacacaactctctgaactcatgagcatgctcgatccgtatgtatataaccatattgtgtacattaacccgtctgaaaacagtttttggcaataaccccataacttctatgtaaacatatacgacttctatggaaaaatgcttataggtctgtgctatatttccagtttgttcgccttcgccctgcgattcaatatccactttgacggatgacgaacggggagatattgaagatcttccggaagaggacgaatcccgcagtgcggaaaacgagagtcctcgctcggtggccacgcccatcaacgagtctcgggagaagctgttcccgacggtagccacctccagtccgtcaactcccacgccgcagcatctcttcaacgagaacttcgatgagttctctggcagccagtccaccgcccagcagcagcgcagcatgaagagctatctgcacaccttcgatcgaaggaactcggataccacgtacctgctgggtcggcggagttccggagagcgggtgaatctggcggatgagatacgaaagctatccgatcacctgctcatgctggccgagatcaacaccaagcttggggatgcgaacaataacgggagcagcagtggagcgcctgctgatcctcctgctgctgctgctgctgctgctgctcctgtgccaacctcaactgctccagcatctgttgctccttctggcagtacttctagtaaaacctcggagatcagccaggaaggcaataggtggaccagcaaaaccacttcgagcagtagctggaatcgtcccactttgaaaggaggactcttcagccaggccagcagcagttcccagagccaaagcacctacgatgacggaaagggcaagacgaagatcagttcgctgtctgtgagattgcagcagtccatcgaggaaacacccaagctaagcaacggaaatagctcctctagcaaatccctggtccagtcgcagcgaaagtccacggtgcaaaccatgagcagttccaatgccaggagcttcaccaaccagcaagtacaaagaaccagcaccacctcttccaaggtgatctccagcagcaccagaagcagtaacaccagctccagcaattatatagcctccaacgccagcaactcaatctcgaccagcgccagcaacccaagctccaccggcgccagcaatccaattaccaccagcgccagcaacgaatcggccagcagtcgtcgagccaagttcaggataaatcagatgagtcgcgatgtgcccgttgggctgccggacactcatcaaaccgtgaatctggaggaggcggccaacaccaccaaggattgcctgctgcatttgttggagaaatacaacgagacccgcatccgcaatccggtgggtcgtcaccagagcatcagcgtggactggcgggtcagcgacaatctggagtaccgctccatgagctccatcaacgccttcttccagcgccacaaccccaatggcggcggccacaacgtacgccacattcaagcccagctggaggagaaggcggcgggcaagtaggtgcccatatccacagccctctgtatatatgcgatatatatatttgtatgtagagtacagatcaactaattggcacataggtaaatctacaaagcgtcgaatggaacaaattaatatttatgtacttgatgtaagcaataaatcaaattaatttattgaataaaactgaagcaatgattcgtttctattgacgcgggattgaattttgttggcatcccacgatattttataaaaatgaaattaaaaattaaaaacgcgatttatgtactaccaactagaaaatcaaaaacaatttattgcagaaaaacaaatattaacttataaaatgtacaaaattgttttagtaaactacattttactgctacgtctacaaccaaagtaatgcggatgtgttggtaattttgaaacaggacaatcgcgttgtttttgttttgtttattgatgtatgagttgaatatggtttaattatacatagagtgtctatacatataaatattaggagaatactttggatttgttcttagttaggccttacaaattaatgctttgtataagtgttatgaagaataggctctgcctatgtgtatagtatgtataataatctagtttttgtacatgatagtttcaggcaaaattgttttcataatttgcccagagatcatagcaaatcataaaagacatttttagcactggttaagaaatgagagcgcgacaatttgtgtccattcggcggcattcatataaataaggcatccaaacgtgcagaaattgacgaagttaattcaaaggcattcctcttttttttttttgttttccactggtcgaattggttacaatgttagtaggtcgcaaaaacaaagcagcaatgagccgaaatgcggcttattggggcatcgttttggcgcccttaatatgcaagacaaaactcaattctactctcccctcagtttcagtacttggatgaagtggcagggcagagaaaggatgagttttgttcacc

SEQ ID NO: 2366 - DNA, 2562 bp, DROSOPHILA
gttttggaaccggcgtttcccatgcgcgatgtgaccataaatcgcaacgtcgatgcccataaacattacgatgtgcttggtgaggtgggacgcggaaaattcggtacggtgtacaagtgcagggacaaggcgaatggactgcagctggcggccaagtttgtgccgatccccaagcgcgaggacaagcggaatgtggagcgggaggtggagataatgaattcattgcagcatcacctcatcatacagttgtacgcggcatacgaatatcagaaaatgatgtgcgtcgtcctggaactcatcgaaggaggtgagctctttgatcgcgtggtggacgatgagttcgtcctcaccgaacgagtctgccgcgtcttcatccgccaggtgtgcgaggccatggccttcatccacggcaatggaatagtccacctcgatctgaagcccgaaaacattttggtgctcacacagaagggcaaccgcatcaagatcattgacttcggactggctcgtaaatttgatcctgataagcgactcagagttctcttcggcactccggaatttgtggcgccagaagttgtgaactttgactgtatatcgtatggaacagatatgtggagtgttggcgttatatgctatgtgctcatctcaggactgtcgcctttcatgggcgagaacgacattgaaacaatgtcaaatgtaaccattgcaaaatacgacttcgaggatgaatgctttaatggcatatcccccgagtgtctggatttcatagccaagctgctggccaaggacctgagcacccggatgacagccgccgagtgcatgaagcacaaatggcttcagcagcggccggccaccgccgccacggccacgcccatcacaaaggccgcctccgcggcgtcgaagtcgcgcctgaagtctgtgtctccggtgacagctccctcggaatcctccgaggactccacggaaaccattgaggacgaagacgacgaggaagaggttgccgtgcagcaggcgaagcagaaagaccagcagcaggacgaggagctggccaatctctgcggcgacgctgaacttgagaacaaagaactggatgccacgaaggacaaccttaagaacttcatcgtgcgctgggagacgcatccgaacagtccgtacgtgttcgacgtggaggggaatgtgattgctccgctgagcgagacgagctacccccatcccaggaggacccacggcgcggacagcctttcctcctccagagtttgttcgccttcgccctgcgattcaatatccactttgacggatgacgaacggggagatattgaagatcttccggaagaggacgaatcccgcagtgcggaaaacgagagtcctcgctcggtggccacgcccatcaacgagtctcgggagaagctgttcccgacggtagccacctccagtccgtcaactcccacgccgcagcatctcttcaacgagaacttcgatgagttctctggcagccagtccaccgcccagcagcagcgcagcatgaagagctatctgcacaccttcgatcgaaggaactcggataccacgtacctgctgggtcggcggagttccggagagcgggtgaatctggcggatgagatacgaaagctatccgatcacctgctcatgctggccgagatcaacaccaagcttggggatgcgaacaataacgggagcagcacatctgttgctccttctggcagtacttctagtaaaacctcggagatcagccaggaaggcaataggtggaccagcaaaaccacttcgagcagtagctggaatcgtcccactttgaaaggaggactcttcagccaggccagcagcagttcccagagccaaagcacctacgatgacggaaagggcaagacgaagatcagttcgctgtctgtgagattgcagcagtccatcgaggaaacacccaagctaagcaacggaaatagctcctctagcaaatccctggtccagtcgcagcgaaagtccacggtgcaaaccatgagcagttccaatgccaggagcttcaccaaccagcaagtacaaagaaccagcaccacctcttccaaggtgatctccagcagcaccagaagcagtaacaccagctccagcaattatatagcctccaacgccagcaactcaatctcgaccagcgccagcaacccaagctccaccggcgccagcaatccaattaccaccagcgccagcaacgaatcggccagcagtcgtcgagccaagttcaggataaatcagatgagtcgcgatgtgcccgttgggctgccggacactcatcaaaccgtgaatctggaggaggcggccaacaccaccaaggattgcctgctgcatttgttggagaaatacaacgagacccgcatccgcaatccggtgggtcgtcaccagagcatcagcgtggactggcgggtcagcgacaatctggagtaccgctccatgagctccatcaacgccttcttccagcgccacaaccccaatggcggcggccacaacgtacgccacattcaagcccagctggaggagaaggcggcgggcaagtag

SEQ ID NO: 2367 - protein, 762 aa, DROSOPHILA
MMCVVLELIEGGELFDRVVDDEFVLTERVCRVFIRQVCEAMAFIHGNGIVHLDLKPENILVLTQKGNRIKIIDFGLARKFDPDKRLRVLFGTPEFVAPEVVNFDCISYGTDMWSVGVICYVLISGLSPFMGENDIETMSNVTIAKYDFEDECFNGISPECLDFIAKLLAKDLSTRMTAAECMKHKWLQQRPATAATATPITKAASAASKSRLKSVSPVTAPSESSEDSTETIEDEDDEEEVAVQQAKQKDQQQDEELANLCGDAELENKELDATKDNLKNFIVRWETHPNSPYVFDVEGNVIAPLSETSYPHPRRTHGADSLSSSRVCSPSPCDSISTLTDDERGDIEDLPEEDESRSAENESPRSVATPINESREKLFPTVATSSPSTPTPQHLFNENFDEFSGSQSTAQQQRSMKSYLHTFDRRNSDTTYLLGRRSSGERVNLADEIRKLSDHLLMLAEINTKLGDANNNGSSTSVAPSGSTSSKTSEISQEGNRWTSKTTSSSSWNRPTLKGGLFSQASSSSQSQSTYDDGKGKTKISSLSVRLQQSIEETPKLSNGNSSSSKSLVQSQRKSTVQTMSSSNARSFTNQQVQRTSTTSSKVISSSTRSSNTSSSNYIASNASNSISTSASNPSSTGASNPITTSASNESASSRRAKFRINQMSRDVPVGLPDTHQTVNLEEAANTTKDCLLHLLEKYNETRIRNPVGRHQSISVDWRVSDNLEYRSMSSINAFFQRHNPNGGGHNVRHIQAQLEEKAAGK

SEQ ID NO: 2368 - DNA, 4998 bp, DROSOPHILA
tttggaacttgagcaaatgttaagcaccgcaaagtccaaagaaaagtgcagtattgtttagagaatattttgattgtttgattgcccaacctacaacttccacgaccaatttgcttacagtttctagcttctttttacggaacaatcgaaacaaatcgacccgccctagaatacaactattattagttagtctttatttcgtattaagatagttattatgggtgacatggtctctcttgtggagaatgctcttgtaaccagattgtgaaatgaagaaactcggttcaggaattcatatttagctgtgctaactattatattgtattgtttactattacgtcatggaatttagaaaaaccccaacgaggcatttggtgtggggcgtttttatggagtcgaaaagttattgtactatataatggatatttatatatgcaccttgtaaataccgtagtgtatatttaccaaattaaacctagctttaagactatgacctaaaagaattatatatttttttcttgtgcgaaacaaaacacacatacgaataaacagacatttaacctcaagccaagtgtcgttttcgaactagcaaatttgtttattccgctacagaagccgattgccgcgatccgtttcaagggctcgcagaacaggtaaaataataaatatataaattaaaaaatacaatcattacatatacaggcttgtcatcgctatgggtatggtattcgcgtatgctagttagtgaagaggagcgcagcggaggcccgtggcttgccaaattattgccaattcagtgagtagttggtgtttcaatcgtggtcgggctacatggattatatcaatgtacttcttaatgcttacaattacgttaataacttcttgcttttatgacgcgcatgtggatattagagcagctgtaattcaaaaaggaatcacgtaaataaaagtgtgacggggcacatgcggtatgcagttgctcaccgatggcagccctgccctagagggcgtcccagtcggtctgactgttgtagacctcctcctccagccagaccgcgtaattggccttgaagtaatccgtcagctcgaccttgcgatcccaccaacccgagtgaccgaagaaggcaaagtccgagtgggtaaggatctcgtcgctgggaaagccaccctccacaccatagtcgttgagctgctgctgctggttgtggccgccattgccaccgccaccgttgtttccatagccatttgcgtcgccattattgccacatccattgttgcccgccatcatgttggattgctgggcgttctccgcattctgagctgccgtgccgttgtttccacacttctgggtggcttccggatagcgtcgcaggttgaatcgatccacgcaggcccgcagcgtacactcctccgcctggaagtcccagggacgcgactccaagtcgttgccaaaggcccaatcgtcgtttagacgatgccgcaccttggcgtaaattgcactcatggtcttcatattggacttccgccactggcggcccaagtacttggtctgcatcttgagcagcttcagcacgtacagctgcatcatggcgtggcgcaccttaagcgtcttcttcaggattggtgccgacttgaataccaccagcatcatcactcgcgagtgcttccacttgatcagcttgttgaggatgcgcagcaggtttatgcaggagaacacgttccgccaagagtaggacttatcggacatctctccgccatacacaaagctatcgccactcaaatccggttgctcaccaatcacacacgacgggaaatcgagcagaggaatggagttcttggtgttcacgtactccgtgattgtctgattgaagaacttcaaaaccagcgggatgcagttggcgaacacgagatgctgcgacatgaactcaaactggtaaacatggtttatcttgaaatgctttaaatatagcaggatgatggccgagacagccttcacaatgatctccttgtgccgaccaatgtcgacggttagctttgttgattgggtggccgtcagcggcatcttcctaggcagcacatcggccattatgttgatgctctccgtcttggacttggacgttggcgaagctgccagcaggaccttgagaagggcgatcatatactgcggcaggtttggcaggatggcttggtacaacacctcagccggggtcagtttgatttcgtcctcgtgcgtggaaatggggttcctagctatgtcctcctccttcttaatttgcacatcggccaggctcatatacatgtgccgctgcagcgtcttaaagccctcgtgaatgggttgcggcagtccagccagactctcgtggtcaccaatcagtgaatacccgatgaacttattccgcgaaatgtccagaaactggtcaatgtccttttgtcgcaccttaggcgtccagggcaggcgagccgtgatctgtaccggaggcacagcagcgggtggctgtgttaggctaggctggttgtttggatttgccgtcgaggtggtggatgccgacgaagaggggtcatcgtagggtcggtagtactgagagagttcttcctccccgtttccgccattgccgctgccattgttggcattattttgaccctcgttgccgcccatctccatgtctatctgctcgggctcgtccaaaaaacgctgcttcatcagggagcgtctgtgcggcaaggaaaatgaatgtattgaaaagtgtacataagtgatctaagactccgcttacttgaagttccgcttgggatactggttctccagtatatcagtagctgtggccggcggtgagctggctcgcatgcacttggtaacctccagcgtgtcctcggtgatgggttccaaacccaccttcaatcgatactcgttcttgagattcttgagcacatccatgcctcccagtcccagcagcgaaactttccacagcaggaggacaaccttcttcatggggaactgcggtgctgcgccactgcaaaaccgtgtgatcatgcccaacagcttgacggccagaagttcgccatctggtagtggtgagttgatttcttgcacaaaggagtcggccagctctctgtagtcttcgctgcccttttccttttcatcgcgaatcgtttctgtgatgatgtagagcacagataggatcacccgaatgtccgtggagtccacaagcgtgacgttagtgatcttgacggccacaatgtccggagagcaggcgctttcgatctccatgttgagcaggtcgatgaaggaggcgaagacgccgagttggtagagcaccagcacattgtccctggtgatctggtgctgctcctcgtccgactgaacctccgcccagcagccttgggccaggtaaaggatgcaccgggcggcctgcatgcgaaaggatcgatcggagacctccagctggtccaccagcttcatcacgatgccgcgctgggaggcggagtcctgcttctgccagttgggcggcaggtcgtacagctccatctggtcctcgaaggccttcacgttcatctgaaactcgctgaactccgtgtagctatacagttcagcgatctcgttctgatagccatccacgtccgcgtacacgaagtccaggtcgggcccgtcgcagttggcgtccgcatcgtgggtgtcctgctcaaaggagttgtttatggatgtgagcatcattccgccaatcctttttcgccacacagggatctcttttgtgtggaagtgtatgtgcgtgagtgtgggctactcgtgtatgtgtatcctgcggcggtgggcggtgcgcctggcgtgggcgtggttgctcctgctcgctggttttctctcccacttggtcttagtagcacatggacgtactaagcaattcgcactgcatttcactgggtaatttcgactgcaatttgtttctcgccaaaaacaaaaacgcacaatggaaaaagaagaaaattcgtacgaccgtttgctgtgtggtcggaaaataccaaacagcaaatggtgttggccgtctggcaaggccgttcgatcggatgtggcagcgactgatgcaattgccgctgctttaaatttgaaataagggttctgtttgatttgtactaatattaggaatagggattgtttcattttgatattttgtgtttacaaaatgataatcaatagtaatgatatatacaatttgaagctctaattaaaggcttttactttcatgcttaaatttagaaagtagggcttaaccaccacacttggcaactctggaaaagttgtgctcctagtgtgaccagaccagaacattacaagtgctttcacctacacatataaataagggtttttgcaagtcgccggtttcagttttatttacgcttcgaaagtgagaaagtgcccagttccattagtcattgctattacgccataagtaagcccaaacaataatacccagctgtcgagattaagcacagcataatcagcccaaaaacacagctggtcgaggtgacaagaatatatgtatatagagcagggaaaacagtcgaatcgaatctgaactttgctcccgattttcgcccatatcagcgtgagcttgcagaatctcggcattcgcattctatatttgtatccctgcatccgaaactcgcagcagatcgttgtgaaatcgtacacatagtcgatatatagctcagtaatggctggccgctccatcgtccacttttttctggggtccgtggcaatcgccctgggatcgtacatctacttcaccatgcaagtaattacccacaacactaactatcccttcaaattgctgtccaatcaactcgaacaatggcatgcatgtgcaatcagcgacggtaacgaggcagcgtcgtgggttacgtgggccaatcctggccagcttaaaggtcactgtgcgtagccactaggttgcgtgactcacagggtgctgggatatacatatatgtacatatagctcttgactt

SEQ ID NO: 2369 - DNA, 2935 bp, DROSOPHILA
cagcaaacggtcgtacgaattttcttctttttccattgtgcgtttttgtttttggcgagaaacaaattgcagtcgaaattacccagtgaaatgcagtgcgaattgcttagtacgtccatgtgctactaagaccaagtgggagagaaaaccagcgagcaggagcaaccacgcccacgccaggcgcaccgcccaccgccgcaggatacacatacacgagtagcccacactcacgcacatacacttccacacaaaagagatccctgtgtggcgaaaaaggattggcggaatgatgctcacatccataaacaactcctttgagcaggacacccacgatgcggacgccaactgcgacgggcccgacctggacttcgtgtacgcggacgtggatggctatcagaacgagatcgctgaactgtatagctacacggagttcagcgagtttcagatgaacgtgaaggccttcgaggaccagatggagctgtacgacctgccgcccaactggcagaagcaggactccgcctcccagcgcggcatcgtgatgaagctggtggaccagctggaggtctccgatcgatcctttcgcatgcaggccgcccggtgcatcctttacctggcccaaggctgctgggcggaggttcagtcggacgaggagcagcaccagatcaccagggacaatgtgctggtgctctaccaactcggcgtcttcgcctccttcatcgacctgctcaacatggagatcgaaagcgcctgctctccggacattgtggccgtcaagatcactaacgtcacgcttgtggactccacggacattcgggtgatcctatctgtgctctacatcatcacagaaacgattcgcgatgaaaaggaaaagggcagcgaagactacagagagctggccgactcctttgtgcaagaaatcaactcaccactaccagatggcgaacttctggccgtcaagctgttgggcatgatcacacggttttgcagtggcgcagcaccgcagttccccatgaagaaggttgtcctcctgctgtggaaagtttcgctgctgggactgggaggcatggatgtgctcaagaatctcaagaacgagtatcgattgaaggtgggtttggaacccatcaccgaggacacgctggaggttaccaagtgcatgcgagccagctcaccgccggccacagctactgatatactggagaaccagtatcccaagcggaacttcaaacgctccctgatgaagcagcgttttttggacgagcccgagcagatagacatggagatgggcggcaacgagggtcaaaataatgccaacaatggcagcggcaatggcggaaacggggaggaagaactctctcagtactaccgaccctacgatgacccctcttcgtcggcatccaccacctcgacggcaaatccaaacaaccagcctagcctaacacagccacccgctgctgtgcctccggtacagatcacggctcgcctgccctggacgcctaaggtgcgacaaaaggacattgaccagtttctggacatttcgcggaataagttcatcgggtattcactgattggtgaccacgagagtctggctggactgccgcaacccattcacgagggctttaagacgctgcagcggcacatgtatatgagcctggccgatgtgcaaattaagaaggaggaggacatagctaggaaccccatttccacgcacgaggacgaaatcaaactgaccccggctgaggtgttgtaccaagccatcctgccaaacctgccgcagtatatgatcgcccttctcaaggtcctgctggcagcttcgccaacgtccaagtccaagacggagagcatcaacataatggccgatgtgctgcctaggaagatgccgctgacggccacccaatcaacaaagctaaccgtcgacattggtcggcacaaggagatcattgtgaaggctgtctcggccatcatcctgctatatttaaagcatttcaagataaaccatgtttaccagtttgagttcatgtcgcagcatctcgtgttcgccaactgcatcccgctggttttgaagttcttcaatcagacaatcacggagtacgtgaacaccaagaactccattcctctgctcgatttcccgtcgtgtgtgattggtgagcaaccggatttgagtggcgatagctttgtgtatggcggagagatgtccgataagtcctactcttggcggaacgtgttctcctgcataaacctgctgcgcatcctcaacaagctgatcaagtggaagcactcgcgagtgatgatgctggtggtattcaagtcggcaccaatcctgaagaagacgcttaaggtgcgccacgccatgatgcagctgtacgtgctgaagctgctcaagatgcagaccaagtacttgggccgccagtggcggaagtccaatatgaagaccatgagtgcaatttacgccaaggtgcggcatcgtctaaacgacgattgggcctttggcaacgacttggagtcgcgtccctgggacttccaggcggaggagtgtacgctgcgggcctgcgtggatcgattcaacctgcgacgctatccggaagccacccagaagtgtggaaacaacggcacggcagctcagaatgcggagaacgcccagcaatccaacatgatggcgggcaacaatggatgtggcaataatggcgacgcaaatggctatggaaacaacggtggcggtggcaatggcggccacaaccagcagcagcagctcaacgactatggtgtggagggtggctttcccagcgacgagatccttacccactcggactttgccttcttcggtcactcgggttggtgggatcgcaaggtcgagctgacggattacttcaaggccaattacgcggtctggctggaggaggaggtctacaacagtcagaccgactgggacgccctctag

SEQ ID NO: 2370 - protein, 882 aa, DROSOPHILA
MMLTSINNSFEQDTHDADANCDGPDLDFVYADVDGYQNEIAELYSYTEFSEFQMNVKAFEDQMELYDLPPNWQKQDSASQRGIVMKLVDQLEVSDRSFRMQAARCILYLAQGCWAEVQSDEEQHQITRDNVLVLYQLGVFASFIDLLNMEIESACSPDIVAVKITNVTLVDSTDIRVILSVLYIITETIRDEKEKGSEDYRELADSFVQEINSPLPDGELLAVKLLGMITRFCSGAAPQFPMKKVVLLLWKVSLLGLGGMDVLKNLKNEYRLKVGLEPITEDTLEVTKCMRASSPPATATDILENQYPKRNFKRSLMKQRFLDEPEQIDMEMGGNEGQNNANNGSGNGGNGEEELSQYYRPYDDPSSSASTTSTANPNNQPSLTQPPAAVPPVQITARLPWTPKVRQKDIDQFLDISRNKFIGYSLIGDHESLAGLPQPIHEGFKTLQRHMYMSLADVQIKKEEDIARNPISTHEDEIKLTPAEVLYQAILPNLPQYMIALLKVLLAASPTSKSKTESINIMADVLPRKMPLTATQSTKLTVDIGRHKEIIVKAVSAIILLYLKHFKINHVYQFEFMSQHLVFANCIPLVLKFFNQTITEYVNTKNSIPLLDFPSCVIGEQPDLSGDSFVYGGEMSDKSYSWRNVFSCINLLRILNKLIKWKHSRVMMLVVFKSAPILKKTLKVRHAMMQLYVLKLLKMQTKYLGRQWRKSNMKTMSAIYAKVRHRLNDDWAFGNDLESRPWDFQAEECTLRACVDRFNLRRYPEATQKCGNNGTAAQNAENAQQSNMMAGNNGCGNNGDANGYGNNGGGGNGGHNQQQQLNDYGVEGGFPSDEILTHSDFAFFGHSGWWDRKVELTDYFKANYAVWLEEEVYNSQTDWDAL

SEQ ID NO: 2371 - DNA, 3664 bp, DROSOPHILA
gaactacctgcagatcatgactgttgccgaagtcctggacgcgtacacggggaaccacgtgaccactaacacgtttcactataccttctccgctccagacgcggttactgaggtgctgcctcgctcctaccacgaaaccatgtggtacatccatggtcgccgcaagttcattgccagcagaagctaagcctcaaaaaaaattcccgctcagtttaaattcacgtagtcagtatttcttatagctaatgtacacaaagactggattagtttgagcaaatcttgtaaaatatgttaaccaaactgtgccaggtgatatttcctgatccaaaaatctatatgatgcctattaaatcgagtaactattcaaattccttatcgaaagcagaaagcgtatagttggccgttggccctggcttttatttcgaatacccagttgcgtgaagatcatgaccactgccaatgttctgggcacgcacgtgattggtggtgagccctactcccactccgcagattagattgggtccacaattgattcatagaaaacattatattttcggtaatgttttgctgtctaatcagaccgaaaattgaatgtaaaactttccatcttcttcgctagtctggcacttttcgaaaacatcatctttacacctcatttcagattagattgcaagcttgagtagatgcactgaaaaataagatgtttctgtgctagagacggaatatattcaaacacatagtcagtacaatattatgggatcacatcattctagcatcaaataatctaacatattttcaaaagatttaattcccaaaagatcaaaatatacaaatccgctcgagaacctacgctatttcttgcagtgcaggcagaagatctctcaccaagcggacaggtgatcgtcatgcgcgggttctcagtcgccggagagccatgtaatcgcacaacgcggaacatttgccaacgctccactcggttctagaatcactctctattttgcagcccaagtgaaagcacttcatgtaaatccgaacgagctgaggcgtattacgtattaggagctgggaactacacccaagtgccctgcaagtgatttccccaaaaaatccatgccattggatccccccagtaggcggttcaactagttgcaatttccaaggccccgtcaacctagacacctggaaacgatgctgtgtaccttggcacggagttttggaacggcgctggcgaggaggagctcttggtcgactgcccggcgaaggcgactgctggccacaagtcccccccctttggcgagccagcagatgcccaggagctatacgctagacaacggacccaaggtgaagtccgatcatcgctctggaacgatggtggagggtaagtcagagtctatgttcgcttcggaaaacctttctgacacctctttacccctagtggctcgtgtcattcgcgagcaatccggcgtggacgtgggataccatacgattcccaagccccgagatcatctcctgcagcacgagccgaagagggaggagcttccaccaagaactatgctggattcgcacaccacggccattctgcccctgagctccagtgagctaatccgcgagagctacgtgaatcacctgggaagggtgagattgggccgaattatggaggagttggacatgtttgccgtatggatctgccatcgtcatgtgaagctgcccaagctgccgaagggagtgcctttgccttacacctttgtcacgttgctggtcgacaaagtggagttcaccaacctggagcggttgcaggtcaaccaggacatcgagatcagtggtcacatctcgtgggcggggcggagctccatggagattaccatctatgtgaggcagttggcccacggcgaatatattgatgtaacaaaagcaatcttcgtcatggtggccagaaatgccaccaatacgggaccggctcccattaatcctatagaggttggcgatgaaaccgagaagctcatttgggagcaggcagagaagcggcaaaaagtgcgcaagtcttctgccatggactcagtgttcaactcgccgcccagggagcacgaacaggccctcatgtacgagatcctcaagagaaccaccccagccaatagtatggatctcaacaagcgtgtgctgccgccgaaatgccgctggatggaggactctatgcagtctacgatgattgctccatttccggagaacaggaatgcgcagaacaccatctttgggggctatctcatgcgccaggccgttgaaatcagcttcataatggctagcatctatctgggcgatcggcccaccctcaggtgcatctcggacattagtttcatgcacccggtgcatgtggatcggttcctccagctcaccgcccacgttgtttacgccgcccagaactacgtccagctgatgaccgtggcccagatttgggatgccaagagcggcaaagtgcagaccaccaatgtcttctacttgacctatcgggcggacaaggtgctggacgaagtcctcccgcgatcctaccgagagatgttgtggtacgtccacggtaggcggaaactcctgggcgctctgcacttgcagccggagtaccccgatcctatcgaagtggccaaagagagctcaaatcatatcagcacttagaattagcgctaatgtaaatcgaagttgtagttgatccaaatatgttaatctgatggaattttaactttatagctgttattttataatttataggatatatcaatgaaataaaattgtagaaaggaatttaaattgatgcttgtgtgcaattattggattttagaaaatgaactaatcgtcacagctggggttctttgatgaaaaggccaaaactttccgttttgtaaggtttattttacaaatcctgttagtctaaccagcgggcgcgcttgtacagtgtttttgctttagaaatccttaaactgaagaaccaaatccatcccctcgcttagaatcgcatgcggtgggggtattgggaggagtgcagggcaaacatgttctgcaagtacttggcgaagaacttgccctcgggatgggccttgatgaccttcagcagggcggcgtccacctccttctggtccttcttgcgctgctcgttgggcacgaagcgctccttcttggccgcgaagatgtcggcctcgccggtcttcttgtccttcttagccttcagacggcggaagtaggcgtcgttcaggtgctcgggcaccttgaaggcaccgagatccaccttcgaggaggtgccgatcacgtagcgctgggacacgcgacgcagcgggcacgagttgagggcgaagggtccggtgaccagcaggagtccggaggccaagaccttcaacaggacgacgcgcttgccctggtggcgtccggccagcaggatgagcacggttccgggggtcaggttgcggcgcgtgttgcgtttgtgctcgctgaagtttgccttggaggggcgcttcttcacgaacgtcttggtcgggtaggaggccttgctcttcttcaggaagaccgtgcgctcaccgccgttcttgggtcctccgatcttcttcaccttcttgatgggcaccttggccttctccacgacggggctcttcttgtccttcaggcggtacagagcacgacgctt

SEQ ID NO: 2372 - DNA, 1607 bp, DROSOPHILA
cagcccaagtgaaagcacttcatgtaaatccgaacgagctgaggcgtattacgtattaggagctgggaactacacccaagtgccctgcaagtgatttccccaaaaaatccatgccattggatccccccagtaggcggttcaactagttgcaatttccaaggccccgtcaacctagacacctggaaacgatgctgtgtaccttggcacggagttttggaacggcgctggcgaggaggagctcttggtcgactgcccggcgaaggcgactgctggccacaagtcccccccctttggcgagccagcagatgcccaggagctatacgctagacaacggacccaaggtgaagtccgatcatcgctctggaacgatggtggaggtggctcgtgtcattcgcgagcaatccggcgtggacgtgggataccatacgattcccaagccccgagatcatctcctgcagcacgagccgaagagggaggagcttccaccaagaactatgctggattcgcacaccacggccattctgcccctgagctccagtgagctaatccgcgagagctacgtgaatcacctgggaagggtgagattgggccgaattatggaggagttggacatgtttgccgtatggatctgccatcgtcatgtgaagctgcccaagctgccgaagggagtgcctttgccttacacctttgtcacgttgctggtcgacaaagtggagttcaccaacctggagcggttgcaggtcaaccaggacatcgagatcagtggtcacatctcgtgggcggggcggagctccatggagattaccatctatgtgaggcagttggcccacggcgaatatattgatgtaacaaaagcaatcttcgtcatggtggccagaaatgccaccaatacgggaccggctcccattaatcctatagaggttggcgatgaaaccgagaagctcatttgggagcaggcagagaagcggcaaaaagtgcgcaagtcttctgccatggactcagtgttcaactcgccgcccagggagcacgaacaggccctcatgtacgagatcctcaagagaaccaccccagccaatagtatggatctcaacaagcgtgtgctgccgccgaaatgccgctggatggaggactctatgcagtctacgatgattgctccatttccggagaacaggaatgcgcagaacaccatctttgggggctatctcatgcgccaggccgttgaaatcagcttcataatggctagcatctatctgggcgatcggcccaccctcaggtgcatctcggacattagtttcatgcacccggtgcatgtggatcggttcctccagctcaccgcccacgttgtttacgccgcccagaactacgtccagctgatgaccgtggcccagatttgggatgccaagagcggcaaagtgcagaccaccaatgtcttctacttgacctatcgggcggacaaggtgctggacgaagtcctcccgcgatcctaccgagagatgttgtggtacgtccacggtaggcggaaactcctgggcgctctgcacttgcagccggagtaccccgatcctatcgaagtggccaaagagagctcaaatcatatcagcacttag

SEQ ID NO: 2373 - protein, 472 aa, DROSOPHILA
MLCTLARSFGTALARRSSWSTARRRRLLATSPPPLASQQMPRSYTLDNGPKVKSDHRSGTMVEVARVIREQSGVDVGYHTIPKPRDHLLQHEPKREELPPRTMLDSHTTAILPLSSSELIRESYVNHLGRVRLGRIMEELDMFAVWICHRHVKLPKLPKGVPLPYTFVTLLVDKVEFTNLERLQVNQDIEISGHISWAGRSSMEITIYVRQLAHGEYIDVTKAIFVMVARNATNTGPAPINPIEVGDETEKLIWEQAEKRQKVRKSSAMDSVFNSPPREHEQALMYEILKRTTPANSMDLNKRVLPPKCRWMEDSMQSTMIAPFPENRNAQNTIFGGYLMRQAVEISFIMASIYLGDRPTLRCISDISFMHPVHVDRFLQLTAHVVYAAQNYVQLMTVAQIWDAKSGKVQTTNVFYLTYRADKVLDEVLPRSYREMLWYVHGRRKLLGALHLQPEYPDPIEVAKESSNHIST

SEQ ID NO: 2374 - DNA, 2963 bp, DROSOPHILA
attgttccttaaaaatgttaatattaactgatgacgtactcgaaaaggttttcttctattcttattcattacaaaatatatgaataagtacatataaatatattctcaattaaaactagctaacaccttaattctctgacttagtctgtgaagtattgaaaatttaacgatattttaaaataatttgtttttattcagattgtaacatgcttcaaatactgcttaagttattctatttataggatgaataattgcagaaaatagagcgctgcgtacagcgatactatatgatgtaatctggattatttatctctcaagaatgcttactgaaactgtggaagtagcttgcaggacagcatgcattacatagataggtaaaacgcagaatactaaaataattaaatctctggttagactaggaacttctgggaaacccaagggcgtgcacttaatacagatgtcactcatccatattccatagtctattattaaagcaattgcttcaatttatttgcgttagatagggtcaaatatattcaatgtatgctcatgcgaatgtttaattgttatctacgaaacgggttttagtcgctgacgataaataatctttaactaaatttatttttagtctgagtaaaacacaaccaagccaaaaaactcaccctgttaatttaactccattatctttcaattgaaaaacctttgccttaagttgataacaatttatttaaaaagccattcataggaccaaaagaaagtcccctaaaaattacacaaatttaaaagtgctatggttttaaacacaaaaagtataatttattaaaacgctacttacaaactaacagatataacatgatacaaaagattaacatcaatggcttggaatgagtttacaaagttataaaaataagcgtgcaatggtttagcgatcagtgaagtgctcctcgacgtcgccgctacccagtcgtggcggcaactgttctgagaagcgcagctggcgctataagttcccatccaggttctcctcggtgttctcctccacgatggcctcgtcccagggcccgtgaatgttgaacttgtactgctgctgccacacgaatatgaacgggcagacaaagttgatgaaaatggtggtggaggcgtagagatagagcaccgggcgcgatatacagtacagcgccatacagcatattgcaaatataggcaacatgaatccagcatgccaattcgcttccgtcattatgggataaaggacgaaaaagacggcagcctcgacaaggagcacgaaggcgtgatacgaagtcggcaggcgggaggctaagcaaattgctccaaatatggcggcattcaacgagacggcctgcgcttaacatggaacaagaagtatttgtattatataggattctgaggtggagtcaagatcaatatacaatcaacaccaatagccgtaaatattgcctaccttagagaccatggctacatccaatccatagtgtccaaatatcaggttgcccagaaggacaaagaaggtcattgtgtatatggtgtccgtgctgatggcctgcgttagggtgtgcagcatcggtgagaataagtagccgaagaggaccactgtgaccagggttttggaatcctcgcccagcagggcccagctgagactccttcctcggtagcacaggtatccaatgcctgtgatcccgcaactgggtaccaggatcgtggtgggcgacacgctgtcgctgagcataagttggtagagtattaggaagccggtgatgcaggagatctgattattaagcactgtaataccggcaattgcttcgccgaacgtgtatattctacaatgtagattcgtgcgcagatccttcagaaagctggcatccgtgtagttgtccggatattcccggttggagtacaggttcttcacccatggctgccgtttcgattgcccattttttaccattcttaaatttaaaaattgtttgtttacaattctattagtgctgggttatcagcgttcgatagtatcagttactatcgacatatcgatattgttttatccactgaaaagtattgaaagtaagtgctggtcacactgtcatagtgatgcatgtttcacttgaaatatcgatgatgatagtttaatttgaaatattaataaactgttcattatctaaacaaggggttttacagcaagctaataatatacaaatcttattctgaaaattatccccaagcagaagtgactcgcctacatcgataagaacatccgctggtgttgcgcaaaacagttactcgagctatcgatacttgttcgagtggttgaaccaccactaccttgaattcggaaattttttgacgcacttgtttgttttgtttacaattacgccacgaaagtaaatcggcagctacgaaaaaacattagggattcgtgcggcgggtaaacgatcagtggacagtgaagcagtccgtccggggagaacgccccatgagcagttttacaaacaaatcgccggtcgcgtgttctctcgccagagaaaccccagaatttccgagaatagctatttatggcttcgaatgcgcaactcgggaaaatcattttgatatctgcaatcgccgtgttcttctattacttcttttgggtggccgtcctcccgtttatgctcatcgatgaaggtgagttttccacggcttccgttattcacccgctaatacataagttttattgaataatctcgcgcttttgtatagtaattaaagtgacgccgcggcgtaaattggtcacgatgttcaattatatatagttggcagtgtacgaggatgaacccgtgtgttttacagaggtgaccaccctaacacgggttacctggaatgcggctgtacgatgctctaagctcgggtcaaggtcaccgacgactagtgatgataggagtacagtattcgcccgatatgtgcacagtcaa

SEQ ID NO: 2375 - DNA, 771 bp, DROSOPHILA
atggtaaaaaatgggcaatcgaaacggcagccatgggtgaagaacctgtactccaaccgggaatatccggacaactacacggatgccagctttctgaaggatctgcgcacgaatctacattgtagaatatacacgttcggcgaagcaattgccggtattacagtgcttaataatcagatctcctgcatcaccggcttcctaatactctaccaacttatgctcagcgacagcgtgtcgcccaccacgatcctggtacccagttgcgggatcacaggcattggatacctgtgctaccgaggaaggagtctcagctgggccctgctgggcgaggattccaaaaccctggtcacagtggtcctcttcggctacttattctcaccgatgctgcacaccctaacgcaggccatcagcacggacaccatatacacaatgaccttctttgtccttctgggcaacctgatatttggacactatggattggatgtagccatggtctctaaggctgccgtctttttcgtcctttatcccataatgacggaagcgaattggcatgctggattcatgttgcctatatttgcaatatgctgtatggcgctgtactgtatatcgcgcccggtgctctatctctacgcctccaccaccattttcatcaactttgtctgcccgttcatattcgtgtggcagcagcagtacaagttcaacattcacgggccctgggacgaggccatcgtggaggagaacaccgaggagaacctggatgggaacttatag

SEQ ID NO: 2376 - protein, 256 aa, DROSOPHILA
MVKNGQSKRQPWVKNLYSNREYPDNYTDASFLKDLRTNLHCRIYTFGEAIAGITVLNNQISCITGFLILYQLMLSDSVSPTTILVPSCGITGIGYLCYRGRSLSWALLGEDSKTLVTVVLFGYLFSPMLHTLTQAISTDTIYTMTFFVLLGNLIFGHYGLDVAMVSKAAVFFVLYPIMTEANWHAGFMLPIFAICCMALYCISRPVLYLYASTTIFINFVCPFIFVWQQQYKFNIHGPWDEAIVEENTEENLDGNL

SEQ ID NO: 2377 - DNA, 6144 bp, DROSOPHILA
gtgtcgaacaattttcaacaccgtaagcctgatagggattaaataataactttatgcttctgaatgcgggatgtagacaattttatgacaagtgatttaattagttagggaattaaaaaatatgagggcaacaaatcctcgaagttaaattgagttcccaaattactattacaaatggaagcttctgttttggcagggaatcgcaaacttcccacacataatttcacaatcaatgtcattgccaaaatataaacatatttacatatgtacgccgcaaatcgaaattccgttcagataagcgttgaaattacgcattttgataagatattttgaagatggaaactacgcagcaaactgttttacaaaagccggagaaatgcatttccggcgaaaaggaaattcgttactgttgccaagtgaacattttcaagagaagaggggaagggggtggtctatttcaggccccactacacacacatgcatatttctagaaacaacctgtcacacaaacgactcatcaacggcaattttttatgaatgaattttagcaattaaagcaatggaaagaaacttttcaatgggaatgcgaaaacatcaattaacttgttgcacaagatgttcagccttcgattttccccaatctcaacgataagaaactttcctcaatttcgtcacacacacacacacatgcgaatgggaaaaaacgcgtggcgattgattttcggcctttcaaaaagttcgttttacgcactgaacagcccgcgaaatgagtgtaagtcggtgtaacaaatctcatggcacttacccggatgcctctgcgttttgatcagtatctgcttttcttgcttcttatttccaaaaaatataaacttattctcaaatcaaatcttcgagaactgaccaaactaggtgtttgtaaaaatccaaggtaggtatttcgcgctttgcccatctggcaacgcccgcccatgttgtatcgcgaaacggtcactctgcacagccgcaacaaaataaaaaaggaaaaaaaggcaaattggctggaaaactggatttcgtcgggcggaaaattgtactttcgagtttcccaagcagccaattaagtgcaaactatgaaattccacgaaaaacagtaaaagccagtctctaccaaggatttgagcaggaaacttctcgctgggcgtgtgtgtgtgcagtgcgtgtgccagtgtgcgtaaagaaggaggtggagaagacgaaggagaggagagttttcgcagggaaattacgccaactttgtgggagttcaagtcgagttagttcagcgcgcgcgtgtgtgtgtgtatgcgtgtgtgcaacaccccccaagcccactcacacaaagccatccagccgccgtttgttttgtgctcacattcgcgtgccgcctttgtttggcttttctttggccagtgattctacgccttgtttttgcccgccgccggcttcgattacgcctgctccagccaccgtacgatccccactccgctctccgccgctcacgatccccattccggatccggatccagcaacaacgccgccgtggatgcccatgctcgcactctgggctcgctcgcccaggactttggcatgggcggcggctcgggggcgtgtccgcccgcccacatgtacggcgccgtagccccgcaggacagtaagtgaagttctctagaggagcagcagtcatagtgaactccttttcgagttgttattctaaaatcgatttgtggccaagtattgtggacaatcctaaatcttaccgtagcattattatttactgttgataaacttgaaactctttgaaatttaaaatgaaattggattgagctgtacagtatccgttgatctactaaaaaaactcagagctaattacccccaccatctgcagtaattgtccgggacatggtgcaaatgccgccgccgccctcgaacgcccccacatcggcggacgcctgtctgagcatcgtccactcgctgatgtgccatcggcagggcggcgaaagcgagggatttgccaagcgagccatcgagtcgctggtcaaaaagctcaaggagaagcgcgacgaactggactccttgatcacggccatcaccacgaacggagcccatcccagcaagtgcgtgaccatacagcgcaccctcgatggtcgcttgcaggtaggttgagtctctcagactttctgcatcgaatttgataatgtgtataagcaatgaacttaccactttaccattctctatcgaaggttgctggacgcaagggttttccgcacgtcatatacgcccggatttggcgctggcctgacctgcacaagaacgagctgaagcacgtcaagtactgcgccttcgccttcgatctcaagtgcgactcggtgtgcgtgaatccctaccactacgagcgcgtcgtctctccgggcatcgatctgtccggcctgagtctgcagtcgggccccagtcgcctggtgaaggacgaatactcagcgggtccgctggtgggcagcatggacatcgatggcaacgacatcggcaccatacagcaccatcccacgcaaatggtggggcccggcggctacggatatccacagggtccctctgaatatggtaagactacagtattgacattaattcgatatagtttgagttttcgatactggatttcttgataatttttctatattatttataattttaaactgaattgttcattttacttaattgtttacattcgtttatttctttggttttaataatttatttatatttgtttccttttggcgattttatgttgactttgcgtagttggcgatgccaatcccatgagtgcaatgtttcccaccgggcgcacaataccaaaaatcgagccccaggatggagttgctgggtcgcgtggctcttggatggtaccgcctcccccccggctgggtcagcccccgcagcaacaacagcagcagccgcagcagcaaaccccgcaacctacacagcagcagcaggcacaatcgcaggcagctgctcactcactccgtaaggatatggccttgattatagttgaagcttcgaaaatcgaattttaattacaatttttctcatatgttggattttaaactattataatatttgtcttattaacaattagttgaatacacattaatcttttcccaaaatcaactttcagctgtgcctcacggtatgccgggcatgcctggtccaatgaatcccggtcccgtgatggcacccccacccccgccgcagcaggctcagaatccccagggcaatggggtgcaccatacccaggccaattcgcccacagatcccgcctccgcactggccatgcaacaacagcagcagcagcagcagcagcaacaacaacagcagcagcagcaacagcagcaatcaggcggtgtgcccaatggatcagttaatgccggcggtggagcagcagctggagggcagtactatggacagccacctcctgttagtcagatgcaaggtgccggtgggggtggcacctcggtggccccgtccgtccacgcccagcaaaacggctacgtgtcgcagccaggatccgcgggcagtgctcccgttggaggtggtggcgtctttggcacagcccaacccacaccacagcagccgcagcagccaccgaccggtgtgcaggccaatactgggtctgctggggctcaggctggcgccggaggcggtgcggctggcacctggacagggcccaacaccctcacctacacgcagtctatgcaaccaccagatccgcgctctctacccgggggcttctgtaagtctaggctatgtagcccactgtgcgactttgtaatccctgtccttcattttccagggaattcgtcgctttcgggtgacctcggctccccgcaacagacgcctccgcagcagcaacaacaacagcagcaaccacgcctcctgtctcgccaaccgccgccggaatactggtgctccatcgcatacttcgagttggacacgcaagtgggcgagaccttcaaggtgccgtcagcgaaaccgaacgtaatcatcgacggctatgtggatccctctggaggcaatcgattctgtctgggcgccttgagcaatgttcatcgcactgaacaatcggaacgggccaggtgagtacatccccctgggagtaacttgcagagcagggattaattaccaagttccatgcaggctccacatcggcaagggcgtgcaattggatctgcgtggggagggcgacgtctggctgcgctgtcttagtgacaattcagttttcgtacaaagctattatctggatcgcgaggcaggacgcacacctggcgatgctgtgcacaagatttatccggccgcgtgcataaaggttggtgcaatcaagagagtttaatgtgatagcttaacatacattttctcatgcaggtgtttgacctgcgccagtgccaccagcagatgcactcgctggcgaccaatgcgcaggcagcggccgctgctcaggcggcagccgtggccggagtggccaatcagcaaatgggcggcggcggaaggagtaagtagatggaatcagtttgatttagggaaaactaatgtgttgatgcggtattccaggcatgacagcagcggctggaattggcgtggacgatctgcgccggttatgcatcctgcgcctgagcttcgtcaagggctggggacctgactacccacgccagtccatcaaagaaacgccctgctggatcgaggtgcacctgcatcgcgccctgcagctgctggacgaagtgctgcacgccatgccgatcgatggcccgcgtgccgccgcctaatccgtatttattattggcccacatctatgctaaggactcagttttagcggcagctatccgtcagctatttgcggattttgtgtttttcatttgcaattctgattacgattatgtttgcctttgattatttgataataatttttataaaaaattgaaacaacttagaagtcttaagtatgcagctgtaaagcactaagcatctagttttatgtactatacttaaatatacgcccacacaacaccggagatactgaacaagcggccaatgtttgttgtccatttcctgccacgaaaattacaaattaaaaaaaaaaaaaacgagaagcatacacagcattacaatcatccaagccacagggcgaaacaaaaagagacatcgatgcacccataaatacattcatttgatgtaaaatgcagcataaataaggcaagcgaaacaagtagatgtaacataagtgtaataaacagaccgtgaaattacgattctaaaggcttcttttcactgatagcactgcatacgcagatccacctgctggtccagccagttgatccaatctggagtgataggtcgctccagggtgacctcgtggaagatctccactcgacgcgtctccacgaacataaaactcttaaacaaatgcagcgatgcagcgttgtccatgtcgatcttgacctcgaatttatccaatttaagctggggctgcgattgggcgtacttgagcatgaggagcatggcttccctgccgaatcccttgccccgtgcataaggttcggcaatcatgatttccgcctccgccgttggtatctggctatcgggatcttggtgcaggaagagattggtgtcgcccaccatggcggcaatctcatcctgatcacgcgaataagtctctgcatccaggacaatgaaggtcagcttgtcgctgtcctccctccaactcctttgcatctcgtgctcctcttctaaggtcagttcctcggatgcggtcaactccctcagggtctcgttgctcatccactcgtggtacttgggcacgtggcgcgcttcgtagggcacaaggatgaccctgtgacccagtattttggtgttctcgtttagatgcatccttaaatttggaaaaacttaggaatattctacaatctggaaatatttgttattgtaagcttgtttacatcaatcagctgctcaagctatatagtggccacctgaatctacactgtaaggaattctctttgcgtaagcactgcaaataaggtaatatttttgaaatgaactcttaaatcgaatggagaaaagcgagtaatcaaataaagtaatatc

SEQ ID NO: 2378 - DNA, 3239 bp, DROSOPHILA
ccgcaacaaaataaaaaaggaaaaaaaggcaaattggctggaaaactggatttcgtcgggcggaaaattgtactttcgagtttcccaagcagccaattaagtgcaaactatgaaattccacgaaaaacagtaaaagccagtctctaccaaggatttgagcaggaaacttctcgctgggcgtgtgtgtgtgcagtgcgtgtgccagtgtgcgtaaagaaggaggtggagaagacgaaggagaggagagttttcgcagggaaattacgccaactttgtgggagttcaagtcgagttagttcagcgcgcgcgtgtgtgtgtgtatgcgtgtgtgcaacaccccccaagcccactcacacaaagccatccagccgccgtttgttttgtgctcacattcgcgtgccgcctttgtttggcttttctttggccagtgattctacgccttgtttttgcccgccgccggcttcgattacgcctgctccagccaccgtacgatccccactccgctctccgccgctcacgatccccattccggatccggatccagcaacaacgccgccgtggatgcccatgctcgcactctgggctcgctcgcccaggactttggcatgggcggcggctcgggggcgtgtccgcccgcccacatgtacggcgccgtagccccgcaggacataattgtccgggacatggtgcaaatgccgccgccgccctcgaacgcccccacatcggcggacgcctgtctgagcatcgtccactcgctgatgtgccatcggcagggcggcgaaagcgagggatttgccaagcgagccatcgagtcgctggtcaaaaagctcaaggagaagcgcgacgaactggactccttgatcacggccatcaccacgaacggagcccatcccagcaagtgcgtgaccatacagcgcaccctcgatggtcgcttgcaggttgctggacgcaagggttttccgcacgtcatatacgcccggatttggcgctggcctgacctgcacaagaacgagctgaagcacgtcaagtactgcgccttcgccttcgatctcaagtgcgactcggtgtgcgtgaatccctaccactacgagcgcgtcgtctctccgggcatcgatctgtccggcctgagtctgcagtcgggccccagtcgcctggtgaaggacgaatactcagcgggtccgctggtgggcagcatggacatcgatggcaacgacatcggcaccatacagcaccatcccacgcaaatggtggggcccggcggctacggatatccacagggtccctctgaatatgttggcgatgccaatcccatgagtgcaatgtttcccaccgggcgcacaataccaaaaatcgagccccaggatggagttgctgggtcgcgtggctcttggatggtaccgcctcccccccggctgggtcagcccccgcagcaacaacagcagcagccgcagcagcaaaccccgcaacctacacagcagcagcaggcacaatcgcaggcagctgctcactcactccctgtgcctcacggtatgccgggcatgcctggtccaatgaatcccggtcccgtgatggcacccccacccccgccgcagcaggctcagaatccccagggcaatggggtgcaccatacccaggccaattcgcccacagatcccgcctccgcactggccatgcaacaacagcagcagcagcagcagcagcaacaacaacagcagcagcagcaacagcagcaatcaggcggtgtgcccaatggatcagttaatgccggcggtggagcagcagctggagggcagtactatggacagccacctcctgttagtcagatgcaaggtgccggtgggggtggcacctcggtggccccgtccgtccacgcccagcaaaacggctacgtgtcgcagccaggatccgcgggcagtgctcccgttggaggtggtggcgtctttggcacagcccaacccacaccacagcagccgcagcagccaccgaccggtgtgcaggccaatactgggtctgctggggctcaggctggcgccggaggcggtgcggctggcacctggacagggcccaacaccctcacctacacgcagtctatgcaaccaccagatccgcgctctctacccgggggcttctggaattcgtcgctttcgggtgacctcggctccccgcaacagacgcctccgcagcagcaacaacaacagcagcaaccacgcctcctgtctcgccaaccgccgccggaatactggtgctccatcgcatacttcgagttggacacgcaagtgggcgagaccttcaaggtgccgtcagcgaaaccgaacgtaatcatcgacggctatgtggatccctctggaggcaatcgattctgtctgggcgccttgagcaatgttcatcgcactgaacaatcggaacgggccaggctccacatcggcaagggcgtgcaattggatctgcgtggggagggcgacgtctggctgcgctgtcttagtgacaattcagttttcgtacaaagctattatctggatcgcgaggcaggacgcacacctggcgatgctgtgcacaagatttatccggccgcgtgcataaaggtgtttgacctgcgccagtgccaccagcagatgcactcgctggcgaccaatgcgcaggcagcggccgctgctcaggcggcagccgtggccggagtggccaatcagcaaatgggcggcggcggaaggagcatgacagcagcggctggaattggcgtggacgatctgcgccggttatgcatcctgcgcctgagcttcgtcaagggctggggacctgactacccacgccagtccatcaaagaaacgccctgctggatcgaggtgcacctgcatcgcgccctgcagctgctggacgaagtgctgcacgccatgccgatcgatggcccgcgtgccgccgcctaatccgtatttattattggcccacatctatgctaaggactcagttttagcggcagctatccgtcagctatttgcggattttgtgtttttcatttgcaattctgattacgattatgtttgcctttgattatttgataataatttttataaaaaattgaaacaacttagaagtcttaagtatgcagctgtaaagcactaagcatctagttttatgtactatacttaaatatacgcccacacaacaccggagatactgaacaagcggccaatgtttgttgtccatttcctgccacgaaaattacaaattaaaaaaaaaaaaaa

SEQ ID NO: 2379 - protein, 771 aa, DROSOPHILA
MGGGSGACPPAHMYGAVAPQDIIVRDMVQMPPPPSNAPTSADACLSIVHSLMCHRQGGESEGFAKRAIESLVKKLKEKRDELDSLITAITTNGAHPSKCVTIQRTLDGRLQVAGRKGFPHVIYARIWRWPDLHKNELKHVKYCAFAFDLKCDSVCVNPYHYERVVSPGIDLSGLSLQSGPSRLVKDEYSAGPLVGSMDIDGNDIGTIQHHPTQMVGPGGYGYPQGPSEYVGDANPMSAMFPTGRTIPKIEPQDGVAGSRGSWMVPPPPRLGQPPQQQQQQPQQQTPQPTQQQQAQSQAAAHSLPVPHGMPGMPGPMNPGPVMAPPPPPQQAQNPQGNGVHHTQANSPTDPASALAMQQQQQQQQQQQQQQQQQQQQSGGVPNGSVNAGGGAAAGGQYYGQPPPVSQMQGAGGGGTSVAPSVHAQQNGYVSQPGSAGSAPVGGGGVFGTAQPTPQQPQQPPTGVQANTGSAGAQAGAGGGAAGTWTGPNTLTYTQSMQPPDPRSLPGGFWNSSLSGDLGSPQQTPPQQQQQQQQPRLLSRQPPPEYWCSIAYFELDTQVGETFKVPSAKPNVIIDGYVDPSGGNRFCLGALSNVHRTEQSERARLHIGKGVQLDLRGEGDVWLRCLSDNSVFVQSYYLDREAGRTPGDAVHKIYPAACIKVFDLRQCHQQMHSLATNAQAAAAAQAAAVAGVANQQMGGGGRSMTAAAGIGVDDLRRLCILRLSFVKGWGPDYPRQSIKETPCWIEVHLHRALQLLDEVLHAMPIDGPRAAA

SEQ ID NO: 2380 - DNA, 2711 bp, DROSOPHILA
cttttttattttggggccgccgacgtcttgctcttcagcaaccaccatccaccgtccagatattcgagattcgagcatccagtatccagcatccgcgacgagacaataatgatcttcgctggaaacgcgagccccttcaccgccaaagtcccccattccccctgcaaaaagatcctgctcgccggtggtgatgatggtgacttaattgccgcacccaaatggctgagctggactagggattagcacgaaaagtattcgattctccagagccgcattggtggctctccagggtatgtagtcaagtgaaaatagtgttgcttgagtgtaaggtgcgggaattgaaagatttctgtggaaaaacatcgaacttaaagccgcattcgaagcacttaattatcagtgtttttgctttctttgagcaaaaccagtttcaagccaagtaccaactcagatcgaaatgcagatggtagaacgggccaagccctatgatccttgtgacatttgctcatttttcactgtcgcaactcgctagccgataaagtggagcacattgtactagcctctgattaatatgagttgtggcctgatatcgctgcagccttggccgaagtcgtttactcagtgaatcacttggccttccactttttccaattctggcacatgactaagcagacccttggggcatgactaaaccgaagacagtggaagatgttgctacaccttgctgtagatcacttgcgcagcaaaatataaatcttaatgaaacataaaggattccaaatactgttgtttgataacaacccgtgagacatagaaaattgcgctgtgtagagatctctaaatgactatcaaagaataaatttcaaaaatcacaagcacacattgacctttgatcaatgtgcaaaatgataagtcaatgtgattcagtgctttaaaatttaacaaataaatgaatagaacccaaaaaaagaaaaaaaaaaaacaaacaaccaacatcatctcactgagcaaaactttcgaagcgagtgcaacgtttgagcatcgatcgcacatccttcatgaatcgcagggcgtccagaaaaggtaacaaattgatgagggcctcgtcgcgacagccgatttcataggacttgatgagaatggcgttttccgcattgaaactgcactccgtgctggagttgtccagcagcacaacattggacaaatccgggcaggccagcagtacggacttggaccactttccaaactgttctatgcaatgctgccggtagaggcgactgtttaggatgccacgtcccctgtccagaaagtcgagaatcggagaggcatatatctcggctccggatgtgaagacagtcaggtcgtaccacttggatacgcgatcgaggaagtgatccaaataggggcgcttgtagacatagatggtggctccataggccggcaagtagaacttaaagtcatgcgcaattcgtggtatattcttcggtttttttcccctctttataaaccacgacgtgatcatggtgttatccatgtccaggacaagtgtcttcctggccacgagactcagtcggcttttggaaacgggcgacaggcgatcctcacttaagtaaatgatgggagtgtactccacgaaaaccctataaaccttctccagaaagaaccacaatcggggaatcaccacacaggcgatgcccatcatcagacccattgtggccaatccaaaaacgctgcataaatgcgttaggtggattggtaattggtaagaattaaaagtggtgcattggttttacttactaaattataaggaactcacttttaagctgcatcacatgattttaagaacaatatgtatgcaaaattaattagaatagaaaagagtggaaaaaacgataatactaaaatttcaataagtagtaacagaaatggtaaaacgagagacaattattgtagggagtttgattattgaatgagccccaccccttgacaacagagtcgaagtcgattgctacctgattgattgcacactgaaaaaaagtctggggaaagtcgaggagatgttgcctaccattataatgctataaagccaatgatgatgatataaaactctatatgcatgtgttcgtgaataaatcccatagataaaaatcgaactctcaatgaaatcttctttcacgattagtcaggaattttcctcaatacttatgtacttaaaagttatagatacataaaatagttatgtaccacaatctagttcgtttaataatcgtatttgccccgaaaattgcgtatacgacatggggagcggcgcacgcgaagtgggattaagaatgtcattaatcaatttcactgcgacgaatataattttcttcctgtttggatgttattaatcaagtcattgtcgataccatataattttctggccgtgtggatattccaagaacatgcccggcctgcagttccacttgcagtgggtgttaaacgatcgggatgtgcgtgtgtgtgtgtgttgggggagtagcgatataaacagccgtgaaatgcagtgccagcgctgacgcacaaagacgaggatcgggatcgggttcggggcatatatgctatgtatgtatgcaatatatatgctatatgaggagcagccacagcactggcggaagttcgcccggcgatgtcactcgtgtaaaatatggcactggccttgggagcagcac

SEQ ID NO: 2381 - DNA, 711 bp, DROSOPHILA
atgggtctgatgatgggcatcgcctgtgtggtgattccccgattgtggttctttctggagaaggtttatagggttttcgtggagtacactcccatcatttacttaagtgaggatcgcctgtcgcccgtttccaaaagccgactgagtctcgtggccaggaagacacttgtcctggacatggataacaccatgatcacgtcgtggtttataaagaggggaaaaaaaccgaagaatataccacgaattgcgcatgactttaagttctacttgccggcctatggagccaccatctatgtctacaagcgcccctatttggatcacttcctcgatcgcgtatccaagtggtacgacctgactgtcttcacatccggagccgagatatatgcctctccgattctcgactttctggacaggggacgtggcatcctaaacagtcgcctctaccggcagcattgcatagaacagtttggaaagtggtccaagtccgtactgctggcctgcccggatttgtccaatgttgtgctgctggacaactccagcacggagtgcagtttcaatgcggaaaacgccattctcatcaagtcctatgaaatcggctgtcgcgacgaggccctcatcaatttgttaccttttctggacgccctgcgattcatgaaggatgtgcgatcgatgctcaaacgttgcactcgcttcgaaagttttgctcagtga

SEQ ID NO: 2382 - protein, 236 aa, DROSOPHILA
MGLMMGIACVVIPRLWFFLEKVYRVFVEYTPIIYLSEDRLSPVSKSRLSLVARKTLVLDMDNTMITSWFIKRGKKPKNIPRIAHDFKFYLPAYGATIYVYKRPYLDHFLDRVSKWYDLTVFTSGAEIYASPILDFLDRGRGILNSRLYRQHCIEQFGKWSKSVLLACPDLSNVVLLDNSSTECSFNAENAILIKSYEIGCRDEALINLLPFLDALRFMKDVRSMLKRCTRFESFAQ

SEQ ID NO: 2383 - DNA, 7040 bp, DROSOPHILA
acacaatttttgaattgtttagaaaaataagaacgatctattaaatggcataattcaaaaatatcaagtttaagccatatacatgtataagttacttttaagtttgaccagtacaaagtatataggaatttataatggggaagccaagctatattataatgaataattattattattataatgaataatatcaagatatcagggttgtgcttgcaccacaattatgaaaaataaagtaatgacccagaagtctgttatcatctatttataagcagtttgaaacaaattaaaacccactttaaattttatcaaataaatatattaccaatatacatttaaatttcgaacattacatagcaaaaaaatgtcaattgaaatcaacaaatttttgaaaatgcgagccatattttcattaaacgagcttgtattttttgaacccgaaccgttttttttttcaagtttaaaaagaattaactaactctaacaaaatctaatatttcagtcggtgtagtaaaaacataaacataaacgatttcaaatgtatcctgaatacgcggtaaacttgtgtttaccaacaccgcctcttagactattcaggcctgccagatctccaaaaaaatattatttagataagttagtgacacaaaaggtttaagtcttaactgcgcttagctgggctttaaacccactgcctattctttgctaattggagtattgcaaatcagttttgaatctgatttatttgtcccgcttaccaattttaattgtgtaaattcatttggttttacttggccaacttacaaataatagaataataaaaatgaaagccgtctgtttaattattaaaataatgtgaattaattggattattaatctgggcgttattatatagaaaagaaacctaactaaccaattgcggaaatatcgatagcatcgcaataaaatctatattgtgccacctccaattcacacaggtcggtcacactgggcaggcttgccaatttcaagagccgcggccacactactgcgaattctatactgcaactcgatcgtgcgtgttctgtatttttgggagtgcgttgttagaaattcggccacaaatagaatccgctgtcctggaacgagtcagaaaccacgggaaattgacttccggactaaatagcgttcttgtgtgtccatccgtgtgcgtgtgtccgcattctgcagtgtgcgtgtgtgcgaaagagagagggcgagcggtgcagccgcaactgggaaattcgattgccaatatttcagcaaggaagctatgtcgagcggtcagcaattgatggccgattcgccagcctgcagctcaagtgaccattcgccgctggccaaaaaaaggcgtttagagttgttgggtgacggagtgggggcaatgggaatggaagaggaagaagccggcggagcaacgagcagcagtagcagcaacaactacgaaaatcacgacaaagcaggcggcgttgacatttcgggcaagtgccagagcaagacgactagcgagcaccagctggaattgtgcgtatcgtcgtctacctctgacacatgcggcgttaatgctgcggcgaagcgagccgaaaagcagaaactgaaacagagccaaggaagcggcgacgacgttagtacctcgtcagcagtggaaaaggaaggaagcaagcggccggagaagcgcaattacctgaacaccaccacaatagaatcgcaagaagcctcctccagtgcatccgccactagcaacagcaacaacaacgtcagctccagcaacaataacagtaataacagcactaataaccgacaactggaaggaagcagcaacatggctggaaacagtgccgccgccggcggagatatcgatgaatcgctgtactcgcgccaattgtacgtcctgggtcacgatgcgatgcgtcggatggccaattcggatatccttctgtcgggacttggaggactcggcctggagatagccaagaatgtgattctgggcggcgtgaaatcgatcaccttgcatgacacagcaacttgtggggtatgtgtgtggggcgaagaaaaaatcgataattttccaggcggacgcgggaaatgcccggaaaggctgacttggcatccctggtcttagtgaatcattcagtttttatttgatttatttatcatagacttcgcgcgaaataaggttaggttaacatctctatttgcttgcaaaaaattcgttttgtgtgtgtaattcggttttccttctttttctatttgcctcaaaatgtctgcgccatgcgaaaagtgtgtgagcgggacaaccgtatgcgcatcgctcgctgccgttgtgtttgcattcccctttgctcaacgcattcggttttgttttatgcactgaaagattcaacttaagatctatgagtttctcataaaccgtaatatatcaattatttagttaatagcctttcaatttaaagttttcttgtatcataaaaacttttttgttctaatgacaaatatgtctttgctgtacactcggcacagaaccaattttcctttgttagtcatggctcccgtctgctaatttcatcaccgttgatatataatattaatgattattcgtttgtcttgcagctccatgacttgtcgtcgcaattctatctcacggaagccgatatcggcaagaatcgtgcggaggcctcttgcgcccagttggccgagttaaacaactatgtgcgcaccgtttcgcacacggggccgcttaccgaggagttcctgcgcaagtttcgcgttgtggtactgaccaactccgacggggaggagcagcagaggatcgccaagtttgcccatgaaaatggcattgctctgatcatcgccgagacgcgcggactgttcgccaaggtgttctgtgactttggcgagagctttaccatttacgatcaggatggcacacagccgatctccaccatgatagctagtatcacgcacgacgcacagggagtcgtcacctgcctggacgagacgcgccatggttttaatgacggtgactacgtcaccttctcggaggtgcagggcatgcaggaactgaacggttgtcagccccttaagatcacagtgctgggaccctacacatttagcatcggtgataccagcaagtttggagaatataagagcggaggagtggccacccaggtgaagatgcccaagaccatcagcttcaagcccctggcacaggccactgaggagccggagtttttgatctccgatttcgcaaagctggactcgccggccacgctgcacgtggccttcaatgccctctcctgctaccgcaaggcccataatggagccttaccgcgtccctggaacgaggaggacgccaacagcttcctcgaggtagtccgagccagcagcaacgcggaagtcgacgaaaaactggtgctgcaattcgccaaaatctgctcgggtaatacgtgcccgctggacgcggccgttggtggaattgtggcccaggaggtgcttaaggcctgcagtggaaagtttacacccatctaccagtggttgtactttgacgccctggagtgtctgcccacagagggtgtcgaggaggcggatgcccagccggtgggctcgcgctatgattctcagattgccatatttggcaagaagttccaggagaagttggctgactcgaaatggtttattgtcggcgccggagccattggttgtgagctattgaaaaactttggaatgctgggcctgggaactggcaatggccagattttcgtcacagacatggatctcattgagaagtcgaatctgaaccggcagttcctgttccgcccgcatgatgtgcagaagcctaaatcaatgacggccgccgacgctatcaaacggatgaatccggaagtgaatgtcaccgcatacgagttgcgcgttggcgccgaaacagagaaagtcttttccgaagatttctttggaaagttggatggtgtagccaatgcgctggacaacgtggatgctcgcatatatatggatcgcaaatgcatcttcaaccgcattccgctcgtcgagaccggaactctgggaactttgggcaacgttcaggtgattgtgccctttgccaccgaatcttatagctcctcccaggatcccccagaaaagagtattcccatctgcacgctgaagaacttccccaatgccatcgagcacactctgcagtgggcgcgtgacgcctttgagggcgtcttcaagcagtctgcagaaaatgctgctcagtacatcgccgatcctcagttcaccgagcgaatcgccaagctgcctggtattcagcctctggagatcctcgattccatcaaggtaaggatagaatttacttctttgcctaatatgttgtacttaatggtaatttatttttacagaaagctctgatcgacgacaaacccaagagtttcgcgcactgcgtggagtgggcccgtctttattgggaggatcaatatgttaaccagattaagcagttgctctttaacttcccacctgatcagatcacctccagtggtcagccgttttggtctggtcccaagcggtgccccgatcccctggtctttgatgtcaacgatcccatgcacctcgactttatctacgcagccgccaatcttcgagctgaggtctatggcattgagcaggttcgcaatcgcgagacgatcgcagagctggtacagaaggttaaggttagttgttcgagattaataccgtcggggaccatttctgatattattgatttataggtgcccgagtttaaaccccgttcgggcgtgaaaatagaaaccaatgaggcagcagccgccgcctcggccaataacttcgatgacggcgagttggaccaggatcgcgttgacaagatcatttcagagctgctaaagaacgccgacaaaagctccaagatcacgccacttgagtttgaaaaggacgacgacagtaacttgcacatggacttcattgtggcctgctcaaatctacgcgccgccaactacaagattccgccagcggatcgccacaagtccaagttgattgctggcaaaatcatacctgctattgccaccaccacgtcggtgctctctggattggctgtgctcgaggtgattaagctgatcgtcggccaccgggatctcgtaaaattcaagaacggcttcgccaacttggcattgccgttcatggccttctctgagccgcttcctgccgccaagaacacatactacggcaaggagtggacgctgtgggaccgttttgaggtgaccggggagctgtcgctgcaggaattcctcaactatttcgaggagaatgagaagcttaagatcaccatgctctcgcagggcgtgtccatgctgtactcgttcttcatgcccaaggccaagtgctctgagagactgccgttgccgatgtcggaggtcgtgcgtcgcgtgtccaagcgtcgcctggagccacacgagcgatccctggttttcgagatctgctgcaacgatgtggatggcgaggatgtggaggtgccctacgtccgttacacgctgccctaagcccgtctatattcctaatttaaccattaaattattttacgatcccgttttgttgtcggcgacgcgttttggaatcgcgcagctccaacgaaggagttactgtctagctgtttgcattttaattttcacaacaccattacgagagcagcccagatctagaaattatataaaatgtgtgtgaatcctctaaggaatggcaaaataatacgcatcatacgaaatacaaagactcgactaaaagcaacacttaaaatgcatctgatgaaactctctgctcagcatagttgtaaaggtaacgaattacgaaaaaccgaaggcggattttaatcgcattgattaattggaaattgaaaactgaatgagccaggcggaaaatttctcttcactcatatattttttttatatggaagcataaactaattacgtcattgtattaaaaggagtaaagcaaatgaataaagctgtatatttcatatggtaatcgacctgctagacgactcagataatttcgttcagcacttgacgtctggtaatctcatttcccccgccacttcggaaattaaaattgtaatgcatactgctctgccagtgaagtatataggggatgccatctatccgtacgccagtcagtttcagaaagttacgtgacacaattaaatattttatgccctctcaagacgtttataccacccccgccccgcacccaaggaggctgctgccaccaaagtgcaattggcaagtgccgtaaagttgcaccgctcatggaaagcgttgggcggagtggcggcgtcctcttataattaaatattacacgcaatgcaactgaagtatggccaaagttatgcagtttcgcatctcactcttggccttttgcggctttttggcaaacttgcttgaattatgcagttaatgaaaacaaagcgaggcgaggaaagtggctgcgccgatcagctttgtatccgtcgaataagtgtgttctgggcagggtaatcaaagttttgggtttgtagttcgactccttagggctctgattgttagcatctaagtatttaagatttacatataagatcgtcttattacttagagcttactttaaaaagatgagtgaacaaactatttacaaggcaaagtggaaatgctgggtcagaattaagattaatacctatctaaatttgaggtgaaagtaggtgactaagttttcaaatagagctgggaaaattagagatacattacaggagtaccacaagagatttagaatatgaatattcctgttctaacaccacattacagtacatttttatgttttttaagattagtttctcaaaaatgaacagacaattttgttttatgaaaagagtaatccaaatattattccatattattcatttcgttctattggttttgttaagctggacttctgaatcactgaaatgtaaagacttacatgtacatttttcgatcgtacattcatatgtgcat

SEQ ID NO: 2384 - DNA, 4343 bp, DROSOPHILA
atttcaagagccgcggccacactactgcgaattctatactgcaactcgatcgtgcgtgttctgtatttttgggagtgcgttgttagaaattcggccacaaatagaatccgctgtcctggaacgagtcagaaaccacgggaaattgacttccggactaaatagcgttcttgtgtgtccatccgtgtgcgtgtgtccgcattctgcagtgtgcgtgtgtgcgaaagagagagggcgagcggtgcagccgcaactgggaaattcgattgccaatatttcagcaaggaagctatgtcgagcggtcagcaattgatggccgattcgccagcctgcagctcaagtgaccattcgccgctggccaaaaaaaggcgtttagagttgttgggtgacggagtgggggcaatgggaatggaagaggaagaagccggcggagcaacgagcagcagtagcagcaacaactacgaaaatcacgacaaagcaggcggcgttgacatttcgggcaagtgccagagcaagacgactagcgagcaccagctggaattgtgcgtatcgtcgtctacctctgacacatgcggcgttaatgctgcggcgaagcgagccgaaaagcagaaactgaaacagagccaaggaagcggcgacgacgttagtacctcgtcagcagtggaaaaggaaggaagcaagcggccggagaagcgcaattacctgaacaccaccacaatagaatcgcaagaagcctcctccagtgcatccgccactagcaacagcaacaacaacgtcagctccagcaacaataacagtaataacagcactaataaccgacaactggaaggaagcagcaacatggctggaaacagtgccgccgccggcggagatatcgatgaatcgctgtactcgcgccaattgtacgtcctgggtcacgatgcgatgcgtcggatggccaattcggatatccttctgtcgggacttggaggactcggcctggagatagccaagaatgtgattctgggcggcgtgaaatcgatcaccttgcatgacacagcaacttgtgggctccatgacttgtcgtcgcaattctatctcacggaagccgatatcggcaagaatcgtgcggaggcctcttgcgcccagttggccgagttaaacaactatgtgcgcaccgtttcgcacacggggccgcttaccgaggagttcctgcgcaagtttcgcgttgtggtactgaccaactccgacggggaggagcagcagaggatcgccaagtttgcccatgaaaatggcattgctctgatcatcgccgagacgcgcggactgttcgccaaggtgttctgtgactttggcgagagctttaccatttacgatcaggatggcacacagccgatctccaccatgatagctagtatcacgcacgacgcacagggagtcgtcacctgcctggacgagacgcgccatggttttaatgacggtgactacgtcaccttctcggaggtgcagggcatgcaggaactgaacggttgtcagccccttaagatcacagtgctgggaccctacacatttagcatcggtgataccagcaagtttggagaatataagagcggaggagtggccacccaggtgaagatgcccaagaccatcagcttcaagcccctggcacaggccactgaggagccggagtttttgatctccgatttcgcaaagctggactcgccggccacgctgcacgtggccttcaatgccctctcctgctaccgcaaggcccataatggagccttaccgcgtccctggaacgaggaggacgccaacagcttcctcgaggtagtccgagccagcagcaacgcggaagtcgacgaaaaactggtgctgcaattcgccaaaatctgctcgggtaatacgtgcccgctggacgcggccgttggtggaattgtggcccaggaggtgcttaaggcctgcagtggaaagtttacacccatctaccagtggttgtactttgacgccctggagtgtctgcccacagagggtgtcgaggaggcggatgcccagccggtgggctcgcgctatgattctcagattgccatatttggcaagaagttccaggagaagttggctgactcgaaatggtttattgtcggcgccggagccattggttgtgagctattgaaaaactttggaatgctgggcctgggaactggcaatggccagattttcgtcacagacatggatctcattgagaagtcgaatctgaaccggcagttcctgttccgcccgcatgatgtgcagaagcctaaatcaatgacggccgccgacgctatcaaacggatgaatccggaagtgaatgtcaccgcatacgagttgcgcgttggcgccgaaacagagaaagtcttttccgaagatttctttggaaagttggatggtgtagccaatgcgctggacaacgtggatgctcgcatatatatggatcgcaaatgcatcttcaaccgcattccgctcgtcgagaccggaactctgggaactttgggcaacgttcaggtgattgtgccctttgccaccgaatcttatagctcctcccaggatcccccagaaaagagtattcccatctgcacgctgaagaacttccccaatgccatcgagcacactctgcagtgggcgcgtgacgcctttgagggcgtcttcaagcagtctgcagaaaatgctgctcagtacatcgccgatcctcagttcaccgagcgaatcgccaagctgcctggtattcagcctctggagatcctcgattccatcaagaaagctctgatcgacgacaaacccaagagtttcgcgcactgcgtggagtgggcccgtctttattgggaggatcaatatgttaaccagattaagcagttgctctttaacttcccacctgatcagatcacctccagtggtcagccgttttggtctggtcccaagcggtgccccgatcccctggtctttgatgtcaacgatcccatgcacctcgactttatctacgcagccgccaatcttcgagctgaggtctatggcattgagcaggttcgcaatcgcgagacgatcgcagagctggtacagaaggttaaggtgcccgagtttaaaccccgttcgggcgtgaaaatagaaaccaatgaggcagcagccgccgcctcggccaataacttcgatgacggcgagttggaccaggatcgcgttgacaagatcatttcagagctgctaaagaacgccgacaaaagctccaagatcacgccacttgagtttgaaaaggacgacgacagtaacttgcacatggacttcattgtggcctgctcaaatctacgcgccgccaactacaagattccgccagcggatcgccacaagtccaagttgattgctggcaaaatcatacctgctattgccaccaccacgtcggtgctctctggattggctgtgctcgaggtgattaagctgatcgtcggccaccgggatctcgtaaaattcaagaacggcttcgccaacttggcattgccgttcatggccttctctgagccgcttcctgccgccaagaacacatactacggcaaggagtggacgctgtgggaccgttttgaggtgaccggggagctgtcgctgcaggaattcctcaactatttcgaggagaatgagaagcttaagatcaccatgctctcgcagggcgtgtccatgctgtactcgttcttcatgcccaaggccaagtgctctgagagactgccgttgccgatgtcggaggtcgtgcgtcgcgtgtccaagcgtcgcctggagccacacgagcgatccctggttttcgagatctgctgcaacgatgtggatggcgaggatgtggaggtgccctacgtccgttacacgctgccctaagcccgtctatattcctaatttaaccattaaattattttacgatcccgttttgttgtcggcgacgcgttttggaatcgcgcagctccaacgaaggagttactgtctagctgtttgcattttaattttcacaacaccattacgagagcagcccagatctagaaattatataaaatgtgtgtgaatcctctaaggaatggcaaaataatacgcatcatacgaaatacaaagactcgactaaaagcaacacttaaaatgcatctgatgaaactctctgctcagcatagttgtaaaggtaacgaattacgaaaaaccgaaggcggattttaatcgcattgattaattggaaattgaaaactgaatgagccaggcggaaaatttctcttcactcatatattttttttatatggaagcataaactaattacgtcattgtattaaaaggagtaaagcaaatgaataaagctgtatatttcatatggt

SEQ ID NO: 2385 - protein, 1008 aa, DROSOPHILA
MAGNSAAAGGDIDESLYSRQLYVLGHDAMRRMANSDILLSGLGGLGLEIAKNVILGGVKSITLHDTATCGLHDLSSQFYLTEADIGKNRAEASCAQLAELNNYVRTVSHTGPLTEEFLRKFRVVVLTNSDGEEQQRIAKFAHENGIALIIAETRGLFAKVFCDFGESFTIYDQDGTQPISTMIASITHDAQGVVTCLDETRHGFNDGDYVTFSEVQGMQELNGCQPLKITVLGPYTFSIGDTSKFGEYKSGGVATQVKMPKTISFKPLAQATEEPEFLISDFAKLDSPATLHVAFNALSCYRKAHNGALPRPWNEEDANSFLEVVRASSNAEVDEKLVLQFAKICSGNTCPLDAAVGGIVAQEVLKACSGKFTPIYQWLYFDALECLPTEGVEEADAQPVGSRYDSQIAIFGKKFQEKLADSKWFIVGAGAIGCELLKNFGMLGLGTGNGQIFVTDMDLIEKSNLNRQFLFRPHDVQKPKSMTAADAIKRMNPEVNVTAYELRVGAETEKVFSEDFFGKLDGVANALDNVDARIYMDRKCIFNRIPLVETGTLGTLGNVQVIVPFATESYSSSQDPPEKSIPICTLKNFPNAIEHTLQWARDAFEGVFKQSAENAAQYIADPQFTERIAKLPGIQPLEILDSIKKALIDDKPKSFAHCVEWARLYWEDQYVNQIKQLLFNFPPDQITSSGQPFWSGPKRCPDPLVFDVNDPMHLDFIYAAANLRAEVYGIEQVRNRETIAELVQKVKVPEFKPRSGVKIETNEAAAAASANNFDDGELDQDRVDKIISELLKNADKSSKITPLEFEKDDDSNLHMDFIVACSNLRAANYKIPPADRHKSKLIAGKIIPAIATTTSVLSGLAVLEVIKLIVGHRDLVKFKNGFANLALPFMAFSEPLPAAKNTYYGKEWTLWDRFEVTGELSLQEFLNYFEENEKLKITMLSQGVSMLYSFFMPKAKCSERLPLPMSEVVRRVSKRRLEPHERSLVFEICCNDVDGEDVEVPYVRYTLP

SEQ ID NO: 2386 - DNA, 3760 bp, DROSOPHILA
ctgtttggccttgctgaagaacaagtccgtggacacggaaggtagtgcactgaaagtactcgataagccaatgctggatgtttacttcttgccgcacgatctgcagcgcttggagagctacgcccgccagcagtccgagtttcgtctaatcatcgatctgctcacggacattgcccagctgtattttcagggcaggatcgatggtctgcagcttgacctggtgcagcagggcatccttttggctctgggcgtgcagggcaagactgtggatgcgttgggtctggagctgaatatgccgggtaaccagttgttggcgaaatttttcgatgccatgaaacggtgcaatcagtgcttccggtcggtactggaggagcatatcgaaggcggcatgctgcgggaggcggatctgtccaagggcgaggaactgcaaccgctgactctgtccctcgacaaggagctggatcaaaccgctcagaagctgagcaagcagcagcgcaaggagctgaagcgcctgaaggccgagcagctggacgaattccaaatcaagggcaccgaagaggattggtccaaggcgctggaaacaaacggaacaggcggtggcagcgggctgctctccgtcaagaggtaggtgcgcctattttttttaataatgtgcttaatacataaccacgtttatttatttgtctccagtttcgttttattataaacatcactcagttaaaaaaaatataacttatttcgtatttgcctctctttcgtttcagtggcgtaaagcgactggatggaccaatcgagacgcgtgaggatggcgacctggcagctccgctgtccaagaagaaaaagaagaacaatccgaaacagagacgcagtcagggcaagtccctgatctagagttcataatttttttcgtttggggggaaaaagaatgtggattttaattctatagaaaagtacatattgttgtaagctccgttaaaaataaagagacctaataactgaactatatcttgatattggcagtagccttggctgcagcggcggccgccctgcgccgttccttgaggtcattatagctaacgcccggctccttgtgggagttgcgctcgaagcgcttgaccttggacttcttgcggctgacgagctttgtcgtgggcaacatattgttgcgttgcagcgtgtggaagcggtccttcagcagactgctctcagtcttcacgttgcgcagatttccggcgatatcctcgggcagatttacgtctaggtctggctcctcgaacttgtgacgccccaggcgtttcggctcaaacttggccttctcggcgcgctgcttgcggcgcttctttagatcattcaggtcctcctcctcatcgtctagctcgtggcgaatcgatttgatgctgaatgaagaaacacaatagagattagagatggaccacaacgccatcagttagaaacttaccgtatcaggtcagccgtctgttgcttgagcttcctcttgagctctgtttgacgcgccagctccttttgcttgagctcgttgcggcgagcctgcttgctcttctttttgttctccacgggagcgttgattgtgtgatatggcttttcatcatcgtcctcctttttcttcccattcgtttggacatcctcatcgagctcactaccctcctcctcgtccatgccttggctcatttcatttaggcgacgacgatctctctcctcgggcgtcaccttggagaacatgctggtggtcacgcgcttaaggtgctgttccttcttaatgatgccctcctcgcgttccaccacctgatcaataagcgcctgatgatcctcgggtgcgggattgtagctcatgcccggatgcgggagttcgaatttcctaaaagacatattacaatcaataataacccgactgcttaaggcccagcaaagtgtgctcacttggctttggtggttttgtggtgcagactagcgtgagttttcaccaccttcttgccaatatttccagctgtgtgcagtgccagttcgcgactgatccaacccttctcgtccttgagtccaggaatctcgtcgcgaaaatccacctcctgccagatgtccttctcgacatcaagcttcttgttcttcttgtcggccagacgctgttccagttttacgtagtactgagctcgatcgctgttggcctggcgatggcgcggcttggttggattgcacacctccagctcgatgttacgtccgttcttcttctggcgcacatggttgctgcagggatttcaagataaatgagatcgcctgtcagggatatgctgcaaactcaccgcttggcaatgggatcttggactttggatgtgttctccaaagcctggtaactgcgcatgggcttcttggcattcagcttccgcttttgcttcacactcagaacggtggccttggtcttcgggaggctggagtccacaacgaacagatcctcatcctgtttatccgcgaacgttctgtaataagcgcagtacgcaaatgaatgattccggatggccacattgtttacccgctaactcacccaacgcgctcctcctggcgctgatcttcgaggaactgctcgacatcctggatgtctgttttgcgccatgccgatttgttcttcttcgagatgcgcttcttctttgtcgctggctctacggccgtcatttctccggattatttggaaattatcaaagtacaaaaaacaaatgttgagcggcacacgtgcaatctgcacaggctttccagcacgtttggcgtcgtttgccaacactggcagctagttgctgtcagctgcttagagatggcaaaaatcaagtgtgctaagctacaaaactagagttggaactctatatataaatatgaattaaactattactatatgcatttggttttaatagcttggattaatttctatcaatggagcaacaggaaagtagcttaaaagcgacgctagctctttaccagctggaaactggcttgcgcatctctaaccctgccttcactcggattcaaaacacctgtgtgcgtgcatgtgcctacatttgtgtgcgtgaccaactgagctgctgctgctgtgcattgtaattcatttcgaatttatagccacccgcgatccgaatcaaaatcagtagcacttgcgacgagctggcggtcaaaagggcaaaaccataaacgtcaccgaaaactcacgcacgtgtgtaaagtgtgaaaaacgccggtaagtgagagcagcgacgtcgactgcgacggaggcgtagacgcggctgacgtgtaccaaacaaaacgcggtaaacaaacttgtccgcttatttttatttgtatttggatactcttgcaaagggtgtgatcacttagacattccgaacgatctaatgtctatatcctatagctcttaaggcagtattaattaataattaattaaaaagataatcatataaatgcgagggtattcaagcatcagcaagcagcctgctcacgttttttttccaattgctattttctttttttctatttttgtttttcaccgattacgccgtgttatcgccgcgctgaaatagtttaactcgttacaaatagcagatcgcgatctccggcagcgacagacacactttggacaccaccacgatgagcacctttcccagcttcgcggacatttcggccaaattctcggaggcgacgctggacgagatcatccgaaacgcgggcggcacccggcacacctcgtacaaatttggcccaagtg

SEQ ID NO: 2387 - DNA, 1515 bp, DROSOPHILA
gaaagcctgtgcagattgcacgtgtgccgctcaacatttgttttttgtactttgataatttccaaataatccggagaaatgacggccgtagagccagcgacaaagaagaagcgcatctcgaagaagaacaaatcggcatggcgcaaaacagacatccaggatgtcgagcagttcctcgaagatcagcgccaggaggagcgcgttggaacgttcgcggataaacaggatgaggatctgttcgttgtggactccagcctcccgaagaccaaggccaccgttctgagtgtgaagcaaaagcggaagctgaatgccaagaagcccatgcgcagttaccaggctttggagaacacatccaaagtccaagatcccattgccaagcgcaaccatgtgcgccagaagaagaacggacgtaacatcgagctggaggtgtgcaatccaaccaagccgcgccatcgccaggccaacagcgatcgagctcagtactacgtaaaactggaacagcgtctggccgacaagaagaacaagaagcttgatgtcgagaaggacatctggcaggaggtggattttcgcgacgagattcctggactcaaggacgagaagggttggatcagtcgcgaactggcactgcacacagctggaaatattggcaagaaggtggtgaaaactcacgctagtctgcaccacaaaaccaccaaagccaagaaattcgaactcccgcatccgggcatgagctacaatcccgcacccgaggatcatcaggcgcttattgatcaggtggtggaacgcgaggagggcatcattaagaaggaacagcaccttaagcgcgtgaccaccagcatgttctccaaggtgacgcccgaggagagagatcgtcgtcgcctaaatgaaatgagccaaggcatggacgaggaggagggtagtgagctcgatgaggatgtccaaacgaatgggaagaaaaaggaggacgatgatgaaaagccatatcacacaatcaacgctcccgtggagaacaaaaagaagagcaagcaggctcgccgcaacgagctcaagcaaaaggagctggcgcgtcaaacagagctcaagaggaagctcaagcaacagacggctgacctgatacgcatcaaatcgattcgccacgagctagacgatgaggaggaggacctgaatgatctaaagaagcgccgcaagcagcgcgccgagaaggccaagtttgagccgaaacgcctggggcgtcacaagttcgaggagccagacctagacgtaaatctgcccgaggatatcgccggaaatctgcgcaacgtgaagactgagagcagtctgctgaaggaccgcttccacacgctgcaacgcaacaatatgttgcccacgacaaagctcgtcagccgcaagaagtccaaggtcaagcgcttcgagcgcaactcccacaaggagccgggcgttagctataatgacctcaaggaacggcgcagggcggccgccgctgcagccaaggctactgccaatatcaagatatag

SEQ ID NO: 2388 - protein, 478 aa, DROSOPHILA
MTAVEPATKKKRISKKNKSAWRKTDIQDVEQFLEDQRQEERVGTFADKQDEDLFVVDSSLPKTKATVLSVKQKRKLNAKKPMRSYQALENTSKVQDPIAKRNHVRQKKNGRNIELEVCNPTKPRHRQANSDRAQYYVKLEQRLADKKNKKLDVEKDIWQEVDFRDEIPGLKDEKGWISRELALHTAGNIGKKVVKTHASLHHKTTKAKKFELPHPGMSYNPAPEDHQALIDQVVEREEGIIKKEQHLKRVTTSMFSKVTPEERDRRRLNEMSQGMDEEEGSELDEDVQTNGKKKEDDDEKPYHTINAPVENKKKSKQARRNELKQKELARQTELKRKLKQQTADLIRIKSIRHELDDEEEDLNDLKKRRKQRAEKAKFEPKRLGRHKFEEPDLDVNLPEDIAGNLRNVKTESSLLKDRFHTLQRNNMLPTTKLVSRKKSKVKRFERNSHKEPGVSYNDLKERRRAAAAAAKATANIKI

SEQ ID NO: 2389 - DNA, 4124 bp, DROSOPHILA
ataaaacaaaacgaaaaaaaaaatacaaacactgagaaacaaccaaaaaaaaaaacaaaaagcgtaattcatttcctctctatgctatgatagttaagcctgaaccattgaacaattaaacaatttgtacgtaaaactagacgatgaatgactaggcgatgatgatgttgcgaggacgtaacgacttaatagcgaaaagtttaaataaaatttatacttgcgagttgaaaaaacatatatgcggccggaacttttcatgaccaatgctcccactctggccacttttagtcttgattccactgtatgcctcatataattataaaccccagtaaataaaaagcggacaacaacagcgagcgttcgttttgtagataaccgaggaaaacaataaagcgataaccaccatccacgggggccatttactccagtccaacttaatgcccaaccggagccaaagctgttcctgatagccgtcttggatccaccaaaaagtattgcaacgcgtggcaaacaggatggtagaatcagtctcaaaaagtgcatcttactttcatggattctacatcgaacaaaatgactaataatatttatcgcttatactttagttcccccttaatatacaaaaaaaaaattccactttcttgggcactacaaaacattttgttcattttaattttgaaacttcttcgcactcatttctaaaagatcagttccaaacaactttcacaagtatgcttaggtacataaatactaaacgagtaatacaattcttttttatccattttgctcgggcatcacaaagcatagtaaatcatacattaaatagttagacaaggcatatacacgcatcgtggggttacagttaaaacaattattaataatcggagcaaatattttggtaaggactgtgtggcgtactgtgtgtatataaaacttaaccaagaacacttgcgctgttaagtataaagagttgacctaagcgctatttctgtaaccctaattaatcgtatatatagtggctttcgatcgctgccatcttgtttagatgcgacgccatcttcacctcgtcgtccatgggaccggaattggattgcttctggcagggtttggtttgcgtttccgtttcggtatcggtttccgcctccgcttcgtcctttgcgacttcatccttcgtcgcgtcgccggcttcctcttgatcattgttagtcgcctggctgccatttcggcagcgggctatcagatcgctgtagggacggccgtgcagcaggcacaccagcaccacggtcatattgtcgccgccgaggcctcccatttggcagtcgggtgctaggcagtgattcatcagctcttcgcagatctcctccggaaacatgcccatgccgatgcgcgtgcgacagaactcgagcacttccgcgttgctcattacatcccaaatgccatcgcaggccagcacgatgaattcccaatcgtccatgattttccgcgtctccacgtccgggaaggctatataggcgcacggagaacaagaaacaaggtgataatgcttaacaagaacaatggatggagatggtgattctcacctgtgacgatttgatcttccggttttttgttctcatgcttgaatacatagtcaccgagggcgcgggaaagcgcaagattgccgttgacgcgattgaactcaacccagccgccgccttggatgatccgcttggactccgcctcgttattgggcttgtggtccagcgacaggacctccagttgtccgttcacgcaggcaatggcgcgcgagtcgcctgcgttggcgcaataaagcttgttgtcctttaccaaaacaactacggcagtcgagccggccatctggtcaccacatgtcttgttgcgtagcataacgtagtcgatgtccagaaagccctgcaattgcatcatatatgagtcatgaattaaatagaatggcttgaagagctttacatgttctcaaaactagtgaatttaaatggcattacattttagatatctttataagttaatctgttgtttatatgtatcttcaaaaagtatatgactttaataaacgtgagacatataaagataaatgtatagaggttttaacaagttgttttcatcccattacttatcattcttaacaaatctttgtgctgcagatgagtaacaatttgttgaaatgagtcgcttgaatagaatagaataggtacgtattgtacatacatacatatatgtgtaatatgtaaaactttggttttaagaagtgggtactaccctcatatatccaagtatccaattatcatttatttaaggacatcatcgataccgtgcatatccgaaagaagactgcatgtgaggagtacatatacataggtactccaactgccttcagcgatctataaatgtcgccattcccgccatctaaaagtgactctgccgtgactcacctgctgcagcgcctgttcgatgttgtcgttgtactccggccgcttgagaacgtacttgtgcaggtgcttgccggcgtactgggccaccgtggcgcctccgtgcccgtcgtagacggcgaagaatgccgctcccggatcgtccggcagcgagaggatgtgggtgtgcgagtcctccatgttgatgcgccacccctgcatgcaggagctgcccacgcggtaggcggcgttctggcagtacgctgactccttggcggtcaccggttccgatagagtctgacccattgcggcttgtatggtgtgcggtgtggagtgtgttgtgtgggctgacttctttgcgggcggggttagtgctatcgatttacgtcgcttttctgcgggaaagaagacgtacaagcacacgggttaagttaattacgaaactgactgctgcggagcgcggaacgaccgacggccgactgtcaacttcagatacgcgtgggctccggagattagtatatcagaggcataagcaaacagacgtggagatttcagggccggatcgcgatccggaattggattcagcttgggttcaaagggcaggtgataaatgagcgtcgataagccggatattacggctgacgatcaacgtacttccttcgcgtgctccctaatatgttcacagtttgcagcttatttaaacttatgcaaaaccagaaaataagaacggaaaaccagaacagcaacggaaaacacgcaaaaaaaacggagagaagtggagagaagatagaagaggaggagcggcgccaaattaacgatgcgctgattacacacctggcgttcaccgtttttgctccaccctgcaaagcgagtacgcatcaaagaaaaactgtttggtaaaaaattattaaaaactgcgcgtgtttatttttttattgaatttgtgttttgaagtgtgaacgtgtctgaaaaatggtaaattcctaactgctgtttacaaacgcatggtagttgaccacactaatgccggtactgttcaacactggcagagtggcgccctgcttgtgagtgcgtctcgactagcttggcagcactggcgaaaagctttttggttttggcgccttgatttgaatttaaaaagtttaaaatccaaaaaaatattatttatgcaccttaattgtacaaataatgagtgatgttcttttgcctttccattgaaattcacatttcgaatgaattctgcaattccaatgcaaatttcacattatgcggctactcttttccgcttctcatttcgccttttcgtcgtcttatctgctcttttattttttttgtttagctggcgagtgcattgaattttgcgaatttcgctttgggcttgcggcaaatatacgaattcaaggacaaatgacgtcagctaagcactttttgcggttgccgctgctgctgttttgttgttgctcccatattgttgttgcttggggaattaaagcttgactggcattcgccgctgccaacgcctctgctttctatttattgtcttcttcgtcttcgtctctttttttgggttcttttgttttgcgcttttggcgagcgcaaaaaatgtattaaatatttgcacagcagcagcaaaagcaaaagccacagagcaatttttgataaagaactagtggatgtatttcagaggtccctctccat

SEQ ID NO: 2390 - DNA, 1249 bp, DROSOPHILA
aataagctgcaaactgtgaacatattagggagcacgcgaaggaaaaaagcgacgtaaatcgatagcactaaccccgcccgcaaagaagtcagcccacacaacacactccacaccgcacaccatacaagccgcaatgggtcagactctatcggaaccggtgaccgccaaggagtcagcgtactgccagaacgccgcctaccgcgtgggcagctcctgcatgcaggggtggcgcatcaacatggaggactcgcacacccacatcctctcgctgccggacgatccgggagcggcattcttcgccgtctacgacgggcacggaggcgccacggtggcccagtacgccggcaagcacctgcacaagtacgttctcaagcggccggagtacaacgacaacatcgaacaggcgctgcagcagggctttctggacatcgactacgttatgctacgcaacaagacatgtggtgaccagatggccggctcgactgccgtagttgttttggtaaaggacaacaagctttattgcgccaacgcaggcgactcgcgcgccattgcctgcgtgaacggacaactggaggtcctgtcgctggaccacaagcccaataacgaggcggagtccaagcggatcatccaaggcggcggctgggttgagttcaatcgcgtcaacggcaatcttgcgctttcccgcgccctcggtgactatgtattcaagcatgagaacaaaaaaccggaagatcaaatcgtcacagccttcccggacgtggagacgcggaaaatcatggacgattgggaattcatcgtgctggcctgcgatggcatttgggatgtaatgagcaacgcggaagtgctcgagttctgtcgcacgcgcatcggcatgggcatgtttccggaggagatctgcgaagagctgatgaatcactgcctagcacccgactgccaaatgggaggcctcggcggcgacaatatgaccgtggtgctggtgtgcctgctgcacggccgtccctacagcgatctgatagcccgctgccgaaatggcagccaggcgactaacaatgatcaagaggaagccggcgacgcgacgaaggatgaagtcgcaaaggacgaagcggaggcggaaaccgataccgaaacggaaacgcaaaccaaaccctgccagaagcaatccaattccggtcccatggacgacgaggtgaagatggcgtcgcatctaaacaagatggcagcgatcgaaagccactatatatacgattaa

SEQ ID NO: 2391 - protein, 371 aa, DROSOPHILA
MGQTLSEPVTAKESAYCQNAAYRVGSSCMQGWRINMEDSHTHILSLPDDPGAAFFAVYDGHGGATVAQYAGKHLHKYVLKRPEYNDNIEQALQQGFLDIDYVMLRNKTCGDQMAGSTAVVVLVKDNKLYCANAGDSRAIACVNGQLEVLSLDHKPNNEAESKRIIQGGGWVEFNRVNGNLALSRALGDYVFKHENKKPEDQIVTAFPDVETRKIMDDWEFIVLACDGIWDVMSNAEVLEFCRTRIGMGMFPEEICEELMNHCLAPDCQMGGLGGDNMTVVLVCLLHGRPYSDLIARCRNGSQATNNDQEEAGDATKDEVAKDEAEAETDTETETQTKPCQKQSNSGPMDDEVKMASHLNKMAAIESHYIYD

SEQ ID NO: 2392 - DNA, 3633 bp, DROSOPHILA
cgtgagggaagtaggagcaggggatgctttgacaggagaggacgatcagtcatcacaacaccagccggagatccaatgcaatggaagctccacttccattcaatccatgcccgccgctagaactgctgcccttcttgaagctctggcgctgtgcgatgcttccctgctgcagttaaacactgatcgaatactgtactacagcgccgccaccttcctgtttgtcctcttggtccttctggtggagttcaccgcccccgtgggcatgcgcactatctttctgctgctcaagttcatcgtgtttggcgtgatcctgttctgcgtcttcatggcctccatctggaactatatggaacgaaatggggtcctgcagggcaagaagtcgatggaggtgatgctgcaccacgcccagaagtacgagtacttctactgaggctgtgtatagcagccaagctcaatgcgcatttaaaatccacgtgtagcgtactataagcagcgatatatgtttgactagagttatagcgctcttacttgatctttttattcgtgtaaccgtcaatgcaattccatggtctctttctgtgtaacgtcatccatatcccaggaataatagttcaataaaagtgagaatcatttaggcaaacaaagattgattgatctaaagataccttttgtatcaacaataatatagtttgtcgtttaataagcaacaatatatatggtaagctcattcatggttatagaaaatttcataactaccgccccaaagtatgcagtacttggtcgctacccattatcgacaaataaccacagaactgtattaatattacggtgtttttaatattttttctttattctcgagtagaaaacagctccgcatagccccaatctggtacagtttattcgggcttctttcccttagcaaactcggccttctttcccttgacgggggcgggcttctgggagcgcaggacagcggaagcgcggcggagggcagcctataagcacaagtaaaatcattagaataggcctaacactgaagtacgataagcttcagctttgagagcttcagataagtttatcaacacgatcattctgcgatcttggttgtgtagcattaaaaaaaagatcatcatgacaagaacccaaacagttgtttctaggcttggagccataatcacctgtgtcaggtccttgcggtacttggagccgataagcaggttcttcagcttcttcagggaacggcggggaccggccttgaagtcaacacgcacggtgttcttggcggggcgctgggcatacttgcccttcttcagcacggcggtgaagcccttcttgtcggcagctggcacgactcccagggtcttcttgtgcacgatgccgctgtagcggtacgagctcacgctggccaagttgtttggctcctggaagggatttagaagtcagtaatgtgcttgtcatatcatagtagtgatgaagccaacttttatcagattaaagttactatcatgttgtattcaaatatcattgtgaaagttataagttggaaacatcatttaaatgtggtgcacgttatttaaatccatatttacttactgtgctgaagggcttcttcacatcgcgcttcttcaacaagaaggcgttgttgttgcgaatgatcaaccaattgaggtgcgaagaggttgccatctcacgtctggaatagaagttaagaacatattagtaattgctcaggaaaaagccatatttaaagtttttcaaaggtatttcagttttgggtgatgaatatagtcttcaagaactcttctgctaaatcaatcctcattaagccacaactgaagtactcaatatagattttaatgcttacctttttgatcaaatcgccagaaacgcaagcaagaaaggggaacatgaaataaaaacaaatttcgtgattagattaataatttctatattaatttcttgaagaactgcaacgttttcagttttgggtgatgaatatagtcttcaagaactcttctgctaaatcaatcctcattaagacaaaaataaggattttgaacacattttatatgcttacctttaaaggaaaatcaataaattacacagccaaaaggtgaacatggaacaaaaagaaagtcggcagttagattatgtttttctgaataaaagacaacgatatttctgttatattcagtcttgggtgatgaatatagtcttcaagaactcttctgctcaatcattcatcacagaattaatcacgcattttaagaccacacgtgttcttacctttattgaaaagatccatgtaaaatcagcagtaggaaaagcagcatgcaaagaaagagaaaaacgatattaaatttggtattgatcaacgccacgttcgcttagtaatatagactatttgattaagtccattatgggttcgctacaaattaattcaaatttttattcactatttgcccgctgcgttgcacgtgtgggtaaaactcaatttacctccgaggtttagcgggccggcagccaaatagacggcaacacgtggtgcaggcattatacctctacacttgcggagcgcttgggacgctgagagaacgctagaacttaaccaaatcgagaacaaacgcaaaatgcccaccttttctcgttgaaatacaagaaggaaagaaatatggcagcccgacatagcgcgaagttggctgcgcttgccgaaaacactgggttgcattctgtgttgtgcgagttggcagggcaactatcgataagcatttcgtacgctaacacatagcagataatatttaaaatttgtctgatttgtattttcaaaactacataacatgaatttaatttttgcaaatttaattgcttatatagttttataatatttttgtagcatatttttagaatataagcaaaagctatggtattgattaattatttgcgaaaactccaaaaactcataaatttacgaagacccttgtgattaacaattttaaatcaagtgattataattgatgctggcgggcgttgcccatcttctgaacactcgatagtatcgattagaaatcgatttttttccagctctagtctacttgtcagacacatttccgaaaaaaaactcaatcagtaaaacgttaaattaaagtttgactatcaacaaatcatttcaaaaagtttttgttttaggctgtggtttgtttttattgtcgtatgtccatccagaatttaaacactcgtggtaagtttaggccaaacgagacacttttccccgactcctacacatgtacataaaaatggccgccctgacggtcatcatcacgaacacacacacacccatacacacgcacataagcgcattctggtacaaaagaaaaacacgctgctggggtgtgattacatgccttacaacctgcgttttacatcttgcatgccctgaatttcccgatagtcgcaataaccaagcctttttccgcctttacagacccctttgctgatgcaatcaagggcaatgatgatgatattcaagacgggctagtgcatataagaatccagcagaggaacggtcgcaagacgctaaccactgtccagggcctgtccgcggagtatgacttgaagaagatagtccgctcctgc

SEQ ID NO: 2393 - DNA, 655 bp, DROSOPHILA
cattttgcgtttgttctcgatttggttaagttctagcgttctctcagcgtcccaagcgctccgcaagtgtagaggtataatgcctgcaccacgtgttgccgtctatttggctgccggcccgctaaacctcggagacgtgagatggcaacctcttcgcacctcaattggttgatcattcgcaacaacaacgccttcttgttgaagaagcgcgatgtgaagaagcccttcagcacagagccaaacaacttggccagcgtgagctcgtaccgctacagcggcatcgtgcacaagaagaccctgggagtcgtgccagctgccgacaagaagggcttcaccgccgtgctgaagaagggcaagtatgcccagcgccccgccaagaacaccgtgcgtgttgacttcaaggccggtccccgccgttccctgaagaagctgaagaacctgcttatcggctccaagtaccgcaaggacctgacacaggtgattatggctccaagcctagaaacaactgtttgggttcttgtcatgatgatcttttttttaatgctacacaaccaagatcgcagaatgatcgtgttgataaacttatctgaagctctcaaagctgaagcttatcgtacttcagtgttaggcctattctaatgattttacttgtgct

SEQ ID NO: 2394 - protein, 165 aa, DROSOPHILA
MATSSHLNWLIIRNNNAFLLKKRDVKKPFSTEPNNLASVSSYRYSGIVHKKTLGVVPAADKKGFTAVLKKGKYAQRPAKNTVRVDFKAGPRRSLKKLKNLLIGSKYRKDLTQVIMAPSLETTVWVLVMMIFFLMLHNQDRRMIVLINLSEALKAEAYRTSVLGLF

SEQ ID NO: 2395 - DNA, 3790 bp, DROSOPHILA
ggagcgagtacccggcgagaaatttagcttctccgaccacgaggcggtgatggccaagctgaagttattcaagctggaacctagaagtgaggagccagtggcaacgatcgaggtgaactgcctggtagaggatggtgaaacctgttccgtgagggaagtaggagcaggggatgctttgacaggagaggacgatcagtcatcacaacaccagccggagatccaatgcaatggaagctccacttccattcaatccatgcccgccgctagaactgctgcccttcttgaagctctggcgctgtgcgatgcttccctgctgcagttaaacactgatcgaatactgtactacagcgccgccaccttcctgtttgtcctcttggtccttctggtggagttcaccgcccccgtgggcatgcgcactatctttctgctgctcaagttcatcgtgtttggcgtgatcctgttctgcgtcttcatggcctccatctggaactatatggaacgaaatggggtcctgcagggcaagaagtcgatggaggtgatgctgcaccacgcccagaagtacgagtacttctactgaggctgtgtatagcagccaagctcaatgcgcatttaaaatccacgtgtagcgtactataagcagcgatatatgtttgactagagttatagcgctcttacttgatctttttattcgtgtaaccgtcaatgcaattccatggtctctttctgtgtaacgtcatccatatcccaggaataatagttcaataaaagtgagaatcatttaggcaaacaaagattgattgatctaaagataccttttgtatcaacaataatatagtttgtcgtttaataagcaacaatatatatggtaagctcattcatggttatagaaaatttcataactaccgccccaaagtatgcagtacttggtcgctacccattatcgacaaataaccacagaactgtattaatattacggtgtttttaatattttttctttattctcgagtagaaaacagctccgcatagccccaatctggtacagtttattcgggcttctttcccttagcaaactcggccttctttcccttgacgggggcgggcttctgggagcgcaggacagcggaagcgcggcggagggcagcctataagcacaagtaaaatcattagaataggcctaacactgaagtacgataagcttcagctttgagagcttcagataagtttatcaacacgatcattctgcgatcttggttgtgtagcattaaaaaaaagatcatcatgacaagaacccaaacagttgtttctaggcttggagccataatcacctgtgtcaggtccttgcggtacttggagccgataagcaggttcttcagcttcttcagggaacggcggggaccggccttgaagtcaacacgcacggtgttcttggcggggcgctgggcatacttgcccttcttcagcacggcggtgaagcccttcttgtcggcagctggcacgactcccagggtcttcttgtgcacgatgccgctgtagcggtacgagctcacgctggccaagttgtttggctcctggaagggatttagaagtcagtaatgtgcttgtcatatcatagtagtgatgaagccaacttttatcagattaaagttactatcatgttgtattcaaatatcattgtgaaagttataagttggaaacatcatttaaatgtggtgcacgttatttaaatccatatttacttactgtgctgaagggcttcttcacatcgcgcttcttcaacaagaaggcgttgttgttgcgaatgatcaaccaattgaggtgcgaagaggttgccatctcacgtctggaatagaagttaagaacatattagtaattgctcaggaaaaagccatatttaaagtttttcaaaggtatttcagttttgggtgatgaatatagtcttcaagaactcttctgctaaatcaatcctcattaagccacaactgaagtactcaatatagattttaatgcttacctttttgatcaaatcgccagaaacgcaagcaagaaaggggaacatgaaataaaaacaaatttcgtgattagattaataatttctatattaatttcttgaagaactgcaacgttttcagttttgggtgatgaatatagtcttcaagaactcttctgctaaatcaatcctcattaagacaaaaataaggattttgaacacattttatatgcttacctttaaaggaaaatcaataaattacacagccaaaaggtgaacatggaacaaaaagaaagtcggcagttagattatgtttttctgaataaaagacaacgatatttctgttatattcagtcttgggtgatgaatatagtcttcaagaactcttctgctcaatcattcatcacagaattaatcacgcattttaagaccacacgtgttcttacctttattgaaaagatccatgtaaaatcagcagtaggaaaagcagcatgcaaagaaagagaaaaacgatattaaatttggtattgatcaacgccacgttcgcttagtaatatagactatttgattaagtccattatgggttcgctacaaattaattcaaatttttattcactatttgcccgctgcgttgcacgtgtgggtaaaactcaatttacctccgaggtttagcgggccggcagccaaatagacggcaacacgtggtgcaggcattatacctctacacttgcggagcgcttgggacgctgagagaacgctagaacttaaccaaatcgagaacaaacgcaaaatgcccaccttttctcgttgaaatacaagaaggaaagaaatatggcagcccgacatagcgcgaagttggctgcgcttgccgaaaacactgggttgcattctgtgttgtgcgagttggcagggcaactatcgataagcatttcgtacgctaacacatagcagataatatttaaaatttgtctgatttgtattttcaaaactacataacatgaatttaatttttgcaaatttaattgcttatatagttttataatatttttgtagcatatttttagaatataagcaaaagctatggtattgattaattatttgcgaaaactccaaaaactcataaatttacgaagacccttgtgattaacaattttaaatcaagtgattataattgatgctggcgggcgttgcccatcttctgaacactcgatagtatcgattagaaatcgatttttttccagctctagtctacttgtcagacacatttccgaaaaaaaactcaatcagtaaaacgttaaattaaagtttgactatcaacaaatcatttcaaaaagtttttgttttaggctgtggtttgtttttattgtcgtatgtccatccagaatttaaacactcgtggtaagtttaggccaaacgagacacttttccccgactcctacacatgtacataaaaatggccgccctgacggtcatcatcacgaacacacacacacccatacacacgcacataagcgcattctggtacaaaagaaaaacacgctgctggggtgtgattacatgccttacaacctgcgttttacatcttgcatgccctgaatttcccgatagtcgcaataaccaagcctttttccgcctttacagacccctttgctgatgcaatcaagggcaatgatgatgatattcaagacgggctagtgcatataagaatccagcagaggaacggtcgcaagacgctaaccactgtccagggcctgtccgcggagtatgacttgaagaagatagtccgctcctgcaagaaggtgg

SEQ ID NO: 2396 - DNA, 629 bp, DROSOPHILA
aaaaggtgggcattttgcgtttgttctcgatttggttaagttctagcgttctctcagcgtcccaagcgctccgcaagtgtagaggtataatgcctgcaccacgtgttgccgtctatttggctgccggcccgctaaacctcggagacgtgagatggcaacctcttcgcacctcaattggttgatcattcgcaacaacaacgccttcttgttgaagaagcgcgatgtgaagaagcccttcagcacagagccaaacaacttggccagcgtgagctcgtaccgctacagcggcatcgtgcacaagaagaccctgggagtcgtgccagctgccgacaagaagggcttcaccgccgtgctgaagaagggcaagtatgcccagcgccccgccaagaacaccgtgcgtgttgacttcaaggccggtccccgccgttccctgaagaagctgaagaacctgcttatcggctccaagtaccgcaaggacctgacacaggctgccctccgccgcgcttccgctgtcctgcgctcccagaagcccgcccccgtcaagggaaagaaggccgagtttgctaagggaaagaagcccgaataaactgtaccagattggggctatgcggagctgttttctactcgag

SEQ ID NO: 2397 - protein, 144 aa, DROSOPHILA
MATSSHLNWLIIRNNNAFLLKKRDVKKPFSTEPNNLASVSSYRYSGIVHKKTLGVVPAADKKGFTAVLKKGKYAQRPAKNTVRVDFKAGPRRSLKKLKNLLIGSKYRKDLTQAALRRASAVLRSQKPAPVKGKKAEFAKGKKPE

SEQ ID NO: 2398 - DNA, 76574 bp, DROSOPHILA
gagtgaacaaactatttacaaggcaaagtggaaatgctgggtcagaattaagattaatacctatctaaatttgaggtgaaagtaggtgactaagttttcaaatagagctgggaaaattagagatacattacaggagtaccacaagagatttagaatatgaatattcctgttctaacaccacattacagtacatttttatgttttttaagattagtttctcaaaaatgaacagacaattttgttttatgaaaagagtaatccaaatattattccatattattcatttcgttctattggttttgttaagctggacttctgaatcactgaaatgtaaagacttacatgtacatttttcgatcgtacattcatatgtgcattacgtacatatgtgcccattaaaatgctttctttgttgcgactgcgtattttgcgtgattcgcggggatgagcccatagatttaaatctccccgctcttacgtatagagtgcgtcagcttttggtacgaacatctgcctagcgccaaaaaaaaccagaggctgttgactcacgggaaaaagagtgtcactggggagctcttctgtcgtcttttttttggtttttttttttttttttttgtgaaccactcatccatgaccgctttcaggtgtaaaaaaagaagagtttcagaacaatactcgtaaattgtacaccgaatttcgctcttatctcgactgctcatcaagctaaaagctcgttgttaaattcccaaaatttgttaaatttgggatagggcataaagactgcgagcagcggcgtcctaaaatgaaaatcttttgtttgatgcccaatacaacctgttggcaaatgcgcaaagtatgccattttttggctttccggttgacagcttggcatatttttattcaaatcggatacggaattttaatatgcacttgtttctatattaattgcttgttttctcttgccattgactgaatgcattcaataaatatccgcttggccgtgtgacactttcagagcgataatgagccaaactccaaaagtgattaatggacctgctaaatggaaatcactcccagatggacacatcaaggcgagacgagagcaatgcacgtgtccagggaaagcggagaatcgcatgcactggatgcatattttaattaattactcggacacatttacatctgcctgcggatggggatgggggaaggtcaaatgggctggcatttcctgcccacttggccataagtcgcattccggtgtgcgtcactctgagaaagtttggggctgtgtaaaacacaattagtaattgctttgatttcctgcctgcggaggagcgtgttcgatttcgcacgtttgagaaatggtagtatgtaaatcgcatgtccgaccagtggcgcacttccatattagagcagccgagccgatacacctcaaattgagtcattgttcaatggcatacgccactcactcctggatacattgaaaacaacggttgtatatagagtgttaaggtaagttcttaaaaagcatacagttaacaactgcattttggccagccttgaaataagcaattacatttttcaattatacaggtaacattttcatttattgatttgatttgaagtataacattaagtttccagtgtagttacaggaactccattcatttgtaggcacgcttgtaaataaataagtgtcgccatatcggccagacgttcatgccaccacccacacagcgaagatacccatacccatacccatattcgtagtcgtacgaagtccataatgaatatgtcacgaacttgcacccgctgatcttaaatcggcgactgtttcgatactcccgaccagctcaaggggtatggaagtacttaagctaacgataaagatacggctatcagcagttgtagcgaaagccagtaaacaagaaagatagtgcaatgatgcagtgaatcattgaagagttactaacctctcggaacgctcacaccgagccgcactatcttgtgtttccttccgctggaagcttccgataactgctttctcgctcctgaccatgggtctgccttttctatcaaaactaccattgagtaataggtgtaacaacatcgaactgataagacgattttatatatattgatgtcgcaacttcgaaaattactcacctttcgatggcccgaccatgtatcatcagtaattttgtcatttgtactttatttgggtcagccgcagatcaaaaatcggttttgcattcaatttcgtggccaattagcacttgaacccaagacctcagtctaagttcagaaattgccggcaagttgtttcggatatctgtgtgtacatacagtggtgcacgccactaaacgatcatgtttcgaaatgaaatacatttgaatgtgataataccaaaatatgattttactatctcttaccccgtgggggttatatatttatgataaacttgcatttatcgcagaacatatacattttcaaaacaatcatttatagattttatagcatttcgactcatcaagggactagatctactgcggttctagattggctatgattaagtgacagtaaattgagtttaagtggacattgatattggatatatcaaggctgcttatgcaagagcattatcaatgactatttgggatttccaaaagattgtgaatggaaaaagataatcatcctttcgaatactacgttgagtaaccggcagcggctaacattcgtattttgattcattcaaaaatataaccggcttggtgaataatactctgcagtatatgataacaagtacccaagaatatatgggcttttttttttttgatctgggttttttattttcgagggtgtgggtgtattcatacttattcataaatattagaaatcaaatgtagctaactcatatcgattcattattttttagattttagtttcctttttcatggaactactcgatcaatcaatatttaacgccatctgccttgtgtttattgtgcaataggcaaatgtcccaacttggcggaaacgtgttagactgacactttttaggtagccaaaatcgaagagtataaagtagccaaaaaatattaatatcgaagagcagagagaaatattaatatacacttaagaaaagaacctacccaaagtcacacagaccaacataatttgaaatatttgaagctattatactatttaaaaaaaattttgtttattattgttttacaataaaataccaaaaatcaaatcataagagtatatggtataaaattataatgaatgtagcaataatttatatactgctaccgatttaagtttaaattaaattaaattaattaaattacttttttatgagtcaaatataataacaaagtggaaaatacataaatgtctttgaccacggtgtttgtactttcagttttaatataattctttcatatgtaaaaaggaaattttaaatacattggatttcagatctctaaataaaaaactatacaaatacggatgaacaaagttataggctcagaatttaaaaagattattacgaaaaaaaaaatgttttttgctgcctaatttaaaataattttttaaaatcctttagagcctcttggaattcgtgctttttctttctgtgcccccttaagagcgtgagacaagagcgagtttcttctactcttacgtattttcataaatcaaccgcgatcgctggcatatccgcccaaatgaagagaagctactctgtatttttgtgctctttgtgcccgcctcttcaagtcgcttcacgtcgaggcaagtcagcagttcagtcacatttagacatccgcgcggtaaacccgctttcggcggtataacgagattttttatttcgaattcgacagaaacaaataaatgtaaaaaggagaaattgagatttatgcttgcacaaaacacgcgaataaaagagcaccgcccacttctagcgttttcttttgtggggtgaacaaagcgacgtaacggttgacaggaatcgggtaacgcgaatcgggaatcggtgttggtatcgggcatatactaaaaaacggatgaacaaggaaagtctttcctttgtgcagccactgcgtgctaattaattgtgtttttgtggccaagtggcattctatagtgtgcattctatacacaccaaatttaaattctatccagcccaacccaactcaacgcccccagctccttgttttcccaccattcgtatgcgtcatatgtaaaagagcgcaaaagggcggaaggcacagagagaaaggaaagccaaggaaagaagcagtggccacaacaaagcggcaagcacaaaacgccagaacaagaagcgccaaacggaaaaacgggaatacccccgcccaatccccaccgctccccgccacaacccatcgctccttccgttgtttttgttgctgctgcagctgtatttatgctgccgggtattcgtgtgagtgccgccaatgcgcatgtgtgtctgtgtcaacccccgcggccgaggcgacaacaatagcaaaaacaacaacagcagcgaaactaaaacaaaagtgaaaagttcaattcccagcttagcactacgaattgttagtccaccacatcggttaattaagcctcgaacatagaataaagataaatacacagttttgttcctactgatcgaggaatagtttcgtgtccaagtgttttcgttgcgcgagcgaaagagagcggcgaaatgttttccaaatatgttctcgccaccctgctcgcactctttgcgcaatccatgtgcatccaggagctgtccctcccacccgaaggatctcactccaccgctgcgaccaggtccaagaaggcaaaaaccgctatctccgaggatataatggtaaggctccaaatttgaaaacttcgatttttccgaacccagcttttttaagctctataagatgatatatcgtatcgatcaagttagtaaatttgggtgtttatacaaagtgcatcgactgaaatgaaaataattccccaaaataaaacgcaatgcaatcaatcatcctacatatatctgatggtaaatgcttaagcactgtttgacccaattgccatttcaataaaaattcatcaataattgacatttgaatccctagagctgttggaaatcgcacaatgtttgcaataaaaattgtaaaagcaattattgaatgtgacataaataattaaacaatgtaaataggaagttaaagagcaagaaggtaaattagaaaggggacaaaggaaaacaaaattagcctacagtaggcgcattttcattccggcggctcagatactcaatccgtatctccgcatttggtagcagacagtaaatcgagaggcgggttaagtacaatcgagatagacggatctgaaggcccccagcacacatatccccccctccccctcactccacgatgcagatgctgctgtggctgctcgagcctatgacctcaaaatcccaaaatgctctacatatgcatagacagcacgagacgtagttatatatctaactgtaagttaggaaggtataatttacttttaaatatttgcatgttgtgtgcttagtagattaatctgtttccgtaaaatgtttaaacaaaggtccagtatcaacctgtgttaagtaacttcaaaaacaacttgattggcatttctggaaaccgtgatataagcgaaatggtaaaggatgatgacttataatacatggaaaaaaagagattccaagtttctcattaacttctgatttttattacgcggaagaatacaccagtatgcaactcacttcactgaacgaacgaagtccgccttactcgttcgaaacgcactgtacatgtgtgtgcatacagacgccacgagatgagggcccccagtagtctcgggtatggccactgcagttcgtagtgcacaatgcacgcttattgtttgggggcatgcgtcctatggctcttaatgcatttgtgggtctgcctccatctttacccccagccccctccacccacaacccttactacatcgccgctgcccatgtggagccctggccactaggacatttcctcgcgaatttctgcagttaatgagagcgggcgcattttttttaatcagaataacaaaatatgagcaatttacccattatgctcgccttttgtttttgttgctcgtgtgccaaggagtcgcggtggcattctttaaggcgcgccaggacattgaacccgcgccactgactcaccagctccagacatgcgtgccggccaggatgaactattaatgtacagccagccattgatgcgattctcctcgtgtggctgggccaaatcttggcgtttattaaagttcgaaagccgtaattaaagttctgaagcgtttgcggaaaatataagaactggaactaagtaggacgcacataagctctgtaccacagatggtaggcaccgaagattgtatggattttctcatgaatgtataaacaacagagctctaaaatcgcatgctgcaataaatgttcatgctgaaaatatatgtcgaatattattttagaatttctagtgggatccttggattctactaaatttttaaataatataatataaatattatattacctatagtttgaatactcctagagtaatgaataagattgagagagtatccctgaaacagtacttgggtcgaggtcttgaacgacttgcatattgtttatttagtaaggataccgcttcccagctgcccgttggatgagcgaacatatgccatatagagataggtatatgcatatgcatatatggagcactatatatagctgcgatatgagaggaactaaaaagaaaagaaccgaacgagcggacaagtcggcgagttaagttgagttgagttgaatctttactgggttgagttcgcctgagtgtcgccagctaggcgatgccatgaagtcggttcaataaacgtactcgtacacccgtacacacacacacactctccggatggctcgcatacactcacgcattcacgcttatgagtggcgtgtaatcaaataaatgatggaaatggagccaagacgaagtgcaagatgccgtacacggagagaaaatgcaggtcaatatggttgttgattattgattatcccaggtgtaaaacaatatcaaacccaattggctaaagcagtaattaagcaaaataactaattatgataattcagttcagggataatgtagctagcgggatcacaaataccttgtttagagcttaacatcacatgtcaaagaatatcaattccgtttatgagtaaattcatctgacatctaaataattattttaaaatgtttatatttgatattaataaaagtcttgctgcttataaggacttaaggaacaatataacgagatactgaaggacccgatttttccaagtgctttcagtcgacttgttcttagggtggcgagttgtaagcccttagatagcagaaaggacggtgggcggcgggtggcagggtcacggcacggcgctgctccgcggttgcatgccccaacggaagtagtccggaaaatgtacatacatacacatatagaaagtgaagtgaagttaacttatctgctggcgcacaaccacacacatttgcatgtcgccatgcagtagcgtacatacatatacatatatgtacataaatgtggatatatctgtctgagggaaaggagggcctgccaagatgtatgtgcaagttgccgctgccactgccactgccactggggcagggacaaaaggaagggaatgacgagtgagcaaactgttgctattttctttggagtttcgcaaaattctaattggtgcaactatggaaggaagggttgtcatccgcagactttggggactttccactttcgtgtttgtatttgtaattgctatttgcggccgaggtctttctgccactcaagggtagttttccaatgagttcagcgaaggaaagcacaatgaaattttggtcagtgacaagaacaggtgtttcctgttcttcataggaaatgaaagtgatcgaaacatttccatgattcattttgaatgcgtgaaagaactctttaaatttttcgaatatttccgacgactggcaactgacaaaacatacaatttattatatttttatactatgcctttaaataatttcttctcgactcgataattacttgataaccctttagcagatttcttcagcaaaaaacccatgttgagtgtaattctgcttgataaatcgcatcgcccaagtcaagttggaatatgttgaaaattgtatgattaacgaaggcttttccagatatggaatatgtgcagtgagaatcggagactgtatcttccccagaatccctgcaaataatgcacaatccttatttatgtagccatttaaggcaattcacacagtgcatttatacgctttattactcatttttaattgatccattgtcagacccaccaaattcctcattttcggaatgcaattaacgcagttgcagctgatggaagtcattctgagcattttcgttgattgttttacggcttcctggtaggagagccagtcgccagctcgaaatttatacccaccccgatcggtggcattacttttatgacacactcaagaagtaaaggaaagggcacccccaagtctctgacgaaaacaaaaaaaaaaaaacggcctcttaataggcttatgacaattcttgaagcgccagttgagtgcatcgagcggtaacagtcatatagtatatgtatccgtatgtatatagccgtagccagatcggatcgaataatttttaaatgccaactccatacgcgataatcggacgcaggaacaacgagggagtgaatcgagtcagatccaacttggaacagattaaatttgccgctattaattaactgtcgacgatcaagcacattaagtcaagtcaaagctgctgattcagtgctgtttcaaaagccggggaaaaaaaacagggtggaattttaataaattgagctccacattaatgatattatcaattacaataacagatatttccgctcgaatcgtcgacacgacgccgtgacgtttctctcgaataaattaacatttttgtaaggtaatttgtcagtgaatgagtgcgacccactgacaaatgctgcttgacacctgtaaaatgcgttaatgagacctgcccggctacttagaaagttaaatgcaatgatttgagtgtaggaaatccctgatcccgtattaagtcagtgactaacagctttatacgattcttgtgcgtcatgggaattttaaattactagggccaattaagagaagaggtatgataggtctacaaaaacaaggtatcaatcttatctaaaaaaattaaatcaaagaaatattatctgttttataccatttttttcgaaccctagtttttaattagcctcatttttcgtagaaaagccaattttccaccgactttaggcgacaaaaatgtaatcctgtgtgaagtaaaagggctgagctcactggcgccccctgctggccagtcatgcaacgcgggcgttcatttacctggctaaaaagcttttattaaatttcgctttcaatacataatgctggtgggagatgcagtcgctgcgggatgcgggttttctatttagttttttaattgtgtcacgtagggacctatagaaaaatgcagctgcctttctggcattgcttgctagcagcccagaaaaaggtatgtaaaataaactacatccgatacgtgtttgtgtgggcgctctgcaactaaacacgcattgaaatgcaaggagcggaaaaattttcgagccgagcacaagaacaaataatgcccaatttgcattggtaaaagagcggaatacaaaaatcccgttagtaccaaacggtagtttatgtgctaaaaaatatatacatatatgtggaaaaaggaaaataagggaaggggatttgatcgagaacatgacatccagtttctttacaacaggatcaacttatgtatttttcattaataaataaaaatttgaaatcttgtgaagaaatatacgggtccatgatcttcagaagcttaatacgtaaaatacatatgctagaaagtacgtaatggctaggatccgtttccggcctttaatataagtgtatatgttccggatcaggattacgaactatcagtttcaagtaacatttaacatttgaaggatattaaaaaataaggatcttataacgcacaatggactaaagacttcggatatttatgagaaatatatgtagccgccgataggtggcggctcttgtaagcagtctaagtaggcaactaaaatatctccatccccctcgcactcccattagctgaggaactcgaccattcattatcttttgattttaattgcgatctcagaaatgccatcttccttgcaattacacggcgtcgaaatgaaaacgtgctcgcttaagctaatgtatacaaaggcgggtaaataggaagcattacggtttttatacgtttgaattatatacttaattaatctgtactgaaaacacaaaaaagcgcatcgaaaagaaaacactcagctgggcgataagcctgcaagcagaacatcatgtacagtagcccgccgatctcaattgttgttgtcgtatttattaatttaatgtgccattgattgatttttaatgtcattcgggggatgggaaattcagagacaggaataaagagaatgtggagattgaagtgttatcgtctggccgacccacgcggcgtatgattgatgcatttatgttgattttctttcgctttccgctgcttttttcgttgtctcactgcattttatgcatcattatggctgcgtacccaaaaatatgagacatttgttgtgcatacacaatttctgacagtctgcctgccaaccagcgctcaaactcaatctgcatgcacattagccgatggaacgccaacgcggatacggatgcggatgcggactccagcgctgacatccgtacggacgaccagtcctctataatctttcagcaacattcatacttatggtatttacatttactgagctgtccccaattttggttaacagtttccatgattcatttccgcaaagaggtgaataaaggacaaattccaggtcgaaaaatccgatagctcatattttaattgacagaaaaagtatctgaaagataatgtaggtatattttttgggtttggatatttaataagttattgaacgatataaatatagtggctgtaatgcttaaatatattaccataatgattttatgtcataatatataaagcttaaatatattaccataatgattttatgtcttgatactaataactcataccaactaattataattattaaagttcgagaaaaggtttagcttggtggctttttgagcattaaagcagagcaatcagtgattttctaaacagtcatgaatttatgcttttaccactcgagcatatcactcaaataagtgctgagaagcgaataatgcattatcggaattgcacaatcattgtggggggagtttcagctttatctgttttgcatttcacttacgcagagcccgaggaggactaaaagatacactcggggtgaagcgctgaaaggagctgaaagaccaaaaagatccggacggacgtccagccattaggagaaacacatgcattcacactcaaaacccgcatgcagatttgtttccaacggtctataatggcaggaagaataaaagcgcaataaatccaagaggttggcgctggcaaaggtggaagtgcataaataaatatatatgtatagcccaagccagaaattcgttggtggatttgctggagttctaagagcgccacgaaaagctgcacagagtagaaaaacataaacagaatataaaacaattggattgacccagattcattcctgccgcctgttctttttttcttttcttgttcgtttttcgattttgggttttgtgcttgtattaattatcacatttttgtgccacgacgcgcgcctttgattgcagcagcacaaaaaacaaaaaaaaacatcaacaatcgggaccatatagaaagcatttattttcgatttatttattttggcttggcatgatttgggggaatccaaatgccgaggagcacgcgagataacggcagttgttaagccccagcgaggggtatacccatatgtacgtatagcccaaaagattctacccaggaaccgccaaatcgagcagcctcggaatgaaaaatctttgacattttggcagaaggcaacggcagaacggtagaacggcgaaccggcgaagtcttgattccttgacttgattttaatgatgcacatgatgtcgcagctgcttggcctggccttttccggagaaacatccaaccactgacatccagcaaacagctacgagcaaccagcaccaagcaacaatggcaatgacaacgccttttttgggcgacatttgtgcagcgagcaggtttccttttaagcgctgaatgtgccatcaattatgcggcatgttgccgaccggaggctttagcttcagctcgggatccagctgcacttacaactcggcttcaacctggcttcaatacggctccaaactccaaagccaaagaaggtacgaaaggaacaacatgacacacatgtaggtgttgcaacgcgtgtgtcagtcattcggatacactgaaaaaaatcccataattttcgcttagcattaaaaatttcttaataaatatatgtaaaggatattaatttattcattataaggtgtcccaagctgggttagaaaatagaaatagcattagttctaaaggtctttgaaccctttttcatatttaatgaagacacttaactgcctgcataaaaatgtctaccttttgagtcatgctttttttggccgtgtgaattgtctgcttacctgatggccaccaatcatttaagcccatatttctgagtcagcgacattcccttgaagctctttctcatcccagtctcatcattcccagcttccaaagtgcacaaatattgaccaactcatttagccgttcgggggttttgtttttccgcttagccacctaattttgccacactcatcagctacactcagctaatttcatcaaacggtagtcgtgatatggtcaaaacgggtttcaacgagtgccgcaagatttatacacatatgcagcctgagatactgacgatggttatccatatagctaggttggtcaaaataataacagttcgcagcaggtttctggccttatttatgtaacactaactacacaattggcgccatacgaccagtagcactgctgacgataatatctcgtctcagtccatgtaaaatacttttaaatggactttgcattccagtgggagactaggaaattgaatccgaagaaatcagatttccctagcgaatgtttccaaatgcacaatttggacaaagttaagtaaaaaattaccaataaaatcagatttagtatttcctgactgatatttggtactgaattgttttattgcccatgtagctggattgaagatatttagattttttttacgtttcggctgtttaatatttcaaaatgtttattactataattctccttcaatagcactctccacctcttttttatgtccccaccttaagatggttgtttgagccgctgccgctgaccaatgaaatgaagttggctaaaatatggcaccctcaattgaattattaagcgaatttatgcactatcccctgaaagcagaaagctgactcgaaacgacggggcgtgcggaggattccgaccgtatatcaccgaccatatcgagttgcgtcgtctgcaaacggtcttaatgtcatcagttaaaaccttttagcctggctggttgcagtctttgcatacgagtgtaattggctatagccatatggctggccggccatatatgcggcagctatttcaggtcttcgatctcaaggcgttacatgtccacacatcgatttctgtttatttaactgtcatgccaagtcattgaacgcaaacttggatgctttgttattgaacagtgcggaacagagcgttgttgcgttgatataaataatgatttatttgtttattgcaaattgctctcggacacaaagcgtagttaatcaagagtgcagtttgccttggcgtccacactctttgccatttccatttccattctcattttcatctacccatctttgctatttacgccgcctcttcgggggattggacctattgtctggagcgattgaggcgtgtatagactgattgggaacggaatgattgaggttgaggttttgatggtgcggaggtggagtggggttcggacgcctttgatgacttgttgctcgaacgcggcgacaaagtaaacgctcctcgagcctcgagaacctggcggctggcaagtggcgagtatctcatcactttcccataaactccgggccccagatggggctgccagtgggccgtgggcggggatattgcaatttacgtcctgtggtctaattaaagtgcaagcacaaatacaaacacaaacacaagcaccagcggcaaacggccaactgccaactgaacttgtggcaggttgaaagacggaccacgagctattcgccaggcgcattgaacgttgcgtgtttgcagctttgcggtgggttcatttgatggactacacggtgagaaaaaatgtgttaactaattttgaaaagtgccggcacaaaaacatgtatgtacgtctaagatggatgtacttcgagctggttgcttaagtgaaggcagtagtgagaataaattgtgaaagtccttgctaattggccacccccttttttcctctgcactggcgacgatggggccaacaaagcaactttcaataatatagtatccaaccctatctcttcgctctttcctttggcttcgttgcctttcttatcccacattaatcaatgttgatttcaattaatttaaccatctcttcactttgtccagcctttcgaagggagtgcgtgggtgggtgtgtgtcttttttattaaatgtttgccgtggtgggcgtggccatcactcgagccgctagctggcacatcctttttattaaaattcgcagtctataaattgctaaggagcccatgtgggatgggcgggcgtaggattccaatggccatgggactgcgatgagcggaggaaatggggtatgactggcgtacatgtttcaaaagacgtgtgtgtacccaagacttttatgagacagcaacaggaaatgcatggaaatggtctgggctgggccgcccgccgagtaaggggaacgtgtgtttctccaaatggagcaggtcaaaaaaagaatgtggaagtccgaagaatgattcagaaacagaaaatatacgaataattattacaaaatctgccttgcatataattacttataactttgcactagttgcattaaaaaatgaaagatagtacgacgaagtttttaagccctcgcatttacaagcacatctttgtttgataaagttactcgttaaagtaagtagttcaagtactaaatattttagacgagaggctatttacgttttaatacctatctagaaccggcttcaaattgtatatttccatgctatgcaaacgtgccacaaaatgtggatgatgatgattcagacctgattcaatatcatttccaatgcgaatgcaataaagccattaatattattgatttggaaaccatttcacatactcacttgcagtaaatttgtttgtggcaaggacctgttgtcctggcgacacatttaggtccatatcctggcaatttggcctcgatttcatgctctttgtggtctctcaatctctagatgcctgctccatctgctttctttcttgctcctttgcgcatttcgcagaatttgtggcaggatctcaggctatgtccttctgggcaggcggagaatgcatgtgtttcgaaggagcaaggagggcttagatggatgcgctcgtttgttgcagttgcctgtcatttttattgctttgtttgcctgccgaaccggcgtcatttgtaggtggtttttattagccactgtcgcatgtggagcactgagatatggccagcgtttgagccattatgatttgtttttgcggtttccaaagtcctaagaagcagttcgaaaacttgtgatttttaaataaaactttgaaggtacttttttgtatgtgtagcgctataatctgttgcaaagtgcaattcattacattcttaatactcttaaatacccttacacaagacttccacttatttaactcacccaatttcttaccttatgagtttaattacttttagtttttgccttgaccccactacactttctgtatccaagccctttccccattaatgaagagcacacactcgctacggaattaattgaattaggcgcccggataaggcctttatttttatttctgtgcgacccgcgctcgtataattataatccaataaaataataaacatatcgcctcgtccgtcgttcaatttactttcacactttcaccatttcaccagcaggcggtggcgagaagttttccttgagacacgccaacttaactaaattaagccccacaattattggatggcagtgtggaaaagccttataaccataaccactcgcaccttgccccattccccatgccccatgccccatgccccatgaccccccctttgtccagccattcgcacttttctcaattgtttttcgttattgctgttcgttattatattttgataacatgattttgtttacacgacaaatactcacgtagcaatgttttactgttattgtttctgattctgatacgctgctcacctctgctccacgacttttccactccactggcgcttttctattagtcagaatcatggcttggccacgtacgtagacccaccgtcacttgcccgcttttcccccgattttcaaacacgtagaccgggccacaaatttcccattaaaaacgcaaaaggccaatgcataaatgattgataccgaaagtgggggtggtcttgggggatggggtatgggggaacgctgtttagaagcgctggagggggtcaaatgtgagcacttccgtcgctcgaagactagcaattcattcatatacccatccattcataactacgaattatagtttattgtcgtcgtaaaatgctcgcttctctgccatttggcacaccttttctaagtactgtttacagcccgcaaagccttcgattagccaaattgactagttgcgtcggttcgaaaggaaccaggctccaccgattccctccattatccagctcctcgatggacgggtcttccattcattaaagaaacttgaggcgtctgccggtgtctccgctggccagacattcggcttccgctgtgtgccacattagtcttatccccacccacagattaaacaggcaggaccgactatagcgaactttacaaaaatattaacgataaaaggaactacaaatattcaaaaaaaaaattgttctttacattgtagtttattatttgatgtattttatcttacaatctagaatggcacattattaaacaattaagtattaagtgttattaagtaatttttaccatttctttattcaaatctaaaagtaaaacatcttgacagttgtcttatggggtttccactgtatttgcaattcgcctttgcatttcaagcaacatacacttattaattgatattgttttcgtgtagccgaaggggaggggtttggggctgatacagatggggcataaagacagtggcggagacagagaattccacatagctacggggatcgttatgtgaatttcaatttgctagtgtgggctttcttacatttattggcgttacgtatggccggtgctgtgctggtgacgcattccgagcaacgtgacagcagacccatcaaagggaggtgggtctaagccaactttttgtgacgcacattcgggatctgggatctgtgcttggccggggtcaggagctggttaatgctccacctgcccggatccggtgacgggtttatttccattgctccgccttcgtcctttattgcggacctgatgcacttgcagcgctgcgggagttacgtaaaaaaataataaataaaatggcagaagcatgcggaatgctgccattccggctaagaaagtttgcgtcggtttaaactacatgtggtttctttagtgttgcttttgtggtcttttaaatgtcgcattcgggcgaaaagtcacaaaagtggaatcaaatctgcggattcacttagcaatcaaccccactgtttgcttttatgctcctttgagaggaaacaattaagggcaaaagggtttctcgtagtcaaagccaatctggataatttgagagcaccttcaagtagttacacaaactaattttctccgccacaactttggcgtagcattaaagaccagttagtgattgctgcattgatatgcagtgcacatagctacttttcagcacctaaacacgatgtagataggccattcatcattcgaaataaatcccaactaatcgccacacatcacgttgccgctataagaataccactgccaatgccaataccaataccaatctggccagaacttttggccaacgattctttgcatgaaatttgcaaatcgtttggccattcaaaagttggtactcctcaccccaccccacgcaccgttttgtgcaccactttttaagcgactgacaataacaagaagggcgaaaatcgaaaagttgcgagcgcgcggagggaaagcgtgaaaatcgtggtgcgagtgtgacaattttctcgtatgtgtggaaaatgaaagagaaaattaaatttgcaggtcacgtaatttgctggtgtgtgtgtcaagtttgttctgcgtgccagtgtgtgcgttagttaataaatatgcgcgcacgcgatgtaaaaatatgtaaatccagaggcaacacacatatggccaccgaatcgattcgatattcgagttggtctatactcgtatttgttttctgttttcgcactttacagttatgacccagtatattcattcgtgttttggatctgcgcggaattccccagggaatacggccatccaacagggtgaacaagcaatcccaaagataaacttcaaagcgtgctcgatgagttgaggaagggaattcaagttcatagcctatcatcatttgtataataaagcatctaccagctttcgaactctttgacttttgtaaataacacacttaaccacaaatagatttaggcctaccatttaagccaagcgcaattcgtttaccgaaacacataacaaacttcgctgattgttggaaaaaaatatgcataaatgtgtggcaatggctttaagcactgagtggcccgagaaggcagctttatgatttcggccaggagatatggaaatggcttacatccctgccaagctttcttccttcgagcacttctccatcagcgtttccttgcactttttctgtggcatacttttttggttattaatgttaaagtttttgttgctgtttatgttcggttgttgttgccgccctatctggcgttgcttttatcattaactttatgcaaaaagttttcgtcctggtcctttttctacccatcggaacgatgggtattttttctttcgttttttttttttttgttgatgctggcaggcagcatcatttgcaaaacgacaaatagtttggctcaccgaactggccatatggcagacagggccattgttgagataccacccgttcctttggcacacttccctaatgtatctatccatctctccttgcagtacaattacctcatgcagtttgattatctgcccaagtcggacctggaaacgggtgctctgcgcaccgaggaccagctgaaagaagcaatccggagtctccaggtaagagacacattccctcccagcggctgcagccgtgccatgacatcccatcccatcccactcatctattatgcacaatttcacaactaacattaccgtctgcagtcttttggcaacattacagttacgggcgaaatcgactcggcaacggcccggctaatacagaaacctcggtgcggcgtgggcgacagaaggtccgcggacagcttctcgccagataacctgtatcacgaaatcggctccaatgtgcgggtgcggcgcttcgccctgcagggacccaagtggtccagaacggatcttacgtggaggtaagtcacctttttgcagctcaatgggatggcaaacggattggtagcacacattgaatgggagtcagtgcggcataatgcatggtctttcaaaatgctataaattaaatacatgaaaagtgctttaactgtgctctcagttgctattacttataacttttgactagtccactccttattgcgtaactatagtacatcacaaaggtgttgtgtcccaagtttaaactgaacattatgttaacctcaagttattcggatcatgtgatgaattttctcgaatgaactgggtttcttaaccttgctccttggcaacccatcattatgcacctccgttggcaaccccccatcgactggctttactttccctcctgcggatgttcatttcaattaaactgcatgcagttcattaattttgcagcgttcatttagatgcgaatttataatttacaaggggctgtaaggcgaagtcggtggagtgctcctgctgccgagaatcctgtttttgctcggttgtcctgtgcatacgggctgtcaattaattcaaaactcaaacgttgcgtagcttgttaatttttattacggccattgcactggcccccagaatgggattgcataatttggtgcccgagagcttgtttttatttttatgtaaaacaattcactgctttccggaaccttagttggctgctgtatcccagttgctgccggttgttcccggctgttggccaagatgacccgctgggcaggaggagctggaaagggtgggtgggtggttgcctttcattaaacactttgcgccaaattgaattttacgatgagccgaaacgaagagaaggccctctgattgcagctgtcacttttagtgttgtgtttgatttttaatgcgcagctgcataattgcgcttgaaatattaagcaggacagtgcgccggaggagtctatctcattaggaaattttccaattaaatttgcatagcttcgaggagctggctggtctttcgccagcgagcgttgcatactttcgggctgagctggcaaagtgcaaaagctcatcgccacattgcacatacgccgtggtggcccttaaagctgctgctttcgctccgttcagttcagttcggctcggttcggttcggttcagtggggttcatgcagcgatagctatttaattatttcttgtgtcgtctacccttaattggccattaagtggcaagcgaccaaaaggggcagaaacggcaggacaatattgcgactaaattaaagcattacgcagcatccagaatccccggatccatggattcccggcatcatggcatcccggatcacagcggtggctgttcgcatcaaattgagtttacatgaaatatacatataccgatagcgatgaggttggcgatggcatatcaatatgtattgacctgcttttcgcctagctgcatgtgttctccttaattgcagcacaaagcgaaagcgagtagacgaaatgaaagcagggtggcagtggcttcagtttggctgattgtgtgattgtgtgctggcaagtgtttttccatttccgctcagcatggaaattgtgggacggaagtcgttcttagcagttttgtactcattttgttttcaccgcgttctcgcgaaaacacacaatgacaacatcctgccacaaagttgtcgccaactcagaattctttgggatattaactgtcggaattgctgtgggctgcaccgaaagaaatttaaggatttgttaacatctgttgagataatttgatttgagaataaagaaacgatttaacaagcaagtataaactttgctgctacgtttttagtatattgtactaaatgtactttatttatttaaatccatagttatctctttacatatttcgattgcagtgcagccacaaatcaagtgacagcagcagcttcagcggaagtgaccaaaaacttgcactttgcgcaaatgtttaaactaaattggcaattgtcctgcaagagaatagagggagaatccttgtttggcaatagcaatagtcgtaatatggcatttacttggctgcaaatgaagctttctcacttcgcccattgtggagtgtttactcacttttccttcaacttaaatctgccttaattaagtcagttatgcagtcgggcttgtgttccagagtcaacttgtcaaatggctattgaggggagcaaaaatgcttttccttcattcactccgtttaagcttcaatttttcatttttcattttccatttctctcttaatgcatcggcaaacaattgtccagccaggaaaagtgtcaataaaaggaaaactggtcttcacacctgttgctcttttccatttaccttttgttctagctcaacagttcgtaattcttgcgttttttttttgaggactagaaaaattgtggaaaaaattctttaaatattgcaaagcgaaagtttgcacgaactgtagagagttttttctaattgaccagttcattttgaccagttttcgcttgttccctagccttctctctattagcagctacaatgtggtcaagagctgaacgttaattgccgctttttgtggcattaataaacagcagtgaatgtgcattgcgcacttactgggtatttgttagatttttaacaacattaataaagtgcacggcgaagtcacaggaccaatgttccgagagtccttaacacgcacattcttgcgtttgcgtttatgcttattagcgtgcatgcgagccattaatacggtgcactgagagaaaaaagcaggggtggttggcacgtgggacaaccttttagctgccgtcgcataaagcggagacgtgaacggatgtcttcgggcaaatgtcataaaaactatgcgccactcggcaaaatatcgagcagacaaggactttcccaaatgcgccatcctgctgcccatgttacaatgataaaaagtaattttatgacggccactcgcacgcccacaaaagaaaaggaccggatccttggaacagaatgcagctccacctcgagctgcatcacttggtgtgggacattatgtccttggccagtttggtgtccctgctccttatgccgaagcttttaaccgaaggatgtaaccggaaactcccagccaaactccaaatcttctttggatcagagtttaaagagttattgtgtactacaagtttaaccaaaattcgagtttcattaattctttattaatacagttatatgcgaaaaaaaaaacagatataaaagtcatttgcaacagctgcagcacgtacaaatcagtcaaaaaagggagagtgaaataatctggaaaaagtttggcaaaaacagttttggatgactgcacattggcaactaaatcgtgatccgcagaatttcaaatgaaagatacttgctgccccaacttgtgcaccatttatccctcttatatcgcctttatttataacccattttttacgatttttaatttgcataaaataatttgctgatcaacaccagcgagcgtttttctcatcataatttattcgccaggcagagtaaatcacacgcactaggccgaaagagaaggcagctacggcgtgcgaaagagagggctgtaaggcgggagcgagagggaaagggcatttaatgccgcaaacagaacatggcaatagttttatgctgcttcagcttcagcttctgttgctgtttatttcgcagcagtcatttgcagagttgcctttactgcactttgtcctttatccgtctcatccttcgcgtcctccgcctgtgacctccgacctccgatcccccatctacccatctctactgacattccactgtccgccgtcggtccgctgtgcattttttcggggggcggcgagggctaatgggcgtccattggccatagttttctgacttttcgtatgctgtcaagtgctcggcactcgaaattattatctgccattaatcatggccataatgtttgccagctataaaacggagcaagtgcagccagaacaggactgcaacagcgaaccggactgtacacagtaactgctggcagtaggcaactggcagagggcagctttaaggaacttcccgatggaatattaaaagtaggaactaagctagtcgggtaaaatggaattgcacaatgaaaaggatcttttagcaagtggctttcagggcgggtgatggtaaattagatgccacggctggaaatcgaaagcggcttatgcacattcttcaagagttcacatccacttgaaacattatgtgtatgtcaaagggataactttacgatctgccctgcggcgggtcagttataatttcgggcattgctttattactgtgacaattattttaactgctggagatttttattatgatatttttttcataaaattccgtatctgtgcatttttttgaagtcatttgccacttgtctgggtgtctttatggggcaaaagagcgaataaaaccgaaaacacagggcgccgaagaaacaaaagtgcgcgtacagtagggaacaaaagctccttgaggtagagctagcaagtattgtaaactaagctcgtgcataaataaaatcctcaatttgggttcatattaaaatagacattttgtgctgagctcagacggagctcaaggaaactgtgtcaacatctgtctgtgtgcgggcagtgtctgtgaaaggattgcactcgcacacaccacacacacaccacacacacaccacacacacacgccacatacactcccacatacctcgtgatatatgccaaatttatgatgtggcatattttcttatgctggcttgggcctttgaattttgcatgaactttgatagcatatagcttagggtttccttccgttcagcacacagacacacacacacacagatatgtttatacgtgcagtatatcctttgtcttagcgattactccttgagtcggcaatccgataccgcaaaaggtgtagcatttcaaaatttaataaccaagtgggctgcagaattgccaccgaacaaatgcctataagtccctcgcttcctgttcgagctgcgggcgaaccgaattcgagccatcgaatcctcgactgttaggattgggcttccgagggacggaacccattgaaaacccatttgccaaccgcccgctgacacagccgcaacaacagcagctggctggtggtgggtaaggggggaattggtggggggagagggaggagcggatggacgagcggtccgcttctttgtacgtgtcaattcgggggccaaagactggtttttgcacatacaaaaaatatgttagcatgtccaaatgtttcgctgccctcttcagctaaaattggtaacttggagaaaaaagaaatcaaacatccaattattcttatgaacgaagaggtcaaattacgattcattaaatatatataatatttacattgtttttgaactttatgtttttcatttctgcacgcaaagatatgtgtcattgcagctgtaagaagcgtgcgattcatttttcttagtgtaatgggctgggtctgtgtttttccgttggctactagtcagtcaggctgggcattcggtttttgtgccacatcagtcactgcgccgcagaaacatcaggagcagcacaaacacacccgccgttgcagatcgtcctttttgggcaacttaacactcgcaggatgtcgcttagccatcctgccacccaaaagcacccagaagccgttgctgcatcagttttgtgtgctaatttaacgtctaattttccatggacagcaaatgagcagcttcagctgacgattttcggctgcctttgttcctctgttgcgtcaaaaccatcaaaacgagatgacgcagcaattgaagccacgaaagcgattgcattttgtcacttttgtgatttgacaccgaaagttgcccaacaaaacttcattagtagcagtcagtatattgagcgaaactatcgcgcacatatttacattgcaatgcggatttacagtaggtatttattattatgctatttatgcatataaaaaaaaaaaaaaaaccgaaattaaaaaaatgtttccactatagcagagcaaggtttcgatcctcggacctctgagttatgggcccagcacgcttccactgcgccactctgctcatatgatattagcgagatacatttccaaataacagggcggcactatgaaaattagcatatcgatacacagatgatgaagccaacaaattatcaaaactaaaggttagcgtgaatgtatgataagcagtgatatcagaactggatcctatacgactagattagattaaagaacaggttgttgtttaatgcactctgtatctatgattggtatttagtaaaaacttgaatctaaatcaaaacaatagcactccaagaaatgtccttaaatattcagtacaaattaatagctacctgaaaattgagctccccgaggtgttccatttaaaatgcatccgaaaattgagataaattagcaatgacgcactatattgccaagaattcaccttggaccatgacgcaaatgctgacgaggaacccaagctcactatttatatagatgtttgtgcccatacatatgatcctgctgtattattatacacgtctgtatagcattggcatccgcgtaattatgtttgcctccgtggccaggagcagcgggaatcacaaggatgcggatggtcaggatacggggctcggacagcacaggagcgggtactgtggcggagccaacaatgtgtggcttgaaatttgacactttcacagttggtcagttgatttactcgcccccggaaccaaggctccacccctccaccgctcctgcaggctgtctgcattttgttagattaatgtcctgttcaatcatcaatggttcagcgtacagcgccgtctttgtttgtatagcacttgtttatcgctgtcctggatgagcggagacactcgcagggcaggaataagggtacactaagaaaagttctgaactatttcctgctttaaaaagaactggagtataggaacgttaaaaactgcatgttaattagaagttgataactttacacgcattaaaaaggtcttaatatttaaatttgaattcaattttcgctaatattatttcacataattacaaataaaaaatgcacgatggataaaacttttctcagtgcaggactggacaacgataacggtcatcgttggtgtgactgtgtgcgtaagcgaccgctgtttgtgttgggtttcatccttcggttgttgccgccgcttttcggtttccttttcagtcgcttctttcctttcgtttcccgttcatttgcgccatcccgcttatccctgttccttttggttcttctgtttactgttgtgccccgtgcattcatcctttgctttgttctttcgtttacttttaattcatttaggtttcgccttgattgatgaccactttaattgcggatattaaatgacaagcgccagaatcaaatcgaactgaaaatgcaaaaaaaatgagctctctaattttctggcatttttccctactagagccgctctccctttgattgtggcatgatttgcagtaaacatgggatttgaggctttccgcatcgagttaatcagaaaagggaaatatgtacaatagacagggtttttctaggatgaaataagaagattttcataaatatctactggtgcagtcttaatacagcaacatacatactccgggactatagaccgatagaatcctacagaaacatataggaatctttgtggtaatcatcgctatccaatgttacttatgaagtggaaaatgtactcaagaaagcagggactctccttagtcctgtttttcctataattttccgtcctctgctctgcgacatacccgtgtagcctgcaccacgtataaacccaaggaacttttgattaaaggtctcttcttgtcctcgcaattttacgcctttgatgtggccgcgatataatgctgttgatacagtcctccggaggaagggacgaaacgggggacactgcaatcgcaagtgggttatactcgctgtaactacataataattctaatgaaaaatgtcaggaggcaaatttgattactggctttgattgtcaattaaagcccaacaacaatttgccgtgcggtggaatctcgttacgtttatatggtcgccaagtcgccaggcagacaatctatatactttgtgcccacacatatatttatggcgctatgtgccagagttgatgacgagcgaatcctaattaattttgcagtacatacaaacatatgtatgtatgtacgtgtgtttgggggagtcttgcattaagtgacacagcaacgagtcacagttcgccctctcattagccgcattaattgataaattgatattggctttggggtaaaagtggatggggggcattgctcggaatcgggacaaatgaattcctggacaccgggttacgctgcactggccttctggccgcaaagtttccactccaagccaaactgaagttttgggcgaatcggaaagaacaacatcaattccgggcatccttttcggttcgtctgtttgtctggctgtcaaatcaaactttgatttgattcgttcgatacaccaactggccggtgtccaaacttttattcaaactgacaagtttcgtggccagaccaacaacaatcagttaatgcaggcggtgcggcatggtttactacttttctcttttggtttttttttttttgatgttttctgagccctagttgattaatagatggacgctttagtgtcacaaccgtcttgattaatgtttggtccagcggaatttgtttgtttgttaggcccggaaaagaatgtgagggaggccaattgttaattgtggttaagcgcttttaattttcacatgtgagtcgaggtgagccaaatacgaaccatccggaccgagccgagccaaaacgagcccgactacgccagccgaactcattaaaaagccgagcggcatttaaggatgcgcctgcgcagcaatctcttatactcgcgcgaaagctctgcgaaaaagctccgagatcgagccgagcttggtgacacttttcgttgaaatacggcggcacacttggcacggagctcagttactgccaagtggtcagtgtgagtggtgctcccagggaaggacaagccttctggagaatggaatggaaagcctcagccggaaatggagccctccagtcagaccaccaagatcatctcggcatggaaatggaaatggatgtagaggtgaaggtggtagtggaattggtgatggagatggagatggcagaggaagtgagccactctagacacgaatcgtgaatcagcggcgcattcaacgtcaacacgtaatccccgcaaggactgactcgttctcgtcgtcctcctcatcttcgccgaggtggaggcatcataataatgcccccgattaaagaacaaaaagccaggctgaagtgctgcaagtcatttgtgtgctcattgtgcaaacagatcccgggtccttgttcctggttcctgcgccggaaacgctttaagagccccgccagccgagggcttagtgcgggcacataatgtctgctaatatttgaagagtgcgtcgcattaattgacatgaaagagtcacgaaaaaaaaaaatgggaaatgctaaaagaaaagaacaggaccaccgagtgcagccagcagaaaaggatgtgcgcctcctaatgagtgcacgacaaagcggagccttcttgatgggtaagtgcctttggctaagacgactttagcccccaaccaaccaactaaccaagcagccaaccaagcaaaactccttcgagtgctgtgattttgccctatgccagtgatttatgcgccaataaatgcaggcggccacaaggcattaatattagattgcaacctcgaccatcgggcgggccatatattctggtcgaaattagcctcgataccctctggatctcctattcgcagtgattcccggtctccctgttaattgagtgccgtgagaatctcttcataaattacacaattttcacccgcttttccggctacggccattagccccgttggcatatgccagcaatcaatttgaaattatacgccacaatttctcatcgccaccaccgatttcgattctgccgctgtcagcctgccaattaggggatatatatgcctatatatatggcactaaaatgcaaatgggtttgctgatttttgttttgtccccactttgtctgtctgcaatcaaccatcaattgtcaaacattttctagttgattactgtctcttttttttttttgaattcccaattctaacgattgtcattttttgtttgccgttctgtttggggttttaaatttggctcgattgattttttcactgatacattggcttgtttggtgaaattaatactatttatttggcttttttataaagtaattattccatatcgatgatttgcattcataatacgctcttgatacttaatacaaatatatgcttgttgttgtgtcaaagcgattggcaaaaggtaagagaatttaattaaaatgactctattaatgaggaatttttaagtaccgctttttatctattccaaatatctaattaatggaaaattaaaaaaaaaagtttcgggcattgttcattttatttttgattttatctttgcaattaataaaaagttgcgatatatatgcaataatttgaaatatttaaaattgacgcaagtttctagcttatcattcaaatgagagctattaatgccaatgcattataataaaaaggctgataatatatgtaaatcactcacgaaatatacagaatcctaggaatatgccaaattagctagcaaactttgctttcaagtcccccgctctttttaaacctctggctttgtttatggcaactcgccacaaacaaaaccaaaagattttaagccaaaaagtcaaccctcccctgccttttggccattcgccccgagacttgaaatcttttgtagatttgcttgaaagacaaagactgcctaaaaattcaattaaacagaaaggaagtgaaaatcgtttgtcgctggcgcaaaatgttccatattatatttaaatggaattagttttaattaagtccgtagctaggttaggcgcagccacaaagaaaattcccatcctggccagaaaaatgttaacagactcaaattaccacctcccagccccaggaaccctaaaaaaaaaaaacgagggactcaaccaacttaagcaacagcaacaaactgaaaccaaaatgtagccgccaaaggaagtgattaaaattttacctagccccaaagccccaaaactcgggcatcggacccaaaacccaaaaatgaagaccaaggaatctcgctgcccttttgctcccttttaccttttctggctctactatgtatacctatatatatttttttgtaataagtattaattaatgcaaaatgaagacgaaacgtaagtagggcttctgctgattttgctcccgcttcttcttttacaaaagagcagccgttttgcagttgttccctcatttttagttgctggctgatttctcgctgtttttttcttttttttttttttttgaaatttgagacccgccgtccaagcaaagtgacgcaaattaagagaacccctggtcaggagcaagtcaagcagaagcaacttaatgaaaacgaaattgacacctacctaccttcctacctgggtatgagaatgtctgtgcagctcctttggctcctcaaccccgtcctccgatcctgaccacaactgtaaagttatacgcacgtctggcgttacccagtatactgtggtggacatggaagggcggttcggtttttcttttttttttttttttttttgttccgggggaaaggacatgtcaatagttgcccgcttcgcacttcctgtgacattcggctgcccatcatcgggccacgccactcacatccttatgtgtcctgtcctgctctgtgctgtcctgtcctgtccgctcataaatcttccgctcgcatatttctgggtgtgtgtgtgtgttttatctggctttcacgcttccgggcgctcttccatgacccccaatactcgatgctggagaacccggatccaatacgaaaaccgaaaaaccgaattgtgtctccagttatttgagtttcggtgtttagctcataaatctgcttatctggggagttggatccatccgcaacccctggaataggactaaaagttctttcagtttcagcttcagtacgagtcagttttgttttctcagctttcccggctttcccggcagctggatggcattaaaggctaagggctttgcaacttgaccctgttgcagtcatgcataaatttcttagattcccagccattgacaagccgcacacactccaagaaatataaattaaaatatgtttcagtagtcagcagcagcaacagcagccgtattgggcccaaagttataaatatttttgggggaattaattaagcccctgcacgggccgagccaaaaaggaaggataggcaccagaaccaggaccaaaatatgcacaaaatgaaattagagccgaaaaaagataaaaacgtaatgaaatgaaatgcggcctaaatgttttcagacattttgggtttgtcgcaggcggtaggaaaacaatgaaggtccaataaattggcaggatgcggcaggaggcagtagccgaaggaaattgaaatatgttcggcctacaaatgggttggaaggatgctgtgtgaactggagtgtaaagtacaggctcctaatgaaggattatggggcaggggaagtgctgtaaagattatggcttcaggttcgagatgatccattgttatcgacagtgaacaagttggggaaaacacaaattgccagaatgatatatatagcaaggaaaagttagggggattctggttttatgaagggaccgcccgattaatgtggcgttaattgtaaaagaaaatggcaacgatgtaacaattatctaaagacgtttagcgcattaaaggctttgtgtaattaaattattaactttgactgttgccaattaataactaagccccaattagttgaatgacaaggcccagcttatgaaaattctcaacaaactgtccaaatattttcatttatttagcagttaaacctttaatccggcatgctgtttaatttaaattctgatgtgcggtcaaaaattcctgcccgctcatatgcgacaatttttctcggttatttctatttttatgttgcgcacgtagtttttccttggccgagcagcaggatgcggacagggcgcactgcaggacactttcggctgcagtctgcatacgtcatcgaactgttgaccgagttggcggctggccaacatgttgcctgttgcctgtcagcacaatttccagataggcacgaactccatactcggggctccggactctggactccagttacaagaccaccaaagattcagggcccaatagctgagccaggacacgcagctaggacacactgttttatgcattgcatgcactaaggcgcaaagtgttgatagagcacacccatacccactcccttaccagcacttactccccaggacagcgactctgacacagacagatgcagatttctgctgagactgcagggggctccagtggcaggactcgaagcatcctgcagctggccccgtcataaagaggaaaactgagctgagccaactgcagtggcaactatagtacagtgggtgcgctccgaacggcagccataaaatttcaaaactcatgtccaaaaaacgtggtgaaatacatttcctttagtaaaaggacgctgagttcgtattttatgtacgtactgactattttcaacatttaatttgttgcattcaatagcttataactcaaggcaaaaattttgttcataacttataaagcaagttatttacaagcgagttaagatggtacaagctttatttaatgcgtcactttagatctgtgtgcggtatgctcctgattttgcaacacattttcctgaatgtaaaagtctctgggcaaccgcagaaaaatgagtggcggccagttggcaatttttacctgaccacccagctggatgccgcggaatccggggctgccattctgccactgatgatgctgctcgcctggcatccatcaaacaccgccatattgaatcaacgcaaaataattgctttttaaatgggtttttatgccggcaccgggtgagagaacagtgcctggatcctggacatggcggagggccataaattcaaggaatcgccaccttatagccgcacaactgcccctggggtgaagtttttctcgacacgaatcgagattcgcttttctccttgaattcccgccgatttgtgagctttaattttcagatttatgcccatggctgcaaggacgtttttaatgagatttcgcttggatagtccgagaaggataatgggtgccacgaagggcaatggcggcagcacggggggcagtggaagtggaggaagtggagtccgaggcgttgacagacacagattatgagagatatgccaaaaagttagtgcggttaagcagctgcttctagtggaatgaaatcgtactggatgatgagttcgggccaggatgggggcttatggacgccaacttaggtttctcatcggatgatgaaagtatacataatttgcagcgtcttcgtttcccgctgggccacaaaagtttcccttgttttcagtaaatttgcgttcggcgaagtggtgagcattttccacccatcgcaatagtcatctttttctcgccggggcaatgacaacataattagctcatttatcaactgaatttgttttggttaagttggataaatcaaacggaaagaatttatgttcctgctcattttttaactattttgatttagtgatttctgcgctgttgtttgttgatcaggaaaaagtaacataaatttggaaaagaccttatcatagattcattggaatcttgcaatctgatctaaatactctgcttggcatgcactgggaaaaaaaacatgcggaatatgcgatttccctattgttttgcattgtttcgttcaagcttaaattaaaaatgccatgttgtaataggtcgatataaaaatagaagcaagaccgaaaacaaattgaatattttctcgctgacaacaatcaaatacaatttgcatcacgaccacgagaaaatctagagcgacagggagaggtagactgttagagcagagggagcgatgcgagtcatcgaggttgtttatgcgcggacttaattgagatcaactgaaagtgtcacgtcatgtggccgaacttcaatgcgaggctcatacgcaaatcgagggaaagaccgtagaacttgtatcttgcagtacaccaatacaccccattcacatacataagtagttcactggcagccaaagagctcatatcactacccgataattgcacacatctgcagaataaaagataatgcctggctattaaggaaagggcggagttggcaaaaacgcaacgttttagcacttccgctttggcgccggaaacggaagtgtaactgccgcagaggcgcatgcactggctctttgtcccgcccaccggccacaccccttcttttgggccaagccgtagtcggttgcatttataattaacataatgatggcattttgctaaacaccgttttccgcatgtaacacacacggccaaagagataggttgagtggcaaggatatgacgcaggagtcggggatttggggattccgggtggcactcaacaacggctgcatagttgacatgaaatgccaacttaatgtcagaaagttaacatgccacttgaaattaacaagccgcgcagagtccttctccatctccttcccatatccctttcccacctcggaaaacccacctcatcaacggaatcctttctgcattgttttgcgcatgcatatacatattttacatatatatacacacactcgtccttatatgtgtcgtcctgctgaagtggctggcccgacttgacacaggcgactggcgtgtcaggtgaggcgcattaaaaatgtagaatttcatcttttagtcagcaattgtagcgtttttgtcgagtgttttcggccctgtctaagttccaggacctcgagtgcctggcttttgtttcgagaaactgtcgcgctatttaaagcaaaaccatatgcgaactcaatagttaattttttcccaaacacacttaattttacataactaatgaagagccaactccaccaggctccaatgttatgcaacaaagtagattttgcacaatgaacttggccagctgcccaggagatttgcattatagcttcattggcagcccgaaattgattggatgcgaaaaatggcaaccactttaccaaccaacaatgcagttagtttattcaacttggatggttttgcaattgcgcttatgattttcgcggtatctgtgatcgatcattatgggtttttgtttctgcttttgaataatgaacaaaattcctggcgttgcggcaagaatatcaagtgtatacaaattaaaatgaccagcacgcggaattccttcatcaagtacacgggatttttattcagaacgagaaacctgaactcactttaaaatacatttaatttaatattcacaatacagtgatacgccagcgtaaaaaacaacaatggctcggggcaagatattttagggcccaaattggtcgttagcacattggcattgagggtggtgggaggtccctgggtgtgggtggtgccgggtgcgtgggtggaaaaggtcgctgcaaattacacgtgacatgctaaatggttggggttcgtttggggaaggaagatgttcctgggttgacagagtcacacgtcctgccccggttgccatgccaaaatgatcataaaattagcgcacaaaagtaaaacatatgagacgcgatttgaatttgacgccattaccttcatttggccacagttacatgcagtgagagaaaatcaatgttttcgatactttctattcattgtggcttactcgaaagaacaaagttagattataatagaaattcataaattcttaattatactacatctattcgatgtaaagaaaacatgatttaacaaacaggctttacggaatgtgctgttttcaagtccaaagagcaccgggtggtgcagtgactgtaattaagttaagctactttttgtgcagtgcaccatcagtggctgaaggatacagtgctcggagcagagtgggcggaggcggcagacacgcataatgacgcaccaggcgccaaagtcatttgcatatgccaacctaaccaaaaaacggcaaacaagcgagcgagcacatcgcgctcctcgctgagagcccaaggatgtgggggtggtgtgtgtatgggctgtatttttattggcagctgccttaggccggagactgcgtctgcctgtctggcatactaagtgggcttttgccaccgcgcgcggttggggaaatgggaaagtgaggaagtgaaacagtgggggaagtggctcaaaaaaccaaagcccgcccccatcgcccccattgataataatcgtacattataatgtgtttgctcgctgatagcgttaattatgcagggtccgcagcgctaattatgatttgtaagcctcgaaagtgtttcgcactgcctacttgcaggcagcgcgtttttaatgaacctgtcgtacgtgttcgccggccaatcaatgggccattgttgggattcgaatttcgaaccgaactgaaaatgtgcgcaatctgcaatcgccggagaaaggatggttaaaatgccacttgaggcggacaaaaggatgctgctgcagcagcagcagaagcagcaactgcaggagcgagaaccgaacgtatctggcggatacagcagtgccgcaattatgttacaaaacgttgcaattaagcaaactggtaacaaaggcatgaccgggcgttgtaactaaatacgaaatgggggacaaccaggagctgagttggaaaaaatcggagaaacaaaaaacttccgctgtcaacggcgtttcagtccccgtatctcctgtatctgctgtactttcaactcaagtgcactcttagctcgacaacttgaggcggaattcgtcctgtattgtgtgtgtgaaaacgtgttcaattgatatttctgaacgcgcaagggaaaagttataaatagcaagaggaagcggcaacttgagccaaatactgcaatattgcttttctttctttcgctctcctccgaaagaaaaaaataggaaagccagtctagtctcaaaaaacacaaacgagatatggaaagagtgaccccgcactcgggggacggggtcacttgagggcgctgtacctccggacccagaaagctggtcgaggcgaagctactttgcctcaagtcttggccgggctaagaaagccaaacaagtggctgctccatattgattgctgatccaacgctccaggctgcactcgactcgagtccgcctcactctgcaccctctccatctccactttgcactttcgttggatgtcacactctcgaccaacaccaaatgagttccaaaaaacaggtgcgcacttggagaaaaacttttaaatctatacttgattaaagaactcaattgccagagcaagataacattatctttaaatattattagatttttaaaaggtatttaaagaactcgtagggctaaaaaattgttcataattctaaaatacgtttcaatgttaccactttgctgagtgcaacacaaatctgaaccctgacccacctggtccgatgcccaaatgacttttaccagctgcatattgaaattttattgcattcagcccggagggagaagctggaaacaggagaacggagtggaggatgagcaggaggtttgatcccagagccagacttttgggtcgccagtcaagtcagtgaagcggcacaaattcaaacatttgtattgctgaaattgaaaaaggtgtcgggatgaaaatgaaaaattatcccccccgaggaatggggacctgaatggggcggcgcagggggcggcgcagggggcggtcagtctgccgactgggcagagatgatagcagcaatgttttgtcttcattgccatgggcctgctgatgggatgaccgatgtctggccaacctgacgattcagttcggctcggtttggttgggtttggattgggttggattgggttgggttcggtttggctggattgggttcggttcggtttggttaaaacaagagttaaccgttgattggctgctggtggtggcttaattgttatatagcactgcggcagtgctgggcttaatgaaatgaaacaccagccttaattgatcgattacattcgcatatacatacgaatacgtgaatgatgaactttattatagagactatcggccaccgacgttataaatcatttcggcatagttgcaagtacatacattaatacgatacataacgaaaattgttcgagttatatttatgacgttccaaaactattaaaattggctattaacaatgttgatttatcggacggcatctgccaatgctttatatcaattaatttgtcgatgtcacgggagtacgaatatggcttcaattatatttggtaattaatacttaaagttgcgtgatttaaagggttattgaaacttcgtatgttcgtagtgcaagagtaatttgtacttttaccaaacacttaattaatatttgtgtttaatcaacaaacttttcaaaaactctcgaatttgtgcatcttttttgccgccatatgtatatcctttatgaaatcccatttttgattgcaactttcttattcagtgatttccgcgcgtgtgcgaaatttatctttcgttttgacgcttttgctgataccacagttggattttatgcaaacatatgcggtgcgaaaggcaaaagtcgcgatgctggctcgtggaaaaaagcgtagacatgccaaaaagtttttaccatcattttgagggccgggggaaacccgctccgagtcatgagcctcagccagacagctgtcaacagtcaaatatgcaggcagcaaacaatgcaggaccagaaaaagagtcaaaaatccttgccagaaggacgacaaacctatgcgcgattccgttttcaaattcctggccgagactggcatatgtggggaataatcaagccaccgtacattccgttcggcttatttcagccagctggtcgaggaagcctttttcgcacctttttggctaaatgtatacatgtatgtacgagtatatacgtatgagtatttaatggttcaagggagcgtttgcttcaatttattatacaagcgtaagccccattaaaacagctgactctgatgtcaatccaaactgaagctatggcttaaacgaaatttcaataattctaatttagcaagaaaaacacggcggatggctaaaaacgctgcaaatgtttaccgaacgcaaacaatgcccacagacaggggataaaatgaaggaaaaaaaataaacaaaaaggaactgggggatgccacatcccacagtaaacgtgcaactcacttcttcgttttgttattttggctttttcatgctccatttatataaccagtgtcggctgctctggcagctgagacggcttctcggttcgaggttctgggcactggatactgcgtccttagtccttgcccttaacccaacgctggcgtcttcgggttggcgaagaatttgacgtgtgctcgtttatcattcattttgcgctcgcttacattattcgaacggaacctgaaacattaaattttagcacgttttgcgctaacgtgcgctcatttctactttggcattacgacgcacgccataatgcttagccttttcctcgcccgcttttcctagcattacccattttcctttttcatccatttgcccatctccccatcttccacccccaaacgcccggcttttcatggacttgggcatcagccgtaatgaagttaagtgacggcattctgctggcggcttaacaatcttgtcggatgaggcgaaattgttaccaccatcgttgtaaaacaaaacaataatgtcgagtctcaaatcctcgaacaaatggattcaaggatattaccagcactcctttctcgcttgggttagactatgggcttttgaagggaacttttagaacgtgtttttaatcccggtgcacaatcaatcattatttgtttccaaaaatctgttaaatcatttaaaaacgtgtaagcgatagacagaatcgctgcatttgatttctaagaaagtataaccttttcagaatttataaatggttttatcaatcgattacgattcacccgtaattagatgaatatgtcgcagttcttcgattgtttttcacaaaactatttaatctccagtgtcatttatattcatattgaccaccaataacttttaaatactcacgtgatagcgcacattttgttcactttattttggtcataaatttgttttattagcgaatattcattaagttagttggcgtgtatttgtaaatggatttgctattggcttattgctgtttgcattttttgtgtcactctcaatgggcttttatgtcaacatattttggttttgtttattgcgcaacaatgttgtagagagctcttcgtccattagtccgcccataacggctgcaatttaattagagggcagcggtaatacacctgataatttatttatttattacgcacatagcgaaagaaaagcggaagcagcatatgactttaaaaagcaaccccctttttgcgatatttaaaattcaataaacataattaaatggccaaaatgccaaaggcagttgagaaatcgctaaaagcacggcgacgaaatccgaaaaatcatactcagaaatcagaaatgtgaacagcggcaggagaaacaacggcgaggcataacttttaatgtttctaactactcggcaggcaaagttgccttacccgatccggatcccgatcccgacgtgctgccatataatggaaaacttgtttaaaacttttaaattaattttattttcgcaagccaggcagttcgcctgcccaacttcagatgcagcgttagatttagttttcgtttcgtaccattcggttcagctcccatttctcgccacccattatttcctgttccatttgtctagaatctggattgcggattgttggcccgcttttgtcgcagtccatgtcagtccgagccagcaattaagacaacacaattgcacacaagtttcggtcgcacatctccatctgcagctccatctttgtatctgtatctgtatctgtatctgtatatgcatctctgtttctggctctgcactcgcattcgcattcattgagctttagatctcgaccgtctgcagttagttattataattgcacttgactcccgacttggctatttggctggggaaattgcccggggagagcgtcatcctctgggaatcgtgtttagtctgcataaatttataaatggctgggatttcttccgcacaaaaagatacaaactgtcgcaatttactcttgatctgcatttacaataagcataaaacaaaagattgaggtccaaagatattgagtttttcggtatttgtgatgacacaagtctatcctttatctataataactattatcacttgtacttaaatctcattttgtcaaagttaccttgcagccattaagtttaaccatacattgtttttcccgggcatttgttcttaatgacccaccaaattgaactaaaagttattaattattacccctcgtaatatcattaatattgatgcattagctatggcaattgaatcgtaattattcatatgtaatgagctctttgctgtttccccggaaatcgtattgaattagattgacgcagattgagcctgtccggatcaatatgcgcagtaggtctgtgtggaaaaagttggacacgcaaacatgtcgaccaggagtcctgtggcagcaggataacagcagttaacccaaccagcccctgggcgtggttgtctgaccattttggcagcaaagggggcgtttttcatgtgcgagcattttgtttgttgtcgcggtgtcgccgttgacccctcctcacacctccacatgcacgcctatgtacacaatagacccctgccaagaagtgctgactgatgaaacacgcacagtttgatcagcatgggcggaaatcgaaaagggggaggggccgtcggacaaaaaggacgccactgaccgaccaagcgttgtttgccagaaacaaaacgccggcaaaaagttttcaaactacatttttcatgttttgcgatttaactttgttgcgatctcgtgtatacaaacaaaacgaactgtacaaattttatgaaactatatacataacttcattaaatgtaaaagcatatatgttcgttagcttgtagtttatggacataaggagtggagtaaagccaaataaatccatacacttgtaaataaggatgcatcttgagagctgtttatcaaactactaagaaacttgtcaaatcaaactgcacatcgatacaactaaaagtcaattcattctttcatgattttttctataatatttctcaccgaattacgtaacgcttaggtcatggcttctccttgaccaatatcttttagggcaatgccaattaaccaagttaatgtcccaacttgctcgaatggccagggggcggcagttgcctgaaacttgtagtcgcacgcctttattaataatatttcctctctttccgtctcattgcaggtatgtatctattgatgggagcacatagagtgggcaaacgtcaacgtagcaaaaagggcgccattttccgctgccgcggccgggctctcatctttccatttggcagcggaaaagtgcggggcgagcgaggggcttcgcaacatgctgtcgttatggccaaggcgacagttttccgctgcagcagtcttgctccatttcggctgcacttggtctttagtccttgccactcgactcgctgtaatttcttggcgtttatttttgtgctttctgcggtaagtttttgcgcttgccgcttgccggttgacaaagtttcaagtgttcgctttctaatgtaattaaaatgcttacaaatgtttgccaacagcgataaaataatcatttgaagctgccagtaaaagggagtaaaagggaaaagataagggtggctggcagcccgaaaaaaaggacccaaatagaattataatttaagtggagcatggcagcgttatcaacatctaatttgtagcatcaaataaaaatcaaataaaattatcagtgcaacgtgtgaatgcttaacaaattgacgaaagccagggctccgggttcagatacagatacagatactttcttcatacactccatactggccgaccgccacacacgtggcgagctgcgacgccagctggctgcttcacttggtctcccagctcacgtaggcgataatgtttgcctgccaagtgagttgggtacttgcgaggatggggctgaggacttgagatcctttgggcgagtcaaacgcccccaggctgacacgtcacgttaaagtcgaggcaaaaaatggcaaaatagtgcgacgtgttttgctctgctttctgtgtttttgttatactcgcataaatcctcttgtttaacatatgcagaaacaaacatatccccataggtataatatatatatatactatgcatgtacataactttccatagtgtcaccattttatatgcgatggccaggaaagtttaattttacacatcgctcgtaggcagacaagcaatgctatttattcattgacttgcagtgcactttccccaaaagtaattaaaccaatttgttcattaaaactgaccttttatttataaatggctcaacatttcaattaaccattgacaatattatgcaaccagagaggcagatataaaaaagtaatgaatgcgtataactgaaatgctgtaagtgggctcctagcataaataccggaaaatggcaagcaaatttttaatatctacttaaactgttaaaattaaattacattcatgattaaaacttgtaaagacaccgctaaaaattacatttcatatacaaattgttgaaaatatggccaaatgacttaattcaactgtcacacaataatagataaatctctgcataatgctgtactaataaagcacacacgatcctagctgatagaacggttggcgtgcagagtgcgttatatttatagttcactgtagcggccataaaccgatttcgagtgccaggccgacctatctcaggcccacttggccactccacccactcctgtggccattgtcacgcaaccgcaaaacaaagagcggaaaaaatggggaatgacgaaaaaacgaccataaagctgctacaatgccagatatttatctggctttattgacaaaagcgttttgtcgattgttcaaataaattatgcctttatcaataaagtctaggttcccgatcctcgtgcccaccgcatttcacccgctttccgcactcatggctgttgctacgtgacgttggccgtaactggggcgaagatttgttatggccataattcagagcaggccaaaaggaatggcggcgaggacgcgagtggcaaaatcctaaaatcaagcgacttttatgcgtgcatttatgaactgcggtgcgcaaaagctctataaatctttaagcaggggtgctgagagtcaggcaaatcaaatatcaaattgtttaagtgatttttcattttgcgctttcaccttgttaccggtaacataatttcagggcaacaacttcgcccataagtgatttcaaccacccaaccaaccactcgcaccattccttaccattccatgccattttttccatcaagtatattttgttgttcccactttgatatagattgttcggaacagggaagtactgggatgtgcggcagcagccgtcatttaattttatcgtgcggaagttctaagtgcaacgagcttgttgttgtttctgtcaggtggggtgagtgccaccgccaccttgaacattgcttaaaagcccgctaaaatgttcaatttacgtgtacttctccttatttttttttacaattatatgaaacattgaaaataaattggaactgcgggctgtctggcagcctgggtgttcgactttccgccctcgaaaagtaaataaaaaggctcgctgacaaaatgggagcccctcacatcgcgctgtttgcttccacaatatataataataaaaactgtatttatttattatgattttccatttcgtgcggagtagacaaaaaaaaaaaatgtttaaattggcacaaactgtgccctttgggcgcttttctccattttcctgcgcccctgcaaaaacatttgttcccttgtttaacaacgggaatgaatgaataggggactgactgagtggaaagttgaacagaaattaataaaaatatttaaactgtcctcggggccaacgaatgtggaaaaagcccaaaagggaaaacaatgagaactaagtaaacattggtcacatgataatgttgattgcaggaatagcatcgtggtttggtgaccatcccgaaaaaatggttcatcattcaactcttattattcctatttcgctccaaagaactgcagccataacaataaatgagctcattgctcatgtcggtcgggtataaaatgtaaatttctgtgtatctatctatctatggcgaaatccggggtaaaatataaaccccaaagtttcgcagcgcagcgaacatatatcaaacaatttttcagagactggttcaagtacaaagtcagttcagctgcagtctggcttcttcgctagtcatacatttatggacgtgtccttagcagcactaggaactcaataagccaggccacaagttcagcgcaaaaaaacagggcaaaaaataacaggagagaggaatcgctgcaaaaaatatacataaaaattgcgagcaacaagaaaaactttcaacaaatttccccgcatttcgtgcgcatattttaactacagcgcattatgttttgagtgatttacggtcgcagatgggcgggaatcgaggggttgaaacaatgagaggcgaaaatatggcaaataaaaactaagccatcccctctgccccttatttctccacttgagcaaatgatttgcgacgctgcggcggccaaggcgaaatgctaatgcttaggatgcgcaggaaagtatgctacacaatccagccgacgagtctaatgctgtcgtagttgtgttgctgttgttgtagctgtagtgccactgccattagtgtcgccaactaactttagataactaattagggaacgacggccagagcccgctgacttaactgtagttctgtgttaaccttagcgcagctaattacatttaatgtgtctagtaagcaacttggcagcgcgaattgtgttacttcggtccaaaaggagtgggttacagccggcttattaaaacacttggaggcggcacgtagagtgctccggactctggagcaacgtgtgctccgacttaattataactaatttgtagcatatgtggaggcaagatgaggcgggatgaaaaagtggccggaacaaacctcaacttttgcggcttaagtggccattaaagcattaaagccatggccgaagtgatacagcaattagccgggtgcacgtgtgtgtgtgtgtgagcacttcgaaaaaagtgtacattacatttaggagagaaagcatgagagaaaataacctattttctaatatggaaacattaacatgaaaaaccaagattttcgttctgtgtcagatgacaaaagaaaaaaagggcatctgtttcacgctaatcgcatttcaccgcccatcgtgttggcatttgcataattattaacgttgatttttaagtgggatttcaatttaataccccgcgcataccgcccacttccggactctttggcaaaaaccaactaaccgaccgacaaactaaccaagtgaacgagccaccatccaaatgattgaaattaaaaccacaaacgaacataaaaaatcgcttacgttaaaagctcatacaagagagatacggtggagagctgctgttggttggaaaatcgggaaagccgggaaacaaaggaagggcagggggattgggtttgccggaaagcggcaccactcgaatgaattcacgtaaccgcataaaatcaaacgaaataagccaagcgccgtggaaaaatggcaacaaaatgcactttatgcgaaactacaagggaacaactctacgtgccactcaacaccgcgccctcaacccacccgacacccacccacttttccgatcgactgagaggtgtaataatggccaacggcacgcacattggaccaaccacaagacccacggacaaatgttccctacgggcttccatgttcccaggttccctgttcagtggccatcacacaatgctcaaatgcatctgggaagcggggtagcgggaaagcgaggaatcggggaagccggggcaaaatccagaggatagtgagtgaaaaaaagtggaaacttttaaccataaatgtaggtagccacccgaaatgggcagccgaaaaaacacagaggcaggaagaaattgccagagcaaatacgaaaatcaagtttaaatttggtgagctcgagtgcgaacacagagtgccggatagcatgacattgggtttttgggctgggaaaaggggtgcctcaggtgcccgagcagaaaatatttaattttccagtagtagtgaaccgagattgcgttaaagtttccattgcagctactcctgtttaatggctgagtaaatgcagctctgggaaaatagtttttcaatttaacaaaactcaccgaagctcatttgctgcattaaatccaagaaagattttagtaattaactttcgggggggggggggagaagctaactatgacttgccactaattgaaatccgaaatcaaagtatcaacgataataagccgaagcttaagcttcaattcgtcatctcgaaacatgaaatgcatttgaatagttaactatagacaagcctttaataaatggcttcacaaaaccctataagtaatgaacaattaatcaatcaatcggtgcttaatacccttttgtgtcagtcgcacaaaagcacattcgtaaaaccaaattatcttcaggtgcttgaaggcagtcgcctgaagcattcgaatgaatattgcagccgaaatcccaggctaatgccaaatagtcaaattcgataaacattgtgtgggctcagtcaattggccatggacagatatcaacatgcaacgtgcaacattcgatgccggtggcagatgacacggcaggcagcaaagattgctcctcccttgggccgaatttgcttgcatttccaattccgaatgcaactggagtagaaagacaataacccaaatgcaactgccaatattagttacggttggcaacagcttgccttcgaataaaatcgaaaaatgctgaatggattggcttcgagtggctgttggggacgacagacggagttggctctgaatagagagttgggaaacgacataaacgacatatacgtgacagaattgcaacacaaaaggcgccggaacgggcgagcactgacagccaaccgtcaaaaagtaaatatgcaacaaacaatagcattatataacttaaagtgcacttcgctgctccagcagcttcacaactgccagtacagtacaatggctcggaaatcggattaatgcagctgctgctcatgctgctcttgctgctactaccgacgctcctggtgaaaagcggggaaacccaatccgcaatccatagagctgcttctccgctaaatacaatgaaaaacttccaacgaaagacacacattcgcacggactcgcctctcgcatggcagggccaataaacaaaaggacaaaagcgacgcgtcgcgccgccccagagccaatcaatcgctatggcaccctaggggctcagaaccccatcgaaaaggggtatgaaaggggctagggggcgtagggagcgaggcgattgaacgcaatctgacacgcgaccagttcaatgcacgttgcccctcgcataggtcaaaacccaaaggcaagagcaaagtaatagatttttttgtacaagaacggaaaaatgaaacacgtgaaggaaaaaccagttccgaaatccatacttttgaaattttgaacttaatttgttttttggcgccccacgtggggcattttagataatgagtcttgcgattatctgttaaatatgacgaaactactgttataatcatcattatttttaaaagtctattccatttatttatttaatcttacagattgaaaataatttttattcacaatataattgtattttctcagtgtaaaacatcggcaaagcacattttcttactgatcgataaatgcatatcctctaaaaccataagctactcagctaattcgataagtgcacacaatttaatgcaatcagagcttacaactgatgatgactttaaattcaaaggtaatcggaactaaatccgagacccccttcagcttcgattaatggtggttcatgaaataggtttaggtctcaaatcaagtgcatcgaatgttgccccaacttaccctgcaatcgaggacgggtcgttgtctctagtcgcctaattcaattacataaaccgaacccagcagcagacagtattcggaaactttaatttgtatgcaaagtcaatgcgagtgaaggggaaatcactggatgtgaggggagaggggcgggacgtcatgcccacacgtagacgcatcgcagtactgtcatgtccttgcgcactgaagcgcttaatcctttgaaattgccacgcagcactcgcatgtgcatgagtgatgcggaatgttcaggaccccggggcgtatgaatattacgcatacgccgcgtatgcgtccactcataaacaaactagacagcgaaataacattcaattttatgcaaaagtgttgcataataagattaccagcgctaactgccgggcgaaatcagttaaaagccagaaaaaagatcagcaaacagagcccctcattcatttacaaataatattcggcattaaaattgcatggcataagcggcaacatgccaccgtccatcgtcccccgagctgaaatatttttctcatttccgcaacgggcgaaacatatttttgcgatttccgcacggccatcgccgggttcctggtgcctggtgcatgggccctggatcctgctgaatcctgaatactgaatcctggtgcggcagcccagcatgaaatataaatacaatacaaataaacgcgtgtcgtgcatattgtacaatctacaatacaatgttgtatttatttacacgccaacagcaacggcaaccagcaagagagccagagaatcaacagaacagaaatggcaacaaatgttggctatttggttgttcggcgcttttactggctggtcgcgttaacaatttgtcagccacccatttagccaagttagggccacataagctgggccagaacaacgacctcgctggaaaatgtttgcaaatgtgctgaaaatttgtcgcgcgctgcattaagctcgtgtgcacgggccgaaacactggaaacaataataaaatggcactataaactatctggtggatgggacaaacaagaatagggtgtattatgtgggcaggtcctggtggctgatttagatttagatatttgagcaaagagaagcaagaattcctcgggctgctaatgcatactcctgcttttatttaaaatgcacttaccctgttttatattttaggtaatagtagagatgtatacttttacttttggatattctttccaaagaacgcatgattaagtaggctttaactaatactgccagattttcttgcgaataagcaagttgtcttcacgtttttgatgtgcaaatatgagtcgtcaacttaggaaatgtgctcgaaatgatatgcatatttctgcttttcgcataaccccttcgtcattccatttcactgtgctccttgcaaaggaagcagtgcaaagggcaaagagcgctgaagcaatgaaatgaatttgcacgcgctcataaatattttacatatgcatattggccaactcagaaagccgtaactcagttcgcaacctgaagatgctggctgcagctacgtgaaatgaatagatagacacaacacggtctctcggaacgaggctgcaaattattgtgacataaagtgctttgacagcaacaccagttccgagttcacaggacccaaactccagatccatggccaaagtgcactgtaagaaatatctaggtaggattgtagacatcatttgtcatcaaaagtgcttaaatcaaactaactattatactatttcatacattttctaaaccaaaagaaggtctttaggaaaggtggggaaagcatataagaacgaatcgtactgtatgaacaaattaaataagtttaaattaaattaatataagtaaaaagtttgaaaaatcaaaagaaattttgaactctttaattcattgctatattcgacacaacaccattttctggagcctgtcttttttttatttgcgtgcagatcctgggcatccacatccatatcctcatccacatcctggctgacatttagctggatggcgctgctgtttgtgacattcatgcgctacatatttcattgcacacttggaggggcgtgtgccggcattgggaattcaaatgctgagccgtgtgattaggcggggtgtcgtcggtgtgtcgtggtgtgcacatgacatatttaagtgggttatgtgccggcaggcagtgcgaacatttttgctcattaggccggggagcggggaacggcaaacggttgtgggtggtgaaaaatatcgagaagatggaaaagctcgtaagtcctcgacaaatgcagcacgcactcgcatagacagaagcaattactgtctgcgtaagcgtcttggtctggcagaagcctcgtccttattggctcgtcctggcttatatgcatatgagccaaatgcaaatttatccagccgtatacgtttaaagcgatttatgcctgtatcccagtgttttttgacagcataaagtgtgaaactaattacaatttggccaattcattcaattagcacagaccgagtggaggggcaggcttccacttaaattgacgtctcgatttaattaccaactgtgagtggaaattttgacttttgccggaaagtctcgatttattcatttggaaagcaagcaagcaatcatcaaggaatctctaccgctgcattggtgattaatcacgttgcataacttgggagccccaagtgtttttcctatccgatttcgcaacgaaatgctgtaacgtaagctaatgagatcaacatctgcccattccattcgcttacgcaaatcacttaagacggcggagacaacgccggggcattttcctatccttcgccttttccacggactttctcgcgatttccttctgactttcctcgcacaggacacttttcgcttcgtgacggcttaattttttcgttatttctttcactttgcctgatccaaaagcaattattttccattcaacgtaataatgacgcagacccaacgataacagcgagtgtcctgtgcggcgtgaaagtgaggggagagaattaaattatgcgctggactttattttttgccgacttctgaggctgaagccgcaggcgcagacaacacttacaactgccgtgttgctggcaaaaaaaaaaagagaaatgacattaaaaaaacaaacaacaaatattatgaaaaagaggaggcggtaaaaaaatcgcacaacaataagtgctggcggcaatctcgccgtcgaggtttgttgaatgtagccataaaccggctcagtgcacttgatcgacggggaaaatggctttagctttggctttcgaacaccccgttattcgcccttttaggccgggctaaagtgtacgcctcggtgactttgtatgcgtctatgagacccgctcgtcctgcgtcccgcgtccttcgtttgtatacacatacatactaacatatatgctgaataatgtgtgccatattttgtacgtattttccgctccactctggcattatccgattcgtctgctccacactccatttctatggcctgcacattataacaaatttcccgcttgcataagcaacacactcgacatgcatgtgtcgtgtgtgtgtgtttgttttgtttgcttgtgtgggtgagggagtgtcctgacggctgcgagccgtgcgtccatatttttcagcgatgtgtgcgtgagcagaacagcacaggctattcaaaaaaaaatacttactcatgaattttgctgtatttcaatattctataactattaacaaaggtgcaagagatacatgttaaatttttgaaaccaaccatatgtatatgtgggcattgtaaattatgtttatgtcatcccttatatcggcacatctttattatcaaataaagcagatttctcccttcttcggacaatccaatctgtcatcctgttctagcttatcacgcacccatctctaatgggattgttatgtaaagcacacaaaaagctgctaggctagcctgatgccatatcactgcataacaaatggtcgccacacatacacatatacacccacacaaccacacactcgcacttggggcagcagcacaacatgcttagaaggaaagggggggagggaggcactgcctgatggcggcagtccataaaaatggaacggaactgcaagtaaattaacaggcaggacgcacaaagatgaaggcgaaggcggtacatcctgcgaatctgcatgtgtgagtgtgcgagactttacataagcaacacgcccacgctttttgtagaccattcgaacgcccgttcacccgcccacccgatttcccatttccccatccattcgcatgccggctacttaagttacacaatgacatttttcaatgtgtcagaattttattgttgcaacttggggcattgttgttgacaactgacatctttctttctgcagctgtcagttggctgcttttgttgccttcgcttcatggctgctgataccgtagaagctgtcgccactgtttctgctgcttttgctgttttgtcttggctggaaatgttgacaactgttttgccacttttgccgtaattgaaaaaatgtattcaaattcactgcctcggctcggtgttcgagttcagcaaaatgtaaatacagggctgatagcacgtagatttgtatattcagcagaataatcaaatggtgaaaataaaacacttccaaggctgcagggcaaggcaatatttaaaaacaaaaaaatgttcaaataaattgcagttgcaagagcaaagattggcactttaaattatctataacaatgtgcacagcaatgtttatcttttaagtatcaacctttggctcaaccactacatttattcgaaagtttgcttctctgattcggattctgattctgaatccaattcaatcagttttaagcaaacaaatcggtcatatttattgtattttgcctttggtctcttctttatgatgcggctgctttgtaatttgccaaaaatgtccgtaaactttgcccaagaaagtgacggctaaaaggggtcgttaatggattaagccaagccgtacaatgaataaatttgtcggattgcttgacaagagagatggcagccacaagaacgtttctttgcagataaagccctccaaagttgcaaagccgaaaaggggagagtctggcgcaacatttcaatactttcgcactcttgacatttccgccggtccttctaaacggttgcaaatgccaactgtcaactttttgtgcgtggtttttgttttgaaacttaacttttgccgcttggccagttcgcaaagggacaaaccgaaaatatttgccataaaaccagaccgaatccacccatttagacccattcagttggtggccactttgattcgactttaagctgtgcgtgggcctcaactgccggccactctaatatccaattttgcaaatcagcgtgcaaattacccgagcgaacggaggctgatttgttgagccgcctcctcccggtaatttgccttctggtccatgtagctggcaactgtattaagttcatttttcatctgccgctcatgcattaagcagcgaagtgagttgcctccaggactcacacagatactcacgttaagagagagtgtgtatgtgtgtccacacacacactaccacatggcgagttactttttcacttagggtctttgtgtgctgccttttggcatgcaaatacatcggacaaggcaacccgaaaccgagaccaaaaaccaagccaagttaagcccaacacgttagagaacacagcgcgcacaatttgctaggagccctcttcttgcgtcccgccgcccctgaaacaataagaaaaatgttcaagtgccagaatgtgtgcaaagaactcaagtttgccgcacacaaacgcgcagagcaggcaggacgaaccagcaaggaccaaggaaaccaactccaaactccagcttttggatcgtgggtccggctgcaagtccgtctgcatcttcagcagtccgtacagagtggaaaactgattcgcaaatacaatggagcccttttattggactcgctactgttatacagtacaggtccttggagtcctgaaggcgttttatttcatatattgtagtacggcttcttaatgaatccaaagcaattgaatgcaatcgtttcgatttaatgaaatgaaatgttttgaaaatatatagttaaacaaaatatatagttaaatttaattagtacttgatcctagcggataaattatacatatatccagtcccatgtttgaaccagacttttctcaccgtgcatggcattgtttcgctgcattttcacccatttcgccgcttgcagataatttgaatttttcccatttgcctggcttggctgttgctcctttcgagaggtcctgctccgttttgggactcattccgcgtcctgtttgctggtggcaggtcagtttcggttcagtttcagtggcatgcctcgccgctttgcctgttttaagaactgtaaattgctttagttggcgcacattttcatcgcgaaaagcgaaaagcgagggaaagcggactgccgtatttatggatgcgcggatggtaatagcacagtggttctgggttttgttcctctgccagttatgcaggaaacttatagcatgtgcttatctatgcaatggaatggcagtcagtagttctcccactttttgccctgttttcttgggccccctttatttgctcacagttgcacttctttggcactcgaaaaatgtttcggaaaatttcttgggccagaagttggtggcggtgagagctgctggtgaaaattaattttcagctccttccttgtgggttggaccctcaataaatattccatttcgattccttaaaatgcataaattccatttctggtattgtttaaattgcaaggcaagctacttggcaatttagttacaactctttccccaaatataaaattgattagcagctgcagttacttaaaaaagactactctgcatgtatgcctttaacacaaaactaagagtgtaattggatttttaaatatgttttctaacttcaagttcctctaaaggcaaatttgtgcccctattttataatgaaatgcggtatgcagtcatttatatggttaattgtccactggataagaagtccacttttcgggacaatcgcctacgaatgcagaatagttgccgcctcttacacaacatgacatataatgcacttaaaacttcagagatgtctcgtcaatgtttgaatatggcaccagcagcaaaagttgcagctgcagctgcatatgcaactgcaacaccccaccagcgactggtggcacttgcaacacgagcggcggcgacttgagtgcaaaattcaattaacttgcttaagcacggacacatgcaaaccacacacacactccaaaatgcacatgtgggtgagctatcaatttcatgtccaatcaacctggcagacaggacacaccacaccacatcgtctcacccacctacccaccaggccactcttcattttccgggtggcacaggagcatcggaatctgctaaaggccaggtgcactgccatggcccaaaaccccgggccacttaagcagatgtcagcttgatttttgcatatgcgacagcactgggagctccaaacctatatgtatgtatgcatatacagctcgatggaaaaaccttggcgtgattccatacttttcctgccacaggatctcgaccagctgcggcgcagctcctgcgtgtcctgcccagtctgctaattgttttgcggttcattgtttaattattatgtgtgtgtatatgtagtacacgcgtgaaaaatagttatgtagtccctacaaaagaattccaacagtacaagttatctcacaagagttttaagaagagaaactccttaacataagtaaaattcatgagaaaaatacttacctctttttgattagcttagatctagatagttagttaatttctgtttttctcccagtgtaccattgactgtttgttatatttagtagagttcattgcaagtgcggtgtttgcagccagatggctccggcgaagttctggccgagctctaattaaagcgctttgcataataaatcaggcgtggcctgcgactataattgtggccccgcctgtggtcgcagctgttcgttgtaacggcgtgtcactgccaaatggcctgtcaaataagaaggcattttgtccaaatgttgccgttgctagcacacgaacaactggttgggcaaacaagtttgacattttatgatatgaccacactgccatgcaaaccccccaaaaaggcccaccccatgaaccgtgcagccttccttggctgtcaattacatcaaaattgtgaatttctctcgttatgcatttgacattttcgactcaatataaaacggaaataactcacaaagtggagctggctacgaattcgatccgatatatatacaattgaatctgtcaaacaacgctctgtacacctttcgcatgccataaataaataatcaatggatttgtgcccatttcaagtcgtagcaacctcgcaacatgcggcgtatacgtaatatgcacagcaattcgtttgcctttcaaaggataatttcactttgttctgatttataaaacggggagtgacgaagaaagaatggatattggaattctaagcatcgggttgagttaaattgaattgaatgtttagtgctctcgataagccgttaagcctcgggccaaaatagctaataaatgaggggatattaattcatcagtttcggcttaacaagcgtacatcacacattctacaaggattttcagcgccacgggaattcatgtttaattcacagtgagattggaattcatttgagttcgcttatctccccagaaggctaaaacttggctttggcttgcgccaaaaactgcactcaaagcgattcgactttgtgaccaaacttttggcaaacttctcgttggagaaaatagaaaaatcaacaccagaaataaaaatgcaaagtaaatatgaacacgcaatgccaatcccctgcgaataaattggcaagtggaaaatggagagagataaactgagttgaaataaatgctttaaacaaacatatacaaaaaagtcaaattctgtgatattcacatttttattctaagcaaaaattctttaatttagttgtcagttcaatcgaacttggtgcttaaatagttttgctcctaaataccttttatgctgctgccttataccaatttcattatcctgtggcgggacaaatgctatccgctttctttgggattggctttcgcccaccagttattttttccccccggctttggtttagtttttctcccatttcttttcacctccaccaactgcaaggcaaacgaaccgaaaacccaaacagccaaaggataaagccgagcagaatgaggcaggcagcacaaactcgtgttaactacacatttgggtatttgtgtattaacactttgccagggagtcgcacagaaggatccaggactcagggctcaggacgcaggactcgggactcgggatccagtggagcaggatcgggagtcgggttaacacaaacagacagtggccagttggcaattcgactgatgttcctggggttcaggggctaaagtttaattggctagtttaattgtcagagggactggcaaacacccacactcacacacacacactcccacattcacacacactccccaataaagacaacaaagaaatttaatcaagcgacgaacaattgcaggggaacataaataaaaagtgcaaacgtttattgagtttaacgagcgccgtctgcactcagtcgctcttcaatgcctgcatctgtgtgcgtgggccgctatctgtgtgacagtatctgtgtgtacatgaaaggacttttagcgatgatgatggggtcggggattgggaaacaccaacaccaacagcaatagcaacaacaacggcaacggcagcagcttaatttaaatgtcacctgcactaaacaaatacgccaaaggggcggccatcgggggggcggtggacaaacagagtatgatattgttagtgacactctttcagcattaagtgtgtacatgacaagcacaccatcacacacacacacaaacacacccatgcgggactacaaacagcattacatatggccaagtcccgggaaatgcacttcagaagccactcaactcatcgagcaaccaatcgaacagataaacaagctcacaaaaacatttgggtggtattttccgagtgataggatagtttatacaaagatacgcttgctaaagaaccagaagagtccaaagtaaagatctactcttcatatgaatagatacattattataatgggcttgaataacacgttagtagtgttattgtacaaaaacagatattttttaagctggtcagtagattgacgccatcttatccattttctgcgcttcctgcagctgcttaaatatttagattgcatgaaattaaaataaacaaagtcccttgagcaggacttcagccagctccatttccatcatcattatcgcagccagaaatcataatgatgccaataaaaataaataattgacaagtcggcaaactgtgcggcgatgacactggccatttggctaagcagaaacgtcaaagtggttagcagtgggtggtatttaccaatgggtggggcttatatatatatatatatatatatagcatagtctaatggccaggacttagctctccagctctagatgtcctgctccctgttccctgcgtgtgggtaatgggacgcgtctcgcgtcccatatcattatgcatcattaagttgatgggctccccggcatcgagacacttcgattttatggttgtagcatatggatggcggtccagtcgctctgccaactgctccgccatcgctattaaccacatattactcatcgaacaatgtttttgtgggttcatttggtttgcccatagttttatgcgcccaactatgtacaatggactaatattttgatgggtttttgtatcgttatgtgcatttggaactatgaaattttgtaagtgttccgtttcatcactaaaagatgctcaatcataaaaataaggtactgttaagatccttaaattctaaacctattaggatagacattctgtctgtgggcatttcatttgaatgccacatctataaatgtttaaatttaaatgcttgccaaagtgaagttttaccatcgattgcataacattattggtcgcatttaatgtgccgccaggtcttccaattagtacgcaacctttgaggtgaaagtataagcttccttcgactggctgacgtaagtccttgcgtcattgcattaaggattctcgactgtactccttgtttgccctcgacgcgctgctcctttctgctgtttctgtttctgtttgccttgctctgtttgtttgtttgtttgtttgcttgccataagttacccattggctggcatcaacttttggcacatttgtttgacaaattgttttgttttttggccccgtcgacgtcacttggtaatcgatacagaaaaggatacaggacccacacctcaattcccccaatcagttgtccccagcaaccagttttcgcgagcttacgttgtcagcaaaataaacataaatatatatatatgaaggggtgtataacttatatacacatatacgggcagggagtgttttcgccatatacaattgactaaaatttcaatttctttctctgctttctttgcaggtgagtttgctttctgagacacttttcctttgcctttgcccggcgggttgtaaaatcaaagtacgtacttcggctgacacctccgccactcccccaaaaagcacaatggaaaaagcggagaagccggtgcctgaaatcaataaagtcgaacgtatccggctgatagctgtttaatgtttacaatatgtctttatcttcccactgccacccggcgcacttggccaaaacgcttcacccaccaaagccatgactttgactttaccttgggccacaagtgccaaactggtggctcctgcagcaaatgccatgcaaagcgcttcgataatgccaagcgttatggccaagtgcatctgcatctccagctgcagttgttatgatagccctgggtgtgaactcctggcaatggaaacgcactcctaatgccaaacaatttagtgcaatgtcgacgccccggcaggaaaaggtatccttcgttatccgatttgcatttaggtgaatgcgctcaaatgtgcaattcaatttgggaaactccatccaaacaaacaaggcagtacagccagcgcaatacactgcaagaaagattgttacctaaagaatataacttaatttaccaatcttttttaacaacttcttaagtgcttaggtatacagatacatctatatcgtatcttataactgagcttgcctaatgccaactatataccgctatagaacagaactctatcaattttgagatcattttgttgctgtgcttttggggggcaaaccgaggacacgggttcggcatgcggcatgttaaccagaaaagcagcgcagaaagcagcttagcctgcctgtgaaccggagaagaccgcttgccggggtcgacttagcgcataaaaaattcaaagtcagtgaaacgcagcttaagctgttttttacacagccaacaaaacacacaaagaggggcgcacaaaatcgggataaacacacatgtacaacacagatgccggcggatgatgatgggttgcaggttgggaggggttgtgaaagtgggattcggatacgtattgggactgggggtcaagggtcgagttttcagggtttgcaggctcttccgagggaaatgccgcggaaaagcgaatggcaaagggatgggaaagaggagacggaagctgcagcataagcaaagtagattaaacaccgcaaagcagtaagcgcccaatgagtcgacagtggctagtgtaaataccggcaaaaagttgctttttgggggccaaaagcgaagcagggaagagcagagcgaagcaaagccgacaaagcgcacttaaaaatgtccaaaagcgaaaccaggtcgtcctgccgtccaactgatggaatctctttttggcccaatccctgcggctcactgggcttaaatatttagcaacagtttgcagtggggaagtttttcggggtacgaaggatggggtggtccaaaaaagttatagaacacatgatatatgcctgatatttctggcccttttgggacgagccgtaataacgtaattaagtggctcacttgtcggaagttggcagtgaatgggtttaattttttggttactacatcgaggcgaaagcgaggcgaaagtcagccagtggcagtaataatgcaatatcacaaactttctaatgagttgtggcaaatatttgcagtaaaaagcggaaacttttgtacagcacgagaaacagattactattaaaattgttaacaatttcagtatactgtaaacatcttttgaaatattacccaactttcctcttcgcaagtgtgagagctcgttgttaaactaccaattatgatacgaataagttgatgtgcgtttcatatttatagcacttcacttatcgggttttttttgtgattttgcattttattgcccttttggcatactagagtactcattacaatataataactaattttattaaaatgcaactcgagcagacaaaccacagagtggaaaatgagaatgcacacgttaattatgatgctaaaggggctttaagttatttgccagattgattaaagtttaattttcaagtttattgagacgcctgactcgagacattttaattgcatgtatagatggcccgaagttatgcaaattcatttaaacatttgccactgcctgacgcacagattgcatattaaatatgcattaaccgcagttcactttgtgcctttccctgcttcttggtaaccaccgcatatccgcaggataacagtataccaggatactacccacccatgcgccgccccaatttgtgcgctacacttttctccgcccggtaatgtgttaaattttcacagttgaatttgcgtctgtgtgtgcgctgagtaaatttgaatttgattgaaaagcgtgtgacagcgcttcgatccttttacctgacgaagggtgtcgcctcgccacccgctttcccggccaaatccggaccacacccacaacccacccacatttgtcgaagtttagataacgttgcgcatcatttggcacccaggcccgactgcttactttgccacgagatgtggtgcgccttcgcttgtcaaatggttttgtatagatttccctccatagtttcccatttccacggaacaaccagccatccagctcattccctactccttccctctagttttttttttctacctcgcaccatgccatatagaccatgggtttttgtgacagcttgttagacgtatcctggcagttgctggaaaaaccggaacagcaatggctcgaactgaatggagcattgtgtcctgacggcgatgaatgtaagcgatttattttatgatttattgcgtatacttattgtgtatgctgtccaaggattcactgcaccaacacatccatggaatctgcgccccattgttaacacttgcaagtcggccgggctcggcagcagatcctgttccgcaggagcaggagcatttaaaaattttcattcaatcaagtgtcaaattagtggcgattcttaatttaagcagccattctacgtcgagtctcgaatcttttcacccttcaccccagcacagccatcataaataaaacattcgactgccactcaattagagcgtaagtccggtccctttttcggtttcggaacgaggattctggtttggattcagaccctagtccgaatgcccagcccagccaggacctacaaatcaaaaaatgtataaaacatgcaatttgtttgccaaaagtcgtgcgtaatgtggtcccatcccgggtcctttcttggtttcccaggatgcggacttggtccttccacttcaaaatgaatccgttcctgttagttgttggtgttagtgtttttgttacctaagccccggcaaaaagttggcaaatgaagtggcaaaagttgcttgtctagacaaaaagtgaaaccgatgcaaagttagcagcattttgtcttgctttgactcactcaacctgggtgtgatgttatttcgatatggtatccatcacaacctccttgagtgagcgatagcaggacagagtatccacgaaactaactggcaccagtgaaatacatgtaataaaaatattaacaattgtatgtgtgtaattaaaaatcacgaatttatattagaattaggagccttattcacttttactgatgcatttctatatcttgtgcttgtcaattaacttaagtaagtaaacatcgaatgaaatgccagcaagataattataaaataaaataattacttaaaaagcctcttttgttttcctgactatttatatttgcttaaagtaatcaaatcaaatgtgaattgaaaacaaacgattcaggacttaaaccatcaggaatttagaggccgcgggcgaaattcgaaggcatgtcgacttaataatgcttaatggcaagaatcatttcgggcaataaattcataagtgcatatggcacactcgcagcaaaagaaagccatttgatacagccagctaccgtaacttggaggctcctcctgcccgccactccaggatgtcgttccccgggggcatggtatgggaatgggaatgggaatgggtatggggtatgggtatggatggcatggcatattccgggcagcttcttgtggcaaatatttaccttttggggcctttggcatcccgcatgtgtcggtcgtctgtctgatgctggtgtgctctctatgagaaaataacatttgcaattttaagcacttgagacttgtcactgggagctggctcggatatcagtatatgtagcagtatcagcaaggatatacccctgtcaatatctcgcatctctggctaatggcaaatttgcagttattactctctcgtactttttcgttattactcttgtggccaaattgtgattatttattaattaaatttgttatgacaacacaagttgcaaagtcatttgtttgcctcgctgcgtgtggctttccgtggctttcggccaaaagcaagggaaaaccacgtaaaatacaagcggccagtttgtgtatagcccgttcgggctattatttcaagactcacccggctggctggttgtcctgctcttaagctattttattgagttttccactcccaaccgtcccttatcaaaccctttttggcccacgcacacacacacacacacacacatcgcacaacaaatcgcataattatgtttgtcgatggggcggagttcagattttcgaccccgagcaggtgcacaaaggtaaaataatacagtgcgccaggcattttaagctggcttaaagacctcggcaaagtttatccgctggctttaaattaaccccgatacggtggctctttggccataatatccagagtaaaccaacttgagctcgacacttatgagacatgttcctgccactttgcacttcggcgcaaatttttggccgccagcacttttcacttttcctctcatgtcgaagtgcgtccagctgagcaacaagagttatgtaattgactcgaaataccctcggaatatttgaaattttaagcagcagcagcagcaaagtttcgcctgacgacagggaaaaattgccgaaaaagaaagatttctcattttccaagcgttttaatttgtgcgaaattaagcaaaaaataaactcattttgctagctgcagcagcagtagcagcacaaacatggcgaaactttttcgatagctgtctgacaacaaagcgaaaatctaaaaaaaaaaaaaatacaagtaaaaagctggaaaaactttcagcggaagttgatggcaggaaaactcaagtaaaatgtgcacgaaattgtctctgcgcgaaagaaaaatctatgcgattgaggagaaattgctaaattcaatgcccgcagtagtctgagcctccggccttttccattacggcatcttcattccggctatggctacgggcacataccactccccccgcccccgccacctgaccgcctccgcattttggccgtgacttagtgccgacttcatgcaaagctctttccatccccgccgatgccgctgccgccgacggtgatttagttgttagcctgcggacaaacatttcatggctcgatgtgctcaattcaatcaattgccatcgacagacggcagtctgcaaggaaaccaccacaaggatacgactatcatcctatcgaccgccaagccggtgcaattttaatcaaaattcgcatgtatgtgcgccaactgatgtatggcggatcggttggcttcagttgtcacaggttggcgtaatggcgacatcgcacaggatgagcaaggatatcggggatttgcgtgcggctcaagcctttgttagcccacttgatattcggcaacgtggtgcattaaaactattcttaaatcggcgaaatcaacttaccatcagcccaagacattcacatttaataaatatatatatatatattgatttttaatatttggtgtcgtttaaatcttcgcaatcaagtctttagatccccaaaacactaagacgcaaagtcaaattctcctgaattgtaataatatactcctggtattatatttcataagtaaatatttgaaacgaaaatgtatttattttacctacatatgagtaggtgtatatggttagttgttattttttttatagtttgatctcattcaatcttttcacacatgtgctgttgcttcaaatctttgaacgcggattctttcaaatcagttggacctttgagtatatttttgtaagcgcgtaatagatctagaaaattaactggttgttccgcccacttgtttttcatatcctcggcccagttggctttcaactcgtccttagaagtaaccacattcagtaaaagatctgggagaactatcgatttttcacgagccgcgaacaaaaagcctctgaagttttcgattttttcttaaagaagtgatgtgatctccttggtctaaatagtatttcagaaagttcacatattcttccctatcttggtcgtcctttgtaattttaatctcctgctccagagaagatttcaaaacattcacatgcatttcaatcaagttgtgtcggtatgtatcgacatcattaaaaaactcgcagagggtatcatttttttcattcaagggagacctttggaaagtgcattaaaaataaaaaaaatgtattaattttttttagaaaatgctgaccaaaaagtaatgaacagaattgatagcattctgctataatttgtttagaaatgtgaggttctttaagttacaacgccttatatagaacctgatttctttactatcgcgaatttctattaataccttggttcaatgacgtcgaaatggacgtcaatctttgtgatgcaaccataagaaagcatttatcgtatgattgtattatatatgaaatttgcaaaaggcataatttctctcacttttttttagccttacatttctcggttttttctaatttagtcagctctcatgtttaactttaagcaattgtagaactttgttggaaaagcattcgactgttggtcatcacgagagtagtgaggactatttgtcagtgcaaaggactcgcaggcaacgcagcccagcgatttccttttgttattcacaggccatagagagtgggctccatccatttggctaattgttcagtttgttttacgtgtaaggctacaaattggccgaagcacacgtttccccagacagctaggtagtgcccgttgtaagagaccgaatgcacgttccgcttttccgggccgccacccacccatccacccacccaccgaaatagccaggaaaaggtcctgccgcctgtcgggttcataataatttaaatgctgggcacacagagtgacatggtaaagacaaacagaggtcaagctgcgtcagtggcgctgttgcagcagaagcaactgcaaatggctacgtgaccggatgcagtgcagcggtttgcatttaaatccaaaggcggcatcatcagaattagcacgacaaagggttgccagtcggagtgtcctaacaaccgggggatttaacattccggagtgaacggcaaccggcttgagttaatttgccctggcaagcaacaagctctgcgcaaataccaaacgacaaacggtccacagttctgccaccatggccatcatgcccacccagtgcaagccccatgccaagaccaaatctgaatccgagtccgaaaggcttgggcctttcagatcaacagccgagcaaacaaatggcgttgcaattgagcacgtttttgtcgagcaatggaaatgaactgcgacacggtgattcagtttggccagcgccaggagtccaaatggaagtcggagtcaaagttcggggctaagttctagcccgtccattctgcccagttcatgtggcaggtcaagtggcatgcggcagctgacaggacgtgcgcccagttgatgttttcacaggatatatatgtgtaccaccgagtgagcacactgctgcgggatgagtggatgccgaactgcgctgattccttgtgcgcattccgacggaaaatcaaaagccattaggaaaatctataagaaaattgcacttacagcagctctggacatatattacacaaaacacaaatcaatactaattcaaaatcaaatggtttccaagcataagacaaaaaaatgtgggcctttttttgagcttcccgttctgtaatcagtatgaaatagcccatattcgaagccagacaatctacatgtcgtggcttaatggatcgaaaaattgtaattggaaacgctacgattccgtaggaacaatggaaaactgctgttccttttaagtggggcgatcactgcgtctgcaagtggctagatgcctaaatgcatattgaggaacagcacgcacctagagaatcctggccaaaagacaatggctgaaagtcaaactaggcaagggaataaaaagcgccggcaaattggtatggagaaagcatacggcagagaggcaaacaaggtcctgggtaaaccgcaaaaaggatcaactttcggcccctattttttctgcgttagttaacagcagcaggagcagccacagactgggtccggcataaaagaaacataactaatttgcataaaatgcggaaacacggcagcagcacacagatatctcagtttgtccggagcggcgggagtggaaatacggaaactttgttgacggaaatggggcaaagtcgccagtggagagttgacgccaaaaggcaaacccgctgcggtttgagccaggttttggtacttctcaggtactatgtgtgtttgcccgactcttttagacagagttcacaaaatactaaactaagtgcaggccaccaaactccgacccgccgcccatgtatttaagtgagcgaaactttagcatgacaaagtgaaagtggagtgtgtgggcgggtgaaagttggcactggccaccatattagcggtttgcaaaatattccaagataagacggagactcggtgcctacaaggcgtgcacggaaagaaaatttgtttatatccatagtaggacaatcctaacttgtttgaaggttttgtaaaggttaagttgggactttggtttacttattataatttccatcaggtataattatgccaagcattcaatgctgccacaaatatataactataaatataaatataaatatccatgatatatataccatatcactttattctctttgtgtgtattatgcaaaggatgaaacccttacaaagtggaatatcttagcatgctgatatcatgtttcttccttcgtctttccttgcagcatggtcaacaggtcgatgcccgatgcctccaaagtcgagagaatggtgcagaccgccctggacgtttgggcgaaccactcgaagctgacattccgcgaggtctacagcgaccaggccgacattcagatactctttgcgcggtaagtactccgaaatctatggggattgcgaatcgggcgattggggatgcatggatacgagcactggtggtaggtggtggggaagatcataaaaaagcgagtctttagtgccataaacaaacgcacataaaattgcacttaaaagcaggcgaacgataaataagccaagtattaaatccatggccatccaacgacgtcgatgatgaaatgccaccgatgacaaagtcgatggccatggctgccgtgtctgaatcaaagagtttatgtggcagctgcttgttcttagataagctgtgaatatgatttcccccttggccatgctcgtaattccactggaacaccgaactaatccaggacatctacgctggtccttttctcttcactttgcaggcgcgcgcacggagatggctataaattcgatggacctggtcaggtgctggcccacgccttctatcccggcgaggggcgtggcggagatgcccatttcgatgcggacgagacgtggaactttgacggcgaatccgatgatagccatggtgggtgcagttcatcaagtccgttggccaggccacataataatgctcttcttttgacgttaactaattgcattagagggcaatagtgttttggcggcgctgtctggtctgcggtttttttgggtttgcactgggaaaaattcgattatatttaaatcgttagtttattaatgaagttgtgtaataacgcaaaattgaccgctatatgtttgctaagtgtggggcgtttattacacattttcaatagtaatttgtttgacaaacgcaacttattgctatctatttgattattcatttaaataattgtagtgtgtatggcaaaataatgaagattttttgtcacgaatgacttccacattttcgttaagtgcagggcgtgatacgtacttttatgaatatcatttgaaattgccatttatttttattaattcgaaaacttattgttagtattattaaatagcagtaaagcacgatgtgcaggggatgctgactaattaggttgtacaatgcatttgttgtcataatcgacatatgtttttcgccaagtgcagggcgtgttacaccgaaaccacatgcgggcaaaatcaataaaggctgcatacgctgctgcggtagggaattgggaataggtcgggaagttggcccacactgatggcgaagggggtagtggaagagcagaccatgactggcgacgcgttgcctgcagcctgccggttgcgttttgtaatttagcacaataaatcgtcaggacataccccaaagaccccgtataacccgtagacccctgaaaccgaaaccccacggaccccgaattgcgcttcggcatttttaatggtttttaatgccaataaaaaattgtcagcatgacgcgtgacgttggcagccattttaaaatgttgcaagcgtcgccatttttatgccacttacaaagtcgtcaaggcgacgagcccgtcttaaaccccatcctgcagccatcctgcccccttcccacccctgtttggcccttttttctaccgccattaaccagtcagcgtatttatgttgcattccgtgtcctgtcgttgcaggaaccaattttctgaacgtggccctgcacgaactgggtcattcgctgggactggcccactccgcgatcccggatgcggtcatgtttccatggtaccagaataacgaggtggcgggcaacctgcccgacgacgatcgctatggcattcagcagttgtacggcactaaggagaagacctgggggccatacaaaccacaaaccacaacaacgacaacaaccacgacgaccatgcgcgcgatgatttaccgggcagataaaccggcctactggccatggaacaatccaagcaacaatcccaacaatgatcgaaatcgtgccagggagcgccaggaggaggagcggcggcgccaggagaaggagcggcggcgccaggaggaggagcggcggcaccaggaggaggagcggcggcgccaggtggaggagcggcagcgccaggaagaggagcgttggcgtcaggagcaggaacgacaagaggaggagaatcgtcggcgcaaaatagagcataaaagccagtgggagaggaatcctagcaaggaacggaatcgtcccagggagcgccaggagatggagaggaggcgtcaggagcaggagcgacaagagcaggagcgacaggagcaggaggatcgtcggcgcgaaagagaacgtgatcggcagttggagtgggaacgtaggaataggaatggagcccgggaaccagtcactcccacggccaataccaccccgagaccaaccaacaagccatatcccacggttcaccggcagcaccaccaccataacaagccgcggaaacccaagccggactcatgtatgacctactacgatgccatctcgattatccgcggtgaactgttcatctttcggggaccggtaagcttttcaactaggaacccatgtacattacccacgattacctattaatcttgttcgacagtacttgtggcgcattggaacttctggtctgtataatggctatcccacggagatcaggagacattggtccgctctgcccgaaaatctcaccaaggtggatgctgtatacgaaaacaagcagcgacaaattgtgttcttcataggtgagttagagattatggtctagagattcgatgataaacaaccttcattctgtcatttttgtgccccaggtcgcgagtattatgtattcaactcggtgatgctagctcctggcttcccgaaaccacttgccagtctgggtctgccgcccactttgacccacatcgatgcctccttcgtgtggggccacaacaaccgcacctacatgaccagcggcacactgtactggcgcatcgacgactacacgggtcaggtggaattggattacccgcgcgacatgagcatctggtcgggagtgggctacaatatagatgcggcattccagtacttggatggcaagacgtacttctttaagaacctgggatactgggagttcaacgacgaccgcatgaaggtggcccatgccagggctaagctctcggcacgaaggtggatgcagtgcgcccgcagtgctaatgaggtggacgacgagcagcgctggacggcgtccttggtatccgagggcgaggaaacggggagaagcggctctagggagctaaggatcaaccacttcattctttcgatccttttgctagccatcgccaactggcggagttaagattgaatgtggagcgtagcctaagaaatgtctaaaactaagagagatggtttttgtaaccaaaaatgaaagaagcatattggtctgttatgatccaattcttcaaggagctttgcgaagtaaaaaccggtagatctagtattcaactactcaaaaactgcaaagttgcaaattacttaggtacaagaagggaaacttaaatgtaagcttggccaattttaaattggaaatcaaaaagtgtttaagattgagttgtaaattgtagcggcctgagcagatttaatgcatttttaactgcagagcgcagctgtgtgacagtctggcgcttcaatgcccccaaagacgacaccgagcggcctttccttagatttaaggaaaataaatcaacacaccagtgaaagtcgcacatagatgacaaatctgcgacttcaaactgaccgatttattcatggacacttgccaattgggcacacttgcgccatctattggacaaatagcagggctgttttaccagatctatatacatatacatataccgtacatataggataagtgcacaagactataaggtaactcgtagtctacttaaacgtagaaacaaatatgttctatttgtacacagaaagtatcgaaattccaatgttgaaattcgagaccactactgccttatgaataagtaatagctatgccttttattgaagaaagttggaccgtatggtccgctttacttgtttccacgaacctttctaattatttatatatatatatatatatgtgatattataataaattctgagcgattgtaaacaaaagataaactgaacaaaaaactatacccttacattttggttagtttttagttcaatttaaacaagatacttaagctgcaaaatatcattttctacacgattttacccaaaacagaactatataaataaagaaatatataatgcaaaattccgtcatttatcactggttttacgttattacttcgtttgtt

SEQ ID NO: 2399 - DNA, 4486 bp, DROSOPHILA
gtgtgacactttcagagcgataatgagccaaactccaaaagtgattaatggacctgctaaatggaaatcactcccagatggacacatcaaggcgagacgagagcaatgcacgtgtccagggaaagcggagaatcgcatgcactggatgcatattttaattaattactcggacacatttacatctgcctgcggatggggatgggggaaggtcaaatgggctggcatttcctgcccacttggccataagtcgcattccggtgtgcgtcactctgagaaagtttggggctgtgtaaaacacaattagtaattgctttgatttcctgcctgcggaggagcgtgttcgatttcgcacgtttgagaaatggtagtatgtaaatcgcatgtccgaccagtggcgcacttccatattagagcagccgagccgatacacctcaaattgagtcattgttcaatggcatacgccactcactcctggatacattgaaaacaacggttgtatatagagtgttaaggtaacggtaaacccgctttcggcggtataacgagattttttatttcgaattcgacagaaacaaataaatgtaaaaaggagaaattgagatttatgcttgcacaaaacacgcgaataaaagagcaccgcccacttctagcgttttcttttgtggggtgaacaaagcgacgtaacggttgacaggaatcgggtaacgcgaatcgggaatcggtgttggtatcgggcatatactaaaaaacggatgaacaaggaaagtctttcctttgtgcagccactgcgtgctaattaattgtgtttttgtggccaagtggcattctatagtgtgcattctatacacaccaaatttaaattctatccagcccaacccaactcaacgcccccagctccttgttttcccaccattcgtatgcgtcatatgtaaaagagcgcaaaagggcggaaggcacagagagaaaggaaagccaaggaaagaagcagtggccacaacaaagcggcaagcacaaaacgccagaacaagaagcgccaaacggaaaaacgggaatacccccgcccaatccccacatgttttccaaatatgttctcgccaccctgctcgcactctttgcgcaatccatgtgcatccaggagctgtccctcccacccgaaggatctcactccaccgctgcgaccaggtccaagaaggcaaaaaccgctatctccgaggatataatgtacaattacctcatgcagtttgattatctgcccaagtcggacctggaaacgggtgctctgcgcaccgaggaccagctgaaagaagcaatccggagtctccagtcttttggcaacattacagttacgggcgaaatcgactcggcaacggcccggctaatacagaaacctcggtgcggcgtgggcgacagaaggtccgcggacagcttctcgccagataacctgtatcacgaaatcggctccaatgtgcgggtgcggcgcttcgccctgcagggacccaagtgctgcgggcgaaccgaattcgagccatcgaatcctcgactgttaggattgggcttccgagggacggaacccattgaaaacccatttgccaaccgcccgctgacacagccgcaacaacagcagctggctggtgcaaatgagcagcttcagctgacgattttcggctgcctttgttcctctgttgcgtcaaaaccatcaaaacgagatgacgcagcaattgaagccacgaaagcgattgcattttgtcacttttgtgatttgacaccgaaagttgcccaacaaaacttcattagtagcagtcagtatattgagcgaaactatcgcgcacatatttacattgcaatgcggatttacaagtgcgtcgcattaattgacatgaaagagtcacgaaaaaaaaaaatgggaaatgctaaaagaaaagaacaggaccaccgagtgcagccagcagaaaaggatgtgcgcctcctaatgagtgcacgacaaagcggagccttcttgatgggtatgtatctattgatgggagcacatagagtgggcaaacgtcaacgtagcaaaaagggcgccattttccgctgccgcggccgggctctcatctttccatttggcagcggaaaagtgcggggcgagcgaggggcttcgcaacatgctgtcgttatggccaaggcgacagttttccgctgcagcagtcttgctccatttcggctgcacttggtctttagtccttgccactcgactcgctgtaatttcttggcgtttatttttgtgctttctgcggttcccgatcctcgtgcccaccgcatttcacccgctttccgcactcatggctgttgctacgtgacgttggccgtaactggggcgaagatttgttatggccataattcagagcaggccaaaaggaatggcggcgaggacgcgagtggcaaaatcctaaaatcaagcgacttttatgcgtgcatttatgaactgcgagagttgggaaacgacataaacgacatatacgtgacagaattgcaacacaaaaggcgccggaacgggcgagcactgacagccaaccgtcaaaaagtaaatatgcaacaaacaatagcattatataacttaaagtgcacttcgctgctccagcagcttcacaactgccagtacagtacaatggctcggaaatcggacatggtcaacaggtcgatgcccgatgcctccaaagtcgagagaatggtgcagaccgccctggacgtttgggcgaaccactcgaagctgacattccgcgaggtctacagcgaccaggccgacattcagatactctttgcgcggcgcgcgcacggagatggctataaattcgatggacctggtcaggtgctggcccacgccttctatcccggcgaggggcgtggcggagatgcccatttcgatgcggacgagacgtggaactttgacggcgaatccgatgatagccatggaaccaattttctgaacgtggccctgcacgaactgggtcattcgctgggactggcccactccgcgatcccggatgcggtcatgtttccatggtaccagaataacgaggtggcgggcaacctgcccgacgacgatcgctatggcattcagcagttgtacggcactaaggagaagacctgggggccatacaaaccacaaaccacaacaacgacaacaaccacgacgaccatgcgcgcgatgatttaccgggcagataaaccggcctactggccatggaacaatccaagcaacaatcccaacaatgatcgaaatcgtgccagggagcgccaggaggaggagcggcggcgccaggagaaggagcggcggcgccaggaggaggagcggcggcaccaggaggaggagcggcggcgccaggtggaggagcggcagcgccaggaagaggagcgttggcgtcaggagcaggaacgacaagaggaggagaatcgtcggcgcaaaatagagcataaaagccagtgggagaggaatcctagcaaggaacggaatcgtcccagggagcgccaggagatggagaggaggcgtcaggagcaggagcgacaagagcaggagcgacaggagcaggaggatcgtcggcgcgaaagagaacgtgatcggcagttggagtgggaacgtaggaataggaatggagcccgggaaccagtcactcccacggccaataccaccccgagaccaaccaacaagccatatcccacggttcaccggcagcaccaccaccataacaagccgcggaaacccaagccggactcatgtatgacctactacgatgccatctcgattatccgcggtgaactgttcatctttcggggaccgtacttgtggcgcattggaacttctggtctgtataatggctatcccacggagatcaggagacattggtccgctctgcccgaaaatctcaccaaggtggatgctgtatacgaaaacaagcagcgacaaattgtgttcttcataggtcgcgagtattatgtattcaactcggtgatgctagctcctggcttcccgaaaccacttgccagtctgggtctgccgcccactttgacccacatcgatgcctccttcgtgtggggccacaacaaccgcacctacatgaccagcggcacactgtactggcgcatcgacgactacacgggtcaggtggaattggattacccgcgcgacatgagcatctggtcgggagtgggctacaatatagatgcggcattccagtacttggatggcaagacgtacttctttaagaacctgggatactgggagttcaacgacgaccgcatgaaggtggcccatgccagggctaagctctcggcacgaaggtggatgcagtgcgcccgcagtgctaatgaggtggacgacgagcagcgctggacggcgtccttggtatccgagggcgaggaaacggggagaagcggctctagggagctaaggatcaaccacttcattctttcgatccttttgctagccatcgccaactggcggagttaa

SEQ ID NO: 2400 - protein, 1137 aa, DROSOPHILA
MFSKYVLATLLALFAQSMCIQELSLPPEGSHSTAATRSKKAKTAISEDIMYNYLMQFDYLPKSDLETGALRTEDQLKEAIRSLQSFGNITVTGEIDSATARLIQKPRCGVGDRRSADSFSPDNLYHEIGSNVRVRRFALQGPKCCGRTEFEPSNPRLLGLGFRGTEPIENPFANRPLTQPQQQQLAGANEQLQLTIFGCLCSSVASKPSKRDDAAIEATKAIAFCHFCDLTPKVAQQNFISSSQYIERNYRAHIYIAMRIYKCVALIDMKESRKKKMGNAKRKEQDHRVQPAEKDVRLLMSARQSGAFLMGMYLLMGAHRVGKRQRSKKGAIFRCRGRALIFPFGSGKVRGERGASQHAVVMAKATVFRCSSLAPFRLHLVFSPCHSTRCNFLAFIFVLSAVPDPRAHRISPAFRTHGCCYVTLAVTGAKICYGHNSEQAKRNGGEDASGKILKSSDFYACIYELRELGNDINDIYVTELQHKRRRNGRALTANRQKVNMQQTIALYNLKCTSLLQQLHNCQYSTMARKSDMVNRSMPDASKVERMVQTALDVWANHSKLTFREVYSDQADIQILFARRAHGDGYKFDGPGQVLAHAFYPGEGRGGDAHFDADETWNFDGESDDSHGTNFLNVALHELGHSLGLAHSAIPDAVMFPWYQNNEVAGNLPDDDRYGIQQLYGTKEKTWGPYKPQTTTTTTTTTTMRAMIYRADKPAYWPWNNPSNNPNNDRNRARERQEEERRRQEKERRRQEEERRHQEEERRRQVEERQRQEEERWRQEQERQEEENRRRKIEHKSQWERNPSKERNRPRERQEMERRRQEQERQEQERQEQEDRRRERERDRQLEWERRNRNGAREPVTPTANTTPRPTNKPYPTVHRQHHHHNKPRKPKPDSCMTYYDAISIIRGELFIFRGPYLWRIGTSGLYNGYPTEIRRHWSALPENLTKVDAVYENKQRQIVFFIGREYYVFNSVMLAPGFPKPLASLGLPPTLTHIDASFVWGHNNRTYMTSGTLYWRIDDYTGQVELDYPRDMSIWSGVGYNIDAAFQYLDGKTYFFKNLGYWEFNDDRMKVAHARAKLSARRWMQCARSANEVDDEQRWTASLVSEGEETGRSGSRELRINHFILSILLLAIANWRS

SEQ ID NO: 2401 - DNA, 2284 bp, DROSOPHILA
taatcaataacattacaataagtcgcacctggcttttctagggttaagcactggatccattaacagatcaacgaactgttaacagttaacagaggcctagattagattatcggattttactcagatatatataaactcgtatatataaacatatatgtgaatatatatttataaatatgcacttaattgtgccgctggtttatgcggattattgaatgctaacaatcggtatttgctggctttttccatcgatcaatgagcaatatctaatctgcgactgaaacgattgagaaaagtgcagttgtctgcggcttgaactttgaccttgccaatttagatgtaatatctttaggcgattattacatacgtacatatgtcggtcagctagatttgcattttttttagattttagaaaaacaagcatagagtcgagtgtaccaattagattcatctatagatgtatatctatagatatatgtacatgtatatatgtttaaatatctaattgtacgatggtttattgtaaagacatagatataattataggttaattatgtattaagatgtctaaaagtatgcaaagctatggtactgcatacttttgggcaccttgagtgtctgaatccgctctcattgcctaaatattggaatatatttgattacatttgataatatttgattacatttgaatatatttgctcatatatgattatatttcatgatatttgattatatttgattatatctgattatatttcattatatttgacttgtagaacctaaactaaaatcgctgatgacccaaaatgccgcccactgtccgccgggcaattaagaaagccatttcagtcaacgatgttgccaataaactgtgtgtacccacatttcggcagttgtcaactgttggcccaaccaaacggttcgccacctccattggagccaccaccaagccatcaaatcatcaaactgagccactaaaaaccacgttgattgcaagtgtatgtgctgcctacaaagcaccacattagatcgaaaaaaaaacgcgtcgtggaatcgctcggccattgttggtagcgacactagtgatgcacctgaacattgccctttggtcgtcgctatggtctttttatcatgaaggtcttcctggtcaagttgataacgaactttgattttcagagcgattttgagctggagaagctgcagtttgtcgaaaatatatcgctaaagttcaaaaacgccgatgacatcttgctgacaattcagccaaaaaaggagtccacttgagatgcattgttttcaaatactataattgcacgttttttttttgtcatatatgtaattaagttacaatgtaaaataaataaaatgaacaagctacgattttattgtagcttatgcaataaatacccttatttttatagcaatataaaatttcctactaactttttcccaattatttgaatttttgttgaaagcttttgaagtttgtcaaacagaaagcttagttatgtttgcaaccatagaagcttgaacaacagatggcgccagctgaagaagtttatataaataaatatcaatatataaaaaatctaatatagcaatatattattattatttttaaagcattttccagcgcattttgaaagcaaacatttcttttatttatgtagagcgttttgtgttttatgcaacactaaactaaagaggactgaagagaattcagcaaggataatttgttttcaacaaaagatcaaagggcccgacttggcgacttgaagtggtaaatgggcgtgcaactaagggatggggggggggggggggggaggtgaagaagggggatactgcaagctgtcatgggaggcgacaaatgtcgggcgattgccgagcacacgcgacctgctaatgtggcaggacatggcgaaaggactcgactcgactcggcagcgccgtatgataatatgccacaactgtcagcaatatttccgctctgctccactccgtcgccgttaccttttccgccagatttgcccgtcacctatgcagcatagcaatatagtactagctagcttaacttcagtaagttcagtgcgttcagtgccgggcacatacacatacacatacacatatcattgtcaggactcgagtccttttgacttgtctaaagagtggcgtccaaagagcgtccaaaatgctggcatgcttcgccttagcagctaaacgacaacagcagcagcaggagcaacatcaacagcagtcagccgagtggcatcattataacttggtc

SEQ ID NO: 2402 - DNA, 1587 bp, DROSOPHILA
atgtgctgcctacaaagcaccacattagatcgaaaaaaaaacgcgtcgtggaatcgctcggccattgttggtagcgacactagtgatgcacctgaacattgccctttgtgcggcgcccttctggcggtgctcctcgcctggcagcagcgaaagtgctggcgactcatctggcagctgaacggatggcgcggagtgatccagcagccggtgctatggttactactctgcatcaatctgcatccgaacagcatactggagaaggtatcccaatatcgggtgcacttccagcgaccgctggccgttctcgttggcacccgagtcctgctctatatcgatgatcccgccggcatggagtgcgttctcaatgcgcccgaatgcctggacaagacctttctgcaggatggcttctttgttcgacgcggtctgctccatgccagagggcaaaaatggaaattgcgccgcaagcaactgaatcccgccttcagtcacaatatcgtggccagtttcttcgatgtcttcaattcggtgggcaatcagatggtggaacagttccaaacgcagacgaatcttcatggacaggcggttaagtttacggctgccgaggatttgcttagtcgagctgtactcgaggaggagtccaaaaagtgcgccaaattgctggaggatttcgttggcggcattgtgagaacaaagcatcgcaattggcggctaagggacgccgttggcggtgaaaagtctggagaggatgcatctaacggctggcagaggcgcatctttatcgaacagatctttcagttggccgccaatggagagatgacgctcgaagagatcatggacgaggcacagtcgatggtactggtggtgggtctcaaaatttcatatttgaatacgatatattttatattttactgcaatttccagtcctttgagacggtatccaatagcataatgctggccctgctctgcttggccaccaacaagggtgattgccagcgacgtttgctggcggagattagggcactggtgccggatgttggccaagtgggcttggagcagttgcagcagttgcgctatctcgatgcctttgtcagcgaatcgctgcgcctgttggccaccgtgccgatgaatttgcgtcatgttagtcgagattttcggctggcgggcaggcagcacgaaacgattgtgccacaaaatagcatcgttgtgctggacacgtttaatatgcaacgcgacgagcgttggtggggcgccaacgccaggcaattcgatccgcagcggtttctcgatcaggaagaggagcagctgtccaaggggcacaatgattcgggatcgggtgaaaaacgaaggcagcgtgatcgtcgacactcctacagctttttgcccttctccaatggactgcgatcgtgtattggtcgtcgctatggtctttttatcatgaaggtcttcctggtcaagttgataacgaactttgattttcagagcgattttgagctggagaagctgcagtttgtcgaaaatatatcgctaaagttcaaaaacgccgatgacatcttgctgacaattcagccaaaaaaggagtccacttga

SEQ ID NO: 2403 - protein, 528 aa, DROSOPHILA
MCCLQSTTLDRKKNASWNRSAIVGSDTSDAPEHCPLCGALLAVLLAWQQRKCWRLIWQLNGWRGVIQQPVLWLLLCINLHPNSILEKVSQYRVHFQRPLAVLVGTRVLLYIDDPAGMECVLNAPECLDKTFLQDGFFVRRGLLHARGQKWKLRRKQLNPAFSHNIVASFFDVFNSVGNQMVEQFQTQTNLHGQAVKFTAAEDLLSRAVLEEESKKCAKLLEDFVGGIVRTKHRNWRLRDAVGGEKSGEDASNGWQRRIFIEQIFQLAANGEMTLEEIMDEAQSMVLVVGLKISYLNTIYFIFYCNFQSFETVSNSIMLALLCLATNKGDCQRRLLAEIRALVPDVGQVGLEQLQQLRYLDAFVSESLRLLATVPMNLRHVSRDFRLAGRQHETIVPQNSIVVLDTFNMQRDERWWGANARQFDPQRFLDQEEEQLSKGHNDSGSGEKRRQRDRRHSYSFLPFSNGLRSCIGRRYGLFIMKVFLVKLITNFDFQSDFELEKLQFVENISLKFKNADDILLTIQPKKEST

SEQ ID NO: 2404 - DNA, 3333 bp, DROSOPHILA
ttgcggctcaatgtctaggctgttgtgggagaagggactgtgaattatcacacatgaataacaacgactgccggcaaatacctacaatcgagatgccagtgcattgggcgaagcgagtcccaccaccggtgcacttcccgctcttcgcagatccaccaactgctcctggagactgcctatctgctccttgacactagctatttcgttgttcagcgattgcattcgagtggtaagaccacttaaagccgaaactggacagctgctggaactctataaaaatcatgtcaagacttactgtacgaatgtaacacgatgagctcgctttgttttttgttctacaagcatagactttgaactgtagaatatgatttggccgtcggtttttcccaactcaccgcatttcccaaggagggcggaaccaacagtcctccgcccagatccgtttgtgtggtggatagacaggccatggccatgaccaaggcatccagctgcagcatctgtgacattttggcactttcgattactggccgactagctaactggctgactgactaactaactaactaagccgcaaagtgtacatcaactactgatctgaggcgcaatgcaagtgtgaattgaaacaaaggtcactcgattgattacctgtacacgttgcgtgcattgcattgaaaaccgggtatgctaagcagatcagtaagtgttgggcagtgctatctcatccagtgattgcaagttcacaacacttaaaagtaacggatcaataatttaaaacttaaactctttattgcaacaatatatcagccattgatatgtttgacacaaaactattcaattaaagggattaaggcctatgtgactaaaccgtgatcttctcatcactgtgatcgcctaacgcggcgtgacttttgtggcatctccaatcagccaccgactagtaactaatccagcgaactaatgagccaacttgcttagtcagttgcccagtcgagcagttgcaactgcgttgcattcgctggcatcatttttagcctgaaatcggaacacgtacgtcggtgtaaatatatataattaaatcgcgatggcgctggaggcgctcgtcacggctttggcttgcctcagcaccaccacaaatgccacgagtaacttgccaggaaaacacttttccgtgataatgagaaactcggcggagccctttttgctggctgaaaatgtgagtatggccgctgtttcgagactccatttatttgagcatacccttcttgtttcaggataccgccagttgtccagtaagcactttggctggcttagcagcacggtgagtccctcttaaaggtccttacaccttgtttacataatagtattacattatttagtgtacaattcatgacagatgagctgcaaaatctcaaaacagagcttaatgagctacagggactcattgaggagtataaaaatcagggcaccggaatacccattgcaaccaggttgtaagttaataaaggtagaaaataatttattatatgtccataattgtaacatgaacttctataatttttagacttcgcccattgccagcaagtgtgcagacctttccgttggcgctggccacgccccccgacgatacgccccgaaattgctacgatgagaagcatggtcaggtgaggatccgaattgctccggatatggaacccttcttcgcgagctgtgaccagaaagtgagagatggtggctggatggtgatcgcctatagattcgatggcagcgaggacttcaacaaggattggcagaactataaggccggttttggcgctttaaactcggagttctttatcggattggataagctgcacaggttgaccaacagtgagcaccacgagttgctcatcataatgaagaagaaaagtggagaggaacgtttcgcgctgtacgatcacttcagtattggcagtgaatcggaaaagtatcttctatatgtacttggtgcctacaaaggtgatgctggtgattcgctacgttaccatgcgggcaagaagttcaccacattcgatcaggataacgacgataatggccaaaactgcgccaggacgcatgcaggtgcctggtggtatggaagggagtgcttcgagaggtgagcaaaagtacgcatattaagtatctattctaagcagccaccttcaaatctttgcagcaacttgtttggtacattccagtcgaagtacggacaggagattggctatttcaagggcatcctgtggaaatccttcctgccaggacccactggctcgcttagctatgtccgcatgctcatccggccgctcaagaaacagtagacgaagctatcacatattcaatcacaaagactcctcaggcatagaatacaataaatgtcgattatttaacaattcaagatacttgtcagctgggatgattgcaaacgggtttcaattatggcaattaatttatatatttcgcattaagcgatgttcaattaatcggtgtacaatacgcaacgcacacacagaccgaagaacaatggatgtgtgggtgatggggaaataatgttgctcattaatggcatattatcatgagaaattttcgctctgctcatctgcatacaaagcgaataaaagggagggccgggtggtgtttgctaagcaacggaagttgttttcactaaaaataagcacacactgtgaaaacgagccggtttccatatgcatttcccaatgctaatgatatcgaacggcccgcactgcgtatacgtaatagctgatagagaacggggcgtatgcgtaatgcgactgtcattgccacctagcccgctctgcctcctcctcattcctcttgttgttcctgttcttcttgtgtagcttaagaaatacgagtatgggaaaactttgacaccgaatgcccggaataaatttcataaatttctggcagagcaattgaatgcgacgaggaggactttcgggataaagacaggagcaaataagctcctgtgcaattgtgtgccaaattcaataaataacaagaaaaacttgagaagactgtgggcagaatgactataatatactctaattgtgattaatatatatatatatataccatagtagttatatttatagtgaacggttgaaattgcaaattaattaattaaatttattgcatatttagctcatgcattaattcagttgcatgataataattttagaagaaattgaattgttccgatgaagtaatgttgggaaattcaaaagtaatgcagcatcagttttattgcaatatgcaaataagctatgcaaatggaaaatgttttccattttccagcat

SEQ ID NO: 2405 - DNA, 1101 bp, DROSOPHILA
actgcgttgcattcgctggcatcatttttagcctgaaatcggaacacgtacgtcggtgtaaatatatataattaaatcgcgatggcgctggaggcgctcgtcacggctttggcttgcctcagcaccaccacaaatgccacgagtaacttgccaggaaaacacttttccgtgataatgagaaactcggcggagccctttttgctggctgaaaatgataccgccagttgtccagtaagcactttggctggcttagcagcacgtattacattatttagtgtacaattcatgacagatgagctgcaaaatctcaaaacagagcttaatgagctacagggactcattgaggagtataaaaatcagggcaccggaatacccattgcaaccaggttacttcgcccattgccagcaagtgtgcagacctttccgttggcgctggccacgccccccgacgatacgccccgaaattgctacgatgagaagcatggtcaggtgaggatccgaattgctccggatatggaacccttcttcgcgagctgtgaccagaaagtgagagatggtggctggatggtgatcgcctatagattcgatggcagcgaggacttcaacaaggattggcagaactataaggccggttttggcgctttaaactcggagttctttatcggattggataagctgcacaggttgaccaacagtgagcaccacgagttgctcatcataatgaagaagaaaagtggagaggaacgtttcgcgctgtacgatcacttcagtattggcagtgaatcggaaaagtatcttctatatgtacttggtgcctacaaaggtgatgctggtgattcgctacgttaccatgcgggcaagaagttcaccacattcgatcaggataacgacgataatggccaaaactgcgccaggacgcatgcaggtgcctggtggtatggaagggagtgcttcgagagcaacttgtttggtacattccagtcgaagtacggacaggagattggctatttcaagggcatcctgtggaaatccttcctgccaggacccactggctcgcttagctatgtccgcatgctcatccggccgctcaagaaacagtag

SEQ ID NO: 2406 - protein, 339 aa, DROSOPHILA
MALEALVTALACLSTTTNATSNLPGKHFSVIMRNSAEPFLLAENDTASCPVSTLAGLAARITLFSVQFMTDELQNLKTELNELQGLIEEYKNQGTGIPIATRLLRPLPASVQTFPLALATPPDDTPRNCYDEKHGQVRIRIAPDMEPFFASCDQKVRDGGWMVIAYRFDGSEDFNKDWQNYKAGFGALNSEFFIGLDKLHRLTNSEHHELLIIMKKKSGEERFALYDHFSIGSESEKYLLYVLGAYKGDAGDSLRYHAGKKFTTFDQDNDDNGQNCARTHAGAWWYGRECFESNLFGTFQSKYGQEIGYFKGILWKSFLPGPTGSLSYVRMLIRPLKKQ

SEQ ID NO: 2407 - DNA, 6397 bp, DROSOPHILA
aaagccatctgggaaacggaagccctggaggactcgggacctaagcaagtagatacgtctattgcacaatacactggcggattagtaaaggtgggtgcaataatactttgattaacttcttaataaacatgaactgcccataggaacaatgcgaaatcccaatctatgcggccgctgggctaccagagctggcccatgtaattctcggatttgaaggctgttcccaccaggacaaggacttcgttcccctgtgcgtcctgaatatcatgatgggcggtggtggatccttctccgcaggcggtcctggcaagggcatgtactcgcgcctgtataccaaggtgctaaaccgctaccactggatgtacagcgccacggcctacaatcatgcttacggcgattgtggtctcttctgtgttcacggtagcgcaccgccacagcacatgaacgacatggtcgaggtcctgacccgcgagatgatgggcatggccgcagagccaggccgtgaagagctaatgcgctcgaagatccagcttcagtccatgttactaatgaacctggagtcgagacccgttgtgttcgaggacgtgggccgccaagtgctggtgacggggcagcgaaaacgaccgcagcattttatcaaggaaattggtaaaagcatcttaattaatcaattaatgctatcatttaactcgttaattcatattacagaaagtgtaactgccgccgatatccaacgcgttgctcaacgtctcctgagctcgccgccttctgtggccgcccgcggcgacatccacaatcttcccgagatgagccacatcaccaacgcggtcagtggttcaggacgtaccgggctgggacgtaggctttccttgttcaaatagcgctgggtgtgagaccgcctccattggatatcatttcgctttgtttacaatattgtgcgaagggcaaccgtgttaagtttaaattggctaaaaaccaaaattcccaaaattcgactcggttattttatttgttgctttaatggtatttttaattaggcgacaattagagacaggcaaatttttgtcctctaacatcttacttagaaagtaagatgtcctgatagcaaaggggagaattgcatctactaaatgagcgattcattaagataacccattacatttttacaccgctcccacgattgtcttactcaatttgggcctcctatagctatagcatacgcaaagctgttcatcccagcgaagattttgaagacaccgaggaacatttctttaatcggcgcttgcacttcggagaagaggttgagccatcgctatcactgctgctgctgctgctactactgccacttctgttacttcttaagggcactagaaacgaaaaggatacctatagatacctattaatcacagcacaccgtatctattaacttacttgttggactcttgggagcagtgctttcgaagtcttcgtcttccggcaactcatcgctggaaatgttctcgtgcatgcgatattgcttaggaagatggctctcatcctgaagcggtgtcgcatatttgggccgcttgattttttcttcttgatgctggcgatcactgtcgttgtccaattcgttgcccgtttgtttctttatgctcttggcgatcacgcgcttttggtgatccagttggggaaacaggtcccttgaattctccagcgcctgcttagcggcgttcatctccgcctgctgaatggaggagccacttgaagtggccagccgctttgagcggaaataaacggccaccttgtatacccgcgtattagttggaccactggcctccaccaccttgtagtagggaatgtccggctcgccgccatccattgtgcgaagtgtgaggcagcactgctgcagcttcgacttgggatcgttccagtcctgattcatgataaacaactgaagtcgcgggaacaaacatacatggcaaaactgttcacaatacaggagacccttgtccacgtacagggcgccgaggaatgcctccagcagatcggcacgatctttggtcttcaaatcagccttgggattggcatacacggcatatttcggcattcccaaatcatcgcaaaccaccgcttgagtgcgattattgaccaatgaggatcgtagcagggacaagtggccctcgtggtgctcagggaagtgacgatataggtactccgagcaaatcagctgcagcactgtgtcgcccaagaactctaaacgctgatttgacccaagggtcaagtgggtgaaaccaatggagcgatcggtaaaagcgcgagccaaaagccgaatgtgcttaaacttgattccaatagagtcctcgaatttggttaactccttaagcacacggtaggaatcaatacagctgcgatccccaagtggctcctgttcctgcaacgggtgctccggcagattcttccatatactcagcagtttctcgtcctgccggaagagtgcatccgtgaacacctcatctgccaccttgattccaccatccaatagaagcgcgcccattagggcttcaaaacagttggccatggcgtgacgcagttccaactcgtggcacagatcggatccgtgtgcgtacagcataaactcttccagttgcagctttttggccaacagagccaagtgctggttttggacaattgccgctcggtaagtggccaaaccaccctcctccagttcagggaacataaaaaacagatggattgagctgaggaattctactacagcatcaccgaggaactctagtctctcattgtgggttatgttcgaaacagtctcatgctccttgccaaatctggacataatgctcactaatgtgttgataccccgcttgcgtgtgttcatgtaatggatcttgcgatctccgtactccggctgacgaattccgcagttagtcagcgaattacgggcgtgatccggattggtaccgtagttctccttgtatgagggatgcgtcagcgccaattggagaaggtaccgatttttaaagcggtacccgatactctcctctagcaggtccagcgacttgtgaaagcgaaggtgaccagttaggacaggaatcaacatggcatgctgcacaacgtcgcacataatgccggtgcgatagaagccctccgagctgatcgccactgtgatatttcgtttcatgcgcccctgagttcgcatctcctgaagacgttgctccttctcctctagcttgcgcttatccttgaaagagggcttcgacatgttggccatcagatgacggtacttaacgtactctcgccacgccttctggtactctggatttccagcgtagcttagctgaggatgacaaatgccaaagtgcacgattgctggatgtgagattccagtctcgcgatctacgcactcgggcaaatcggagttattcctgtccaattggtcaacgcgtagcgaacacggcttataacccggcttggtgaccagcattccctttatgaagtccacgtagttttgccactcgctctgactaatctggttaagatgcagtagttgctgccgttccacaagctgtgcagaattatccagcaagtagcggagtacctcgaccatggccaaaacctcctttccattatctggcaggtcgcggacgaaacgcggaaagaagtgaaaagctgggcaggattcctcgacgtttccggacggtaagttgggcattagattaaagtctaccagctctagcagttcatgaaacaggtatttgactgaaattgagataagatgtaagtaatgcctataaagaaaaatctcaattttacttacaaaaaatgtctagctcgtggatggtgaagttctctggcatcttctcctcttcgtactcaatggtgtactcgatgttgaagcggatcaccttgcagacgggcagatcggagagacgcacatgcgagagaagtgagaagccctcgaatagaaactcgtgctcatcatgcttgataatggtgggtgtctttgtcaggaagttagtgggcggtgagatgctgatcctgtagtggaacagcttgcctgcattgttgctgtttggatcgcacaacttatagccagtctcgcccggatatatgccgtgtcgaatgccaatgcgccgggacttggctgagcagcggcaaagaggtccgtcgttcatctcaccggcgtcgttgtgccagagatccgcgtgcacacgctgcggatgttgcaccttgcgcgaaagctcctccatgcagcagtcttgctcgatcttaaaagcgtcttcgtcggagtcgtcatcggatgaggaggacgaggagcaggcttccgacttgtgtttatgcttgcaaacacggcggcgagcctttcttggaggcggcacgtaaacgggtagcttctcgcgtacacgctttgctctctgcaggagctcctcatcgaatagagtgcacagcttttgcagacgcgcccgacctctgacttcgttttcgctcttggtgcgctcgtagtagagctccgctggcgatgatcgcacccaggattcgactggcgcatccgcctcgctgagggcgttcatcttcttcacatagtcctctggtttttcgcagaagttagaacaccactgtctcaacagacggtccctttcggtctccaccttcggtttggccctagtcttctctaaggtctcatttctctccctttcgtgatggccacgtggcgaatagtcatcgctgacttggtttctggctgcagatccatagtatccgtgttgcgacccctttgcctgcctgtgggcatagtgtccgtgtcgtggctcgtgggcatatcgactgtcctgaatttgacggtgttcctgatcatgtctttgttcataccgcctacccgagctatagccgggataatggtggtagccttgactggagctgttggaagtgtacctctgcctttcggatggaggtcggtagttggacgaataagcaggatagcggtctgggtatttatagctttcatagaggaatgatgatccggatgccgggtactggtattggtaatgggactcctggccaccatacttctgtgcttgttcgttgtaagcatatccctcgtagccgtacgctggtggttgctggtacggatcatagctaggtactgagctggcataaggagccggtgtctccgggtagacgtaatccaaagacttcgagctctgagaatgggattcatttgaagaatagttgtgagagggaacacctactcccggtggagatagatcttcttctggcggaggtggcgggggcggaggagcaggctggactggaggcggtggcaaaggcggctggtacatggcgaaaagttttgggaaaatctttggcaaaatccacaattatacttttttccacccacaccttttaccgcgattcgaatgatctggcaactcgaccggtttgtttacattcgcacatccggcaaggccgtgccacatatgtttcgatagacaacgtaagaaaattatgttacttccgcggtatttttgctggaacctccaacgctgcacgatggcgttttacgctgtagccagtgggcggcggtctggagtctacggctcttgggcagagtgcgaggagcaggtcaagggtttcaagaacgccaaatacaagaagtttaagacacgccaggaagcggatcagttcgttaatggctgcaagtcgtatgctccgcaggatgtggccgtgccgctgggcaaggaaaaggcgtcactggccagttggaaaaacagtatcgaagtgaataagaaccccaagtacacagatgagtggcccgaagaggatcacgacctagccgaggatgatctggtaggcatgaatatacatacgtttgcaaagtcctgacctttcatcctttcagaatgctgccatgaacgaggttgagggagatccaaagccatctaacagtagcaatttagtatgagaccgtagtacatactgtagaaaaagttaaacatagcttctttcagccagacattctcaatcgcaagcggaagggcacaaccagcggcgataagcggaacaagatcccacgtcatgcctctcaggtctcagaagccacaggactcaagcaagtgggtgccttccagtttgaaatcgatgcagagggctatgtcattgtgtacacagatggctcctgcataggcaacggacgagccggagcctgtgccggctatggcgtttatttcggcaagaatcaccagctgtaagtggtaactgcagcacaataactttgcttttaacctatatgttctttgcagaaacgcagccaagcccgtggaaggacgcgttacaaataatgtaggtgaaatacaagcggccattcatgccattaaaacagctcttgacttgggaatacaga

SEQ ID NO: 2408 - DNA, 4275 bp, DROSOPHILA
gtgtgggtggaaaaaagtataattgtggattttgccaaagattttcccaaaacttttcgccatgtaccagccgcctttgccaccgcctccagtccagcctgctcctccgcccccgccacctccgccagaagaagatctatctccaccgggagtaggtgttccctctcacaactattcttcaaatgaatcccattctcagagctcgaagtctttggattacgtctacccggagacaccggctccttatgccagctcagtacctagctatgatccgtaccagcaaccaccagcgtacggctacgagggatatgcttacaacgaacaagcacagaagtatggtggccaggagtcccattaccaataccagtacccggcatccggatcatcattcctctatgaaagctataaatacccagaccgctatcctgcttattcgtccaactaccgacctccatccgaaaggcagaggtacacttccaacagctccagtcaaggctaccaccattatcccggctatagctcgggtaggcggtatgaacaaagacatgatcaggaacaccgtcaaattcaggacagtcgatatgcccacgagccacgacacggacactatgcccacaggcaggcaaaggggtcgcaacacggatactatggatctgcagccagaaaccaagtcagcgatgactattcgccacgtggccatcacgaaagggagagaaatgagaccttagagaagactagggccaaaccgaaggtggagaccgaaagggaccgtctgttgagacagtggtgttctaacttctgcgaaaaaccagaggactatgtgaagaagatgaacgccctcagcgaggcggatgcgccagtcgaatcctgggtgcgatcatcgccagcggagctctactacgagcgcaccaagagcgaaaacgaagtcagaggtcgggcgcgtctgcaaaagctgtgcactctattcgatgaggagctcctgcagagagcaaagcgtgtacgcgagaagctacccgtttacgtgccgcctccaagaaaggctcgccgccgtgtttgcaagcataaacacaagtcggaagcctgctcctcgtcctcctcatccgatgacgactccgacgaagacgcttttaagatcgagcaagactgctgcatggaggagctttcgcgcaaggtgcaacatccgcagcgtgtgcacgcggatctctggcacaacgacgccggtgagatgaacgacggacctctttgccgctgctcagccaagtcccggcgcattggcattcgacacggcatatatccgggcgagactggctataagttgtgcgatccaaacagcaacaatgcaggcaagctgttccactacaggatcagcatctcaccgcccactaacttcctgacaaagacacccaccattatcaagcatgatgagcacgagtttctattcgagggcttctcacttctctcgcatgtgcgtctctccgatctgcccgtctgcaaggtgatccgcttcaacatcgagtacaccattgagtacgaagaggagaagatgccagagaacttcaccatccacgagctagacatttttttcaaatacctgtttcatgaactgctagagctggtagactttaatctaatgcccaacttaccgtccggaaacgtcgaggaatcctgcccagcttttcacttctttccgcgtttcgtccgcgacctgccagataatggaaaggaggttttggccatggtcgaggtactccgctacttgctggataattctgcacagcttgtggaacggcagcaactactgcatcttaaccagattagtcagagcgagtggcaaaactacgtggacttcataaagggaatgctggtcaccaagccgggttataagccgtgttcgctacgcgttgaccaattggacaggaataactccgatttgcccgagtgcgtagatcgcgagactggaatctcacatccagcaatcgtgcactttggcatttgtcatcctcagctaagctacgctggaaatccagagtaccagaaggcgtggcgagagtacgttaagtaccgtcatctgatggccaacatgtcgaagccctctttcaaggataagcgcaagctagaggagaaggagcaacgtcttcaggagatgcgaactcaggggcgcatgaaacgaaatatcacagtggcgatcagctcggagggcttctatcgcaccggcattatgtgcgacgttgtgcagcatgccatgttgattcctgtcctaactggtcaccttcgctttcacaagtcgctggacctgctagaggagagtatcgggtaccgctttaaaaatcggtaccttctccaattggcgctgacgcatccctcatacaaggagaactacggtaccaatccggatcacgcccgtaattcgctgactaactgcggaattcgtcagccggagtacggagatcgcaagatccattacatgaacacacgcaagcggggtatcaacacattagtgagcattatgtccagatttggcaaggagcatgagactgtttcgaacataacccacaatgagagactagagttcctcggtgatgctgtagtagaattcctcagctcaatccatctgttttttatgttccctgaactggaggagggtggtttggccacttaccgagcggcaattgtccaaaaccagcacttggctctgttggccaaaaagctgcaactggaagagtttatgctgtacgcacacggatccgatctgtgccacgagttggaactgcgtcacgccatggccaactgttttgaagccctaatgggcgcgcttctattggatggtggaatcaaggtggcagatgaggtgttcacggatgcactcttccggcaggacgagaaactgctgagtatatggaagaatctgccggagcacccgttgcaggaacaggagccacttggggatcgcagctgtattgattcctaccgtgtgcttaaggagttaaccaaattcgaggactctattggaatcaagtttaagcacattcggcttttggctcgcgcttttaccgatcgctccattggtttcacccacttgacccttgggtcaaatcagcgtttagagttcttgggcgacacagtgctgcagctgatttgctcggagtacctatatcgtcacttccctgagcaccacgagggccacttgtccctgctacgatcctcattggtcaataatcgcactcaagcggtggtttgcgatgatttgggaatgccgaaatatgccgtgtatgccaatcccaaggctgatttgaagaccaaagatcgtgccgatctgctggaggcattcctcggcgccctgtacgtggacaagggtctcctgtattgtgaacagttttgccatgtatgtttgttcccgcgacttcagttgtttatcatgaatcaggactggaacgatcccaagtcgaagctgcagcagtgctgcctcacacttcgcacaatggatggcggcgagccggacattccctactacaaggtggtggaggccagtggtccaactaatacgcgggtatacaaggtggccgtttatttccgctcaaagcggctggccacttcaagtggctcctccattcagcaggcggagatgaacgccgctaagcaggcgctggagaattcaagggacctgtttccccaactggatcaccaaaagcgcgtgatcgccaagagcataaagaaacaaacgggcaacgaattggacaacgacagtgatcgccagcatcaagaagaaaaaatcaagcggcccaaatatgcgacaccgcttcaggatgagagccatcttcctaagcaatatcgcatgcacgagaacatttccagcgatgagttgccggaagacgaagacttcgaaagcactgctcccaagagtccaacaatgcccttaagaagtaacagaagtggcagtagtagcagcagcagcagcagtgatagcgatggctcaacctcttctccgaagtgcaagcgccgattaaagaaatgttcctcggtgtcttcaaaatcttcgctgggatgaacagctttgcgtatgctatagctataggaggcccaaattgagtaagacaatcgtgggagcggtgtaaaaatgtaatgggttatcttaatgaatcgctcatttagtagatgcaattctcccctttgctatcaggacatcttactttctaagtaagatgttagaggacaaaaatttgcctgtctctaattgtcgcctaattaaaaataccattaaagcaacaaataaaataa

SEQ ID NO: 2409 - protein, 1327 aa, DROSOPHILA
MYQPPLPPPPVQPAPPPPPPPPEEDLSPPGVGVPSHNYSSNESHSQSSKSLDYVYPETPAPYASSVPSYDPYQQPPAYGYEGYAYNEQAQKYGGQESHYQYQYPASGSSFLYESYKYPDRYPAYSSNYRPPSERQRYTSNSSSQGYHHYPGYSSGRRYEQRHDQEHRQIQDSRYAHEPRHGHYAHRQAKGSQHGYYGSAARNQVSDDYSPRGHHERERNETLEKTRAKPKVETERDRLLRQWCSNFCEKPEDYVKKMNALSEADAPVESWVRSSPAELYYERTKSENEVRGRARLQKLCTLFDEELLQRAKRVREKLPVYVPPPRKARRRVCKHKHKSEACSSSSSSDDDSDEDAFKIEQDCCMEELSRKVQHPQRVHADLWHNDAGEMNDGPLCRCSAKSRRIGIRHGIYPGETGYKLCDPNSNNAGKLFHYRISISPPTNFLTKTPTIIKHDEHEFLFEGFSLLSHVRLSDLPVCKVIRFNIEYTIEYEEEKMPENFTIHELDIFFKYLFHELLELVDFNLMPNLPSGNVEESCPAFHFFPRFVRDLPDNGKEVLAMVEVLRYLLDNSAQLVERQQLLHLNQISQSEWQNYVDFIKGMLVTKPGYKPCSLRVDQLDRNNSDLPECVDRETGISHPAIVHFGICHPQLSYAGNPEYQKAWREYVKYRHLMANMSKPSFKDKRKLEEKEQRLQEMRTQGRMKRNITVAISSEGFYRTGIMCDVVQHAMLIPVLTGHLRFHKSLDLLEESIGYRFKNRYLLQLALTHPSYKENYGTNPDHARNSLTNCGIRQPEYGDRKIHYMNTRKRGINTLVSIMSRFGKEHETVSNITHNERLEFLGDAVVEFLSSIHLFFMFPELEEGGLATYRAAIVQNQHLALLAKKLQLEEFMLYAHGSDLCHELELRHAMANCFEALMGALLLDGGIKVADEVFTDALFRQDEKLLSIWKNLPEHPLQEQEPLGDRSCIDSYRVLKELTKFEDSIGIKFKHIRLLARAFTDRSIGFTHLTLGSNQRLEFLGDTVLQLICSEYLYRHFPEHHEGHLSLLRSSLVNNRTQAVVCDDLGMPKYAVYANPKADLKTKDRADLLEAFLGALYVDKGLLYCEQFCHVCLFPRLQLFIMNQDWNDPKSKLQQCCLTLRTMDGGEPDIPYYKVVEASGPTNTRVYKVAVYFRSKRLATSSGSSIQQAEMNAAKQALENSRDLFPQLDHQKRVIAKSIKKQTGNELDNDSDRQHQEEKIKRPKYATPLQDESHLPKQYRMHENISSDELPEDEDFESTAPKSPTMPLRSNRSGSSSSSSSSDSDGSTSSPKCKRRLKKCSSVSSKSSLG

SEQ ID NO: 2410 - DNA, 3006 bp, DROSOPHILA
tcttcctaatttagtactactaaccgtttatattccaattacactatatatatggacacagtcagttttggtttttgtcaaacacggaaacacagtataagcatggggtagctcagttcttagacgggaaggtcaataaaatctcttctgctcgaggttcagaataagaataatattatagaacatattaaaaaaaaagccgctgtggtaaaatgtgaatataaaaaattaaacatattctttttctgttgcttattaaatgtaaaatatattcttatatacaaaaggcttccaaaggttttgcaataagaaaaaaatatatactcgattttggtgctgaaggatagtactatagtttactttttttcaattgtgagatgatcccttaacccaagttatggggtttggtaattgtaagccatttgtttgttttttgtttttgaagaacaccgagagcatttgttttgtacaaatcctatatatacacacttttttcaaatatttcgcattgaaatgaaagagtttaagaatctttatatatccttaacaaaaaaaaaacggcattgctagtccgaataaaataagttaagggtaaaaaaacaaacaatattttaatattctccatattaagtaaagcgggtaactggacggagaatctacgaaatcgttttatattttacaaaatatataggacaacgggaaaatatccaaaccacaaagcaacaaaaccttcattttctggtctggtatatttgacccttttttcattttgagattcacgcatttagcccaaaaatggacgtttactttatataatactcctataggttttcatgtcacatataatacaattcctcttcaattctgtttgatagcagtatgatcaggccttcctgttaaaagaaattcacgtgaaagtatatcgataataattgttaaatacttatcgattttctgccacccttgaagtgcagctgtcattggtaaaaatggcgaattgtaataaagtcgggaagtcaaccataaattattaattttccttattttggacaaatacaaattttcatattcaaggaagtgcgctcaggaagcacagactttacattcgaagtgtgcatatttgtaagcataacgattgagcaatacacgttttgtattggtatgagtgtttcacagacacgctactaactcgggtattaaaatttttgaacttctgggtctttaaactttacttaatagcaattttacggctatttataatagtatttattttgcaacaacgtgaagtgaatacactataactttttactttctacctactacttacttttctattactttccttatttttctaacttggacagtatttgcatttcgccgtcccttgaatctggatcagggcaatatttacgcaccgcaagatataaatgaaccaaatcgaaatacaggaacttactactcacctatcccaggcacttgatcaaaactacgatgtaagaaaacgtattaccttatcaacaaatcagttaatgtaaagatcttttcaggtcgtcaatatggacgcagttctctgtgtcatatgtgcattggagggtacaactatcaccaaggagcagttggaggccaccagattggctaagtacataaatcagctcagaagaaggactaagaatgaacatttggctcgacgtgcaaaatccttgctgaaaaagtggcgggaaatggtaggaattcagcaaacagccactgaaaatttggcacatcccagtcaaatttcatcttcacaaccagcattagatttggttaagtcccctatcaccagctttattacagaaccaattgctccttcgcagcaaatagtttcagatttgcattcaaatatcgactctgcggagcctccgctttcgggtgaacataccctacttcatccgaacttctccaaccttgtaaatagtataaaagatagcgatcgccacgaaaacatcgctataacgacattgcatactcacaaggatcggcgacattcgcattccatccgaagttgccacgtggcctctcctcagcccatcgtcatagatcattcggtaaattccgtgattaacttgaccgatgacagcaccgtgaagataaacgaagcttcagttgttattgacatagcttcggattccgatgagaatgacaataacggttcgttaaatccaaaaaaattaaactcaattgttcctgcgccacttccaataccatctacaccaagctcacggcaacgcaaattaaaaaaggaaaaaagaagtaaggaaagagaaggacaggtcgcaacaaatacaagatttggtgcaaaagccagcgacgggtttcaacaggccgctctgacaacagattcgggtatgattcaattgtatttgtctttgtgtctatccttgcagaagctcaaagaagctgggttcggaaaaatggaattttcgaaatttgaaagctggaatcgtgtgcccaccaattagtttttttttgtccacgtccagtctttgagatctgaattttcaaaaaagttcgataatcaaaaagtgtactttttcaaaaattttatattttaaattgcaataacatcgtttgccaacacttttgaattttgaaaaaacgtatactttagaaaatataagacattcaagttaatctcggtctattcagagaatagagcgtttgaccatctcttaaaactaaatattatcaataaaaaacgtttgcccaaccattattattagtttttatcgttttcccacccttaagaaaacctttgacaaattttttttttcgattgcccgcacttaaaaaaccaataacttaaataaccaatttctttagcccacctctttaaaatgaatattttcagcttccagcttttttgagctcagtgcagagggtgtttataacgcaattggattttctcatctccaacgcttctctaacgcccacaaattgccacacttttcaaaaatgttttgtattttc

SEQ ID NO: 2411 - DNA, 710 bp, DROSOPHILA
taataaagtcgggaagtcaaccataaattattaattttccttattttggacaaatacaaattttcatattcaaggaagtgcgctcaggaagcacagactttacattcgaagtgtgcatattttatttgcatttcgccgtcccttgaatctggatcagggcaatatttacgcaccgcaagatataaatgaaccaaatcgaaatacaggaacttactactcacctatcccaggcacttgatcaaaactacgatgtcgtcaatatggacgcagttctctgtgtcatatgtgcattggagggtacaactatcaccaaggagcagttggaggccaccagattggctaagtacataaatcagctcagaagaaggactaagaatgaacatttggctcgacgtgcaaaatccttgctgaaaaagtggcgggaaatggtaggaattcagcaaacagccactgaaaatttggcacatcccagtcaaatttcatcttcacaaccagcattagatttggttaagtcccctatcaccagctttattacagaaccaattgctccttcgcagcaaatagtttcagatttgcattcaaatatcgactctgcggagcctccgctttcgggtgaacataccctacttcatccgaacttctccaaccttgtaaatagtataaaagatagcgatcgccacgaaaacatcgctataacgacattgcatact

SEQ ID NO: 2412 - protein, 175 aa, DROSOPHILA
MNQIEIQELTTHLSQALDQNYDVVNMDAVLCVICALEGTTITKEQLEATRLAKYINQLRRRTKNEHLARRAKSLLKKWREMVGIQQTATENLAHPSQISSSQPALDLVKSPITSFITEPIAPSQQIVSDLHSNIDSAEPPLSGEHTLLHPNFSNLVNSIKDSDRHENIAITTLHT

SEQ ID NO: 2413 - DNA, 2945 bp, DROSOPHILA
cattttgcccgaacccctcgcagtttggcagttaagtttcaaattacaaacccaattgatgctagttaaaaaatctgtgcaggttttgcgttaccattcggactcatcctcaacttcatccccgatgagcccggtttgttgtgatgcactcgtgacaagtccgattaggttagccgtacaccgcggatccgatccgatcccatccatcccatcccattcccattcaagtcccttccatccccttaacgccggtctctagccatctattgttgtggaaagtgtcaacatagcgatctattttatgcataatttggcgtgccaaaatgcgcgactcatcaaaatggtgtcatatgtttttaatcggggaaaacaaggaccagcaggcaaacaaaaaagaaaaaaaaaaaagagatacggggagtgtttgcccggttgtctgtcgcctgcggttttcaattcgaaaagttgcagccggttgcttatttttacaaaagacaaacataaaaaagttacattgaatattgaaaacttatgttgcatacactaacttgcaagagcacatataaaatattagtcttgaaatgttcctcggagataagaagaatgaatttaaaaaataagctgactttttaaataaaacattacaaatgtttaaattcagtttgaagttggggtcatgacttggctaagcgtacctaacttaacgaaactcgcactaaatttggtttgtgccctggaaagatctaaatttcgttaaatatttaacgaatctgaaaaaagcgtttagtcgagttacatacccattcgcttttactttttcttgttttttttcggtatatattattctattcggtatatataaatattctgatcagaacattcgaattaatgacccaaaactaggatgccatatctcatttaacttgttacttgcatttgaattgcattcaaaattgggaattatatatgtaattccttaatccaaaacaataaaaatcatagttttgtcaaaagtcttcaactaacacttaattgctttattaactagaggggaaatattctatttcttgcgttcgtagcggaatttgtagacgggcgcactgtccttggttcccggctttattttcctcggcttcagtaggcgtggctgcttgagggtgttcttcagctgaatcttctgctggacgatgccgagttccctttcacgctgctcgcgtttcttcagctcgttgatgcgctgctgtttgatggggtttggttcagttgttttctacaaaaaatttaaaggcaatcgttacacacaagtagaatcataaatcataagtataatatcaattataaattagtttctcacaaaagcttacaacctcgttggttttaaagaggtgacctaccgatttcttcttcttttcctcctcttcctcctcgtcatcatgctttaaaagccattcgcccatgtccaactccatgtatccgtcttcgtcaaatttgatacgtttgttggctgctcccttaatggcatccacgtccaccagcgaggccttcaagcgttcgatcttcttgcgctccatggtgcgcttcatcaccacgtacttgaggtcctgcgtctgcatgagggccaattgctcgggcgtgtgctcgtccttcgtgtccttctcgtggtgctcatcgttggacagcttggagttgatcatatggtggtagaactcatcgggattcttgttctgcgcccggcggtacaatagcttcaaggtcttttgctttttctgtgcgtcgatggctcgcttcttgtagtcctttttcttctccaggaatcccagatgctggcgcgactccggctggtggcgctccctgtgcaccttctggttgcttttcgacgcattcttccacgatgacatcttcaatttatgctaatcctcgacagcaatcaaatatgttctgttttgataaacgtgcgcttggggaattagagatgcacaactactcgataaatgtatcgcattgactcaaaacatcgaatgtggtgttaatcgggaatttttaaaaaaatctcattggtagaaattcaagctgccttcttgaagacatcaatacaaatcccacccgaattctacgatttaagacttcgtgtaaacaacattcatgtgcatttcacaatggtaatatgattgacgatttccgtgacattgtaaagtagatagttgagtcgcgactatcgacaaagcgcccatctctaaaccgcacacgtgcattttgaacgggcaacaatttcatttgcattatttacttcggaaaaccggagtttttaagtgaaaagtgaacgcaggaaagccgaagcatggtgaagaagaaaatagacaaccggatacgcgtgatgatcgagaatggggtcaagctgggccaccgaaccatgttcatcgtcatcggggacaaggcgcgcgaccaggttcccattctttacgacatcctgaccaagtcgacggtcaaggcgcgacccacggtcctgtggtgctacaagaacaaggatgaggccatctccaagtgagtatccaactgtagaactattacacagaaactcagctaactagatacatttttagtcatggcaaaaagcgagcaaagaagattgctgtgggcaaagtggatgtcaatgaggcggacctgttcgattcctttcgagtggccaccaccattcacggcagatactactccgagacgcacgcagtcctcggacgaacctacggcgtgtgtgtgctccaggacttcgaggccctgacccccaatcttttggctcgaactgtggaaacggttgagggcggcggtctgatcatcctgctgctgaagacactgcagtcgctgaaacagttgtacaccatgagcatggatgtgcacaagcgattccgcacagaagcccatcagacggtgacctgtcgattcaatgagcg

SEQ ID NO: 2414 - DNA, 821 bp, DROSOPHILA
aaaacagaacatatttgattgctgtcgaggattagcataaattgaagatgtcatcgtggaagaatgcgtcgaaaagcaaccagaaggtgcacagggagcgccaccagccggagtcgcgccagcatctgggattcctggagaagaaaaaggactacaagaagcgagccatcgacgcacagaaaaagcaaaagaccttgaagctattgtaccgccgggcgcagaacaagaatcccgatgagttctaccaccatatgatcaactccaagctgtccaacgatgagcaccacgagaaggacacgaaggacgagcacacgcccgagcaattggccctcatgcagacgcaggacctcaagtacgtggtgatgaagcgcaccatggagcgcaagaagatcgaacgcttgaaggcctcgctggtggacgtggatgccattaagggagcagccaacaaacgtatcaaatttgacgaagacggatacatggagttggacatgggcgaatggcttttaaagcatgatgacgaggaggaagaggaggaaaagaagaagaaatcgaaaacaactgaaccaaaccccatcaaacagcagcgcatcaacgagctgaagaaacgcgagcagcgtgaaagggaactcggcatcgtccagcagaagattcagctgaagaacaccctcaagcagccacgcctactgaagccgaggaaaataaagccgggaaccaaggacagtgcgcccgtctacaaattccgctacgaacgcaagaaatagaatatttcccctctagttaataaagcaattaagtgttagttgaagacttttgacaaaact

SEQ ID NO: 2415 - protein, 237 aa, DROSOPHILA [sequence omitted]

SEQ ID NO: 2416 - DNA, 3653 bp, DROSOPHILA
tccagctcgaacaacgaaacttcatgcaactacatcaagcgcatcgtaagcaattgcccaaccgcagcaccttcaagcaaactgtcataaatccgaaatgaagttcgttaaatctttaatcagactagcaaaccattgtaacttaaacccaacgcaatggctcaaacaacgatttagttgaattaatgttcagaacattctagattcgctaatgtttataggttattcatatgtcaagatagtcctaaatatttcaagtacttcccaatgtggtttagggtttgattagaaacagtattaagcattttatcattctgatataaacatacaaatgcgcaaagttgcggtaaaaaaaaataatgctttatgacagaattgtggctggtgtggtcggtgtttttaagttcataggttaatctttactccatcttttatctgcagatcaaacagttcttcaacacgaggccatcgcccgtcccggaaagcggagctgcggccagcacctcgtcaccatcggtgtctcccacgtcctcatctcttgcatctggatcgccggttcccgcaaactaataataagcagaaaaaaaacacaaacaaaacaaaacaaaaaaacagaaatgtgcttcaaaaaagaacaacgtattggttttttaatctctcgggtgggcgcataaagttaacactttgatgggtattcgaaaaacgattctgaaaaaactatcagtttttgtggcttttatggtactttgaattcaggacccacaatttctcatctcgacttaaggttgtgaaaagttaaatcatttttttctaattattagataattcaattacacaatttcaattagatattagatatttgcatttaaatacatttaaaattttaataaaacttcttttaaaaatggatgcccatgtagcattaacatttggctataaacaagctagcagacatcactgtccgataaccgatagcccgattgttatgtatggcttgtggtggtcagctgcaagagccgcgccgcgtttttaacaaatttagcgaataagcaataaataacagacaatggccatggaagacgtgcagaagcacagcgtgcacacgctgatattccgctccctgaagcgcacccacgatctgttcgtctccaaccagggaaatctgcccgaaatcgacgaacgtttgtgagtatacctgtagtttgcaacttacgcattgttaatttgtgtttttcgttaaacagagagaagttgcgacgttccatcaaggcgaaggatggctatggccttgtgctggacaaggtggcgaagatcggcgaggccaggaaggcatcaggagcccaaacgccgggcgacaagacgctggccatcaccgatggcagtgcaacggatgcggccagcggtgccggcagtctggttaagtacaatgcgggcgccaggccagcggagaagacagcgccactggttaccggcacacacacatccctggtgcgcgcctccctggcgaacagcaatgcagatatgagcgccaatggcgccatcgccagccatctgcaattgataccgaagaaggcgcccagcatacccaagcccaagtggcacgcaccctggaaactgtcgcgcgtcatctccggccatttgggctgggtgcgatgcatcgccgtggagccgggcaacgagtggttcgccaccggcgctggcgatcgtgtgatcaagatctgggacctggccagcggcaaactgaagctctcgctcaccggtcatgtgagcactgtgcgcggtgtggccgtcagcacgaagcatccgtatctgtttagctgcggcgaggatcggcaggtcaagtgctgggatctggagtacaacaaagtcatacggcattatcacggtcacttatcggctgtttactcgctggccctgcatcccaccatcgatgtgctggccacctccggtcgcgattccactgcccgcatctgggacatgcggaccaaggcgaatgtgcacacactgacgggccatacgaacacggtggccagtgtggtggcgcaggccaccaatccgcagatcatcaccggctcccacgattccacggtgcgtctgtgggatttggccgccggcaagagcgtctgcacgctaaccaatcacaagaagtccgtgcgcagcatagtcctccatccatcgctgtacatgttcgcctccgcctcgccggataacatcaagcagtggcgctgtccggagggcaagtttgtgcagaacatctccggccacacgtccattgtcaattgcatggcggcgaatagtgagggcgtgctcgtttcgggcggcgacaacggcacgatgttcttttgggactggcgtaccggctacaatttccagcggttccaagcgcccgtccaaccgggctccatggacagcgaggcgggcatattcgccatgtgcttcgatcaatcgggcagcaggctaatcaccgccgaggcggacaagacaatcaaagtgtacaaggaggatgacgaggccagcgaggagtcgcatccgattaactggcgaccggatctactgaagcgccgcaaattctagactcctagtttgtaagcctatccataatagaatacgattttccaaacgatttcattaaaaacaactttaaatgcgctcgaatctttgagtaagctagtttctggtcaagaatcctgcatccaaatgcgcaggtaagtcgatggagatggaaatgaaagagttgtcagttgaattcttggtatttttattgggtttttttttgttccgtttattttgtacacataaataaattgaattatttgctgcataaataataatagcatatagcggtagtagattaataaaatatgatttcttgttggctctcttctcatttgattcggtttttcgaaacggaaacggatgtgggcgcggacgcggatctcgattccttcgctatatagttaacaaagaaaaagcactaaactgtgtattattgtaatttattaattaattttatgttgtctagtcctttgcatacatttttatcatttcatgtttaaaaatcacaaataattgtttgaaacaaatcttatatttttcatctcccatacatacgcctttgccatctctttcgatttgctgctcgaatatatgcatatatatatatatatccaccgccatcgtcttcaagtttatcttgcgtctcgtttggtgactctttttgttttgttaatcgtatgtttcgtttaaagttaaacttgttacatagttgcgtttatttgtttacagctcttcctctctcgtttacctataatctatatataatgctcctcttgttggttgcttttatttagtttatgttctttctttctatgcccttctattaggtttaaggtttctcatttccttttctttgctcgaccctccttcactttttctttctttctttacataatcttgcttttgcttttacttttgtttctttctttctttctttctttttgcttataattttattggacaactagcaacgaacgcttatttacacttggacaaaaggaaacgattcgcttcgcggcgagttcacttctacttctgcctgcgattaaacaattatcgattaagaatattatgtagcatagaagaatattatgtag

SEQ ID NO: 2417 - DNA, 1594 bp, DROSOPHILA
tggtcagctgcaagagccgcgccgcgtttttaacaaatttagcgaataagcaataaataacagacaatggccatggaagacgtgcagaagcacagcgtgcacacgctgatattccgctccctgaagcgcacccacgatctgttcgtctccaaccagggaaatctgcccgaaatcgacgaacgtttagagaagttgcgacgttccatcaaggcgaaggatggctatggccttgtgctggacaaggtggcgaagatcggcgaggccaggaaggcatcaggagcccaaacgccgggcgacaagacgctggccatcaccgatggcagtgcaacggatgcggccagcggtgccggcagtctggttaagtacaatgcgggcgccaggccagcggagaagacagcgccactggttaccggcacacacacatccctggtgcgcgcctccctggcgaacagcaatgcagatatgagcgccaatggcgccatcgccagccatctgcaattgataccgaagaaggcgcccagcatacccaagcccaagtggcacgcaccctggaaactgtcgcgcgtcatctccggccatttgggctgggtgcgatgcatcgccgtggagccgggcaacgagtggttcgccaccggcgctggcgatcgtgtgatcaagatctgggacctggccagcggcaaactgaagctctcgctcaccggtcatgtgagcactgtgcgcggtgtggccgtcagcacgaagcatccgtatctgtttagctgcggcgaggatcggcaggtcaagtgctgggatctggagtacaacaaagtcatacggcattatcacggtcacttatcggctgtttactcgctggccctgcatcccaccatcgatgtgctggccacctccggtcgcgattccactgcccgcatctgggacatgcggaccaaggcgaatgtgcacacactgacgggccatacgaacacggtggccagtgtggtggcgcaggccaccaatccgcagatcatcaccggctcccacgattccacggtgcgtctgtgggatttggccgccggcaagagcgtctgcacgctaaccaatcacaagaagtccgtgcgcagcatagtcctccatccatcgctgtacatgttcgcctccgcctcgccggataacatcaagcagtggcgctgtccggagggcaagtttgtgcagaacatctccggccacacgtccattgtcaattgcatggcggcgaatagtgagggcgtgctcgtttcgggcggcgacaacggcacgatgttcttttgggactggcgtaccggctacaatttccagcggttccaagcgcccgtccaaccgggctccatggacagcgaggcgggcatattcgccatgtgcttcgatcaatcgggcagcaggctaatcaccgccgaggcggacaagacaatcaaagtgtacaaggaggatgacgaggccagcgaggagtcgcatccgattaactggcgaccggatctactgaagcgccgcaaattctagactcctagtttgtaagcctatccataatagaatacgattttccaaacgatttcattaaaaacaactttaaatgcgctcg

SEQ ID NO: 2418 - protein, 482 aa, DROSOPHILA
MAMEDVQKHSVHTLIFRSLKRTHDLFVSNQGNLPEIDERLEKLRRSIKAKDGYGLVLDKVAKIGEARKASGAQTPGDKTLAITDGSATDAASGAGSLVKYNAGARPAEKTAPLVTGTHTSLVRASLANSNADMSANGAIASHLQLIPKKAPSIPKPKWHAPWKLSRVISGHLGWVRCIAVEPGNEWFATGAGDRVIKIWDLASGKLKLSLTGHVSTVRGVAVSTKHPYLFSCGEDRQVKCWDLEYNKVIRHYHGHLSAVYSLALHPTIDVLATSGRDSTARIWDMRTKANVHTLTGHTNTVASVVAQATNPQIITGSHDSTVRLWDLAAGKSVCTLTNHKKSVRSIVLHPSLYMFASASPDNIKQWRCPEGKFVQNISGHTSIVNCMAANSEGVLVSGGDNGTMFFWDWRTGYNFQRFQAPVQPGSMDSEAGIFAMCFDQSGSRLITAEADKTIKVYKEDDEASEESHPINWRPDLLKRRKF

SEQ ID NO: 2419 - DNA, 3372 bp, DROSOPHILA
aagtagatgtaacataagtgtaataaacagaccgtgaaattacgattctaaaggcttcttttcactgatagcactgcatacgcagatccacctgctggtccagccagttgatccaatctggagtgataggtcgctccagggtgacctcgtggaagatctccactcgacgcgtctccacgaacataaaactcttaaacaaatgcagcgatgcagcgttgtccatgtcgatcttgacctcgaatttatccaatttaagctggggctgcgattgggcgtacttgagcatgaggagcatggcttccctgccgaatcccttgccccgtgcataaggttcggcaatcatgatttccgcctccgccgttggtatctggctatcgggatcttggtgcaggaagagattggtgtcgcccaccatggcggcaatctcatcctgatcacgcgaataagtctctgcatccaggacaatgaaggtcagcttgtcgctgtcctccctccaactcctttgcatctcgtgctcctcttctaaggtcagttcctcggatgcggtcaactccctcagggtctcgttgctcatccactcgtggtacttgggcacgtggcgcgcttcgtagggcacaaggatgaccctgtgacccagtattttggtgttctcgtttagatgcatccttaaatttggaaaaacttaggaatattctacaatctggaaatatttgttattgtaagcttgtttacatcaatcagctgctcaagctatatagtggccacctgaatctacactgtaaggaattctctttgcgtaagcactgcaaataaggtaatatttttgaaatgaactcttaaatcgaatggagaaaagcgagtaatcaaataaagtaatatcaaataatcaatcgaattaaaaattaagatctgttcaggaatcccccttacgatgttgtggcagcggtgccacatcttcttagctataacagtctggcattgccaaaggagcaacaatatgaaaagcagagcaattttctgattaattttttcttaagtgttactaaataaataagtttaaaaatgccgaatcgtaattgccggacttgcggcctgttcattttctgttcgacgcccagtaacctcttcgaggagcccaattccgtaatgctgcaccagatcgaggttcttactggtttgtttgtgagtacctttctatttttgtgttttcaaacttaagtctggattatccgtagttgctcggcggacccgggaacgagctgcccccctttatttgctcaccctgcgaattggacctgcagacggcgattgctttccgggaacgtgtgattcgaacccaaaaaacgctgcaggaaagtcccaacctggggaacgcggaattgatcgaatccttcgcagttggtgtggagaaggagattcagtacgctgaagaggtcaccgagatcgaggttatagaccttctacccgaggaacacctgctggaagagacggaagagccgtacgaaatatgtgagcagaacgagcagccccaagtgaaggttcctgcgcaggagaagaagctccgcagaagtacaaagaccacgcccacagtctttacctccgttaagtttgcggacaatagccaggccacgcgcacccagtggagcagactcaccgaggacgaagtggtggccctaaagcgggagcgacgcaagcgggattgcatatgcgagcagtgtggccggcacttcacctgccccagcaacttcaagttgcacctcctccgacacaccggcgtaaagagctttgcctgtgaccagtgctcccagcagttctacactgctacgcttctgcggcgccaccaagaactgcatgcggggaatgctttgtttcagtgtcgctactgcgaggcaacctacagcaacgccagcggacgcatccagcacgaacgcatgtacgacagaactcgttcccattcatgaaacgtctaatgcttttcacatatttctgaccactttccatttcatcaggcgccacacgaatgtcaagcccttcacgtgcaaggaatgcaataaaagctttgccatgagcggaaaactccgcacgcacatgctgagtcacaccggagtgcgagcgttccagtaagatcttagttacctgaagttttattgaggatccttgactctgtttatctgtttttcagctgcgactcctgccaagtctccttcgttcgccgctcccacctgacctcccactatcgctcaaaaggtcacgcccacacttcaagcgcccaggcggcactggacaatcctgtggaactggacgtgaaggccagtaacggcatgcagacaggggctaaggatgaggctttactaggaaaaagtggatcttaggataaactgtactaaaaatcaatggatccccgatctgatattcggattaatactcaatgcacttaatattaatcgaaaatggaatatgttcaaatatggctgtgttgaataaaaactgattttttcaaaatggccaatagagattaccttacttaggctgcgcactaatttttagttacattatttttatgttttaaaatataataaaatctaaattcgaacattgtttaccggcttggggagtagccagcattttaaaatgtcatgagcctggtcacactgtcttgcactaaataaattagggggcgtctttaaattgcaaaatttcttgcaaaatcagtagaaaagtgcttggagctgctgttacaatagatcctaagaccaaacgttcttctccggaggataatacctggaaccatcactaaccccaattcaaaagtgtcaatctgtttccgcaaaactgcatgtggtgtttgtttcgcttgtttggttatttttcccaactaacatcctctctctaaaatctcgatttcgtacttgaattgcgcagcttttgctttgggattttgtccgacaattaggcagaatccatagcgaaagacgcagcaagtagcatcgtttacaatccgcgaaagtgcagtcgcagaattttccggcggggcttctggcttaaccaatgtggcacttccaatgagaaatcaattgcaaggcgttggatgctctcagtattggttattggcgagattggccccgggacagcattactagacagttccgatcagtccgcactaaacccctcccgctttagacacacacatccaatacaatggcggagaagccgctggccgactgcccggactctgggcaggtccgcaagcgtccccggctggaggacgaggagcaggagctcaaggtggccggcttttcgctgagcgccatcgaggaaatgcggcggaccagggacaacgagctgcagaacgaacccatggaccagcaactg

SEQ ID NO: 2420 - DNA, 1181 bp, DROSOPHILA
aaaagcagagcaattttctgattaattttttcttaagtgttactaaataaataagtttaaaaatgccgaatcgtaattgccggacttgcggcctgttcattttctgttcgacgcccagtaacctcttcgaggagcccaattccgtaatgctgcaccagatcgaggttcttactggtttgtttttgctcggcggacccgggaacgagctgcccccctttatttgctcaccctgcgaattggacctgcagacggcgattgctttccgggaacgtgtgattcgaacccaaaaaacgctgcaggaaagtcccaacctggggaacgcggaattgatcgaatccttcgcagttggtgtggagaaggagattcagtacgctgaagaggtcaccgagatcgaggttatagaccttctacccgaggaacacctgctggaagagacggaagagccgtacgaaatatgtgagcagaacgagcagccccaagtgaaggttcctgcgcaggagaagaagctccgcagaagtacaaagaccacgcccacagtctttacctccgttaagtttgcggacaatagccaggccacgcgcacccagtggagcagactcaccgaggacgaagtggtggccctaaagcgggagcgacgcaagcgggattgcatatgcgagcagtgtggccggcacttcacctgccccagcaacttcaagttgcacctcctccgacacaccggcgtaaagagctttgcctgtgaccagtgctcccagcagttctacactgctacgcttctgcggcgccaccaagaactgcatgcggggaatgctttgtttcagtgtcgctactgcgaggcaacctacagcaacgccagcggacgcatccagcacgaacgcatgcgccacacgaatgtcaagcccttcacgtgcaaggaatgcaataaaagctttgccatgagcggaaaactccgcacgcacatgctgagtcacaccggagtgcgagcgttccactgcgactcctgccaagtctccttcgttcgccgctcccacctgacctcccactatcgctcaaaaggtcacgcccacacttcaagcgcccaggcggcactggacaatcctgtggaactggacgtgaaggccagtaacggcatgcagacaggggctaaggatgaggctttactaggaaaaagtggatcttag

SEQ ID NO: 2421 - protein, 372 aa, DROSOPHILA
MPNRNCRTCGLFIFCSTPSNLFEEPNSVMLHQIEVLTGLFLLGGPGNELPPFICSPCELDLQTAIAFRERVIRTQKTLQESPNLGNAELIESFAVGVEKEIQYAEEVTEIEVIDLLPEEHLLEETEEPYEICEQNEQPQVKVPAQEKKLRRSTKTTPTVFTSVKFADNSQATRTQWSRLTEDEVVALKRERRKRDCICEQCGRHFTCPSNFKLHLLRHTGVKSFACDQCSQQFYTATLLRRHQELHAGNALFQCRYCEATYSNASGRIQHERMRHTNVKPFTCKECNKSFAMSGKLRTHMLSHTGVRAFHCDSCQVSFVRRSHLTSHYRSKGHAHTSSAQAALDNPVELDVKASNGMQTGAKDEALLGKSGS

SEQ ID NO: 2422 - DNA, 3426 bp, DROSOPHILA
taagcatgtaaattccaggaattatattatattaggattccttaacaacagatagactcacggtgcgtaggcggcgttgtccagtagcctcgtgatataatcacagggcttttcggttaaggtggggcacatgggcagtccgaagatgccctggtgctgcccaccgagtgtgataaggttcctcattggcggattcgggcaacgttcggcaaccgcacgcagaaactggccgccttgcgagaatccgatggcgtggtatcccttggccaggtgctcatcctgcagtagttgcttgcaaacgtaatccacctgttcgttgggatgtatgaagaagccgctctgccagtctatcaaaacattgccgccgatctgcagggatcgcacatagccgccctttgtttgctccacgatcaggttcataatggcacccaggctgaagggtacgcagcaggtgtcgcccattccgtgccacagaacgaccggcaggacctccggattggttcctcctttcgtcgggctccaccatatgtagctcagcacgagggaaaagatcaggaacagcaaaaataaaatgcatgaaaaacgagaacagcagatagaaatcattgttgttggagtgcaatttttgcaaatcaaattagtcgtctgctatcgataatatatggttcgataatataatcgggatatttcatgtacgggatgtacctggtcttatttatacctaaaggtaatttcgtactgcgtgctttaacgcaacatgaaaaatactgcaactatttttcctttcaaggcaacaggcttgactatataactgttcaattaggtgcatttttcgaagccctcgtctacattgctgcatttattggtactttattgtgcagctgtgaacagaaaatttacattttccaacactggcgtctaagcaaaagtagaatgttgtgaataccccgaacggtaaacaaatgctaaacagctgatagcaataacacattttattcagcgagtttgtttctttcgatttaaactcgagttttaatgtggtttactatttaaacgtgacaaagtactattgttaagtatgccaaaacacggcttaagttgtttataaaaccggatgctggctcataacctaggtttccataaaaagcgccttttttcaaacatgaaggctgttttacaggatcggggtgtcataggcttatccctcgaagaatgcgatttggaaagaactttgcttggaggacagagtttccggtaagcgctatccatactaataatgaacatatgtactcaaaacaactttacatgccagatggcgatccatatgcgatggtaatagaacgaaatatggcggagtggtgttcaacacctactgggtgctccagcaagaagaatccttcataacttacgaggcatacggaaccagcagtcctttggccacgaaggactattcttccttgatatctgactacctacgtgttgatttcgacctaaaggtcaaccaaaaagattggttaagcaaagatgataactttgtgaagttcttgagtaagcctgtgcgcctcctttctcaggagccgttcgaaaacatttttagcttcctttgcagtcagaacaataacatcaagcggtaggtggttcaatcaaatgcgaatcccatcattaaatacagtaaattggtttcttcttagcatatcatctatgattgaatggttttgcgctacatttggcaccaagattggtcacttcaatggtgccgatgcgtatacatttcccacgataaatagattccacgacatcccatgcgaggatcttaatgcccagctaagggctgccaagttcggttatcgggccaagttcatagcacaaacgctgcaagagatccagaaaaaggggggacaaaactggttcataagcctaaagagcatgccgttcgaaaaagctcgcgaggagctgacactgctacccggaatcggatacaaagtggccgattgcatctgccttatgtcaatgggtcacttggagtcagtgcccgtcgacattcatatttacagaattgcccaaaattactacctgccacatctaaccggccaaaagaacgtaaccaagaagatttacgaagaggtctcgaaacattttcaaaagctacacggaaagtatgccggttgggctcaagctgtaagtacactgaaagttgcaatttagtctgtgtgtttcttataatatcattatttcagattctcttttctgccgatttgagtcaatttcaaaatacttccacagttgcttgtaagaaaaaatccaataaaaaacctaaaaagtgatcttatctattggattaaaaaaaaaaatattcctacttgtaatatttgaatattaaaatataatagaaatgtatatactaatgtatatataaatatatatctaaacagagaaagaacttgatactgggtttcatatatcttttttttattgctaaacagatgtaattgattaaataaagtgtacattaaatgtccgttttgtatatacatcgccatatttatgtgtacagattgcgctcgaatttgaaatttaggatattcaaaatgtgttgtgtccgttttagaaattcatcacctaaggaaaccacttttagatacgcatacagatgtttaggatatgcttatgaagtggttattcgaatcttttattggagtgagcactgtacaagtgaaagtttcagtatctgtatccgcattcgtatccgtgtccgcatctttatatctgtccgtatcttgataaaagtcctcgtctacaggcctccattcgcctccgctgatcccgccgccccctgagttccctgttgttgttgctgctgctgctgctgctggagcttgctgctctgggagaaatcgatacaggcgccggaggtgagatcaatctcctcggaatcggatccatcggaaccctcgtcggagtgtccggatagggcggccattccgcccagttccatgccgtgcgacggcgccttatagagctttagttctgtataggtcttcgatagcttatcctgatccgtggcctgctggtgtccctggtgctgttgttgctgatgctgctgctggaatgccgggtgcatcatggtgaagctccccgaattgggtccattgcccacctccgccagttccgaatccttgctcgcggaagagaggttctccggcgtctggctgggcggtcgagccgtagctccgttgccggatccgccctgcaccgctccaccgcccatgacggggggcgtgcccaggctgaggcagcgcatccgccaggcgtcctggaggagctgcagtcgtgcctgcttgcgccacttggcccggcgattctggaaccacacctgcaattaaaaaaggtaatttactctatatagatttggccttttgttgttgg

SEQ ID NO: 2423 - DNA, 1248 bp, DROSOPHILA
cgagtttgtttctttcgatttaaactcgagttttaatgtggtttactatttaaacgtgacaaagtactattgttaagtatgccaaaacacggcttaagttgtttataaaaccggatgctggctcataacctaggtttccataaaaagcgccttttttcaaacatgaaggctgttttacaggatcggggtgtcataggcttatccctcgaagaatgcgatttggaaagaactttgcttggaggacagagtttccgatggcgatccatatgcgatggtaatagaacgaaatatggcggagtggtgttcaacacctactgggtgctccagcaagaagaatccttcataacttacgaggcatacggaaccagcagtcctttggccacgaaggactattcttccttgatatctgactacctacgtgttgatttcgacctaaaggtcaaccaaaaagattggttaagcaaagatgataactttgtgaagttcttgagtaagcctgtgcgcctcctttctcaggagccgttcgaaaacatttttagcttcctttgcagtcagaacaataacatcaagcgcatatcatctatgattgaatggttttgcgctacatttggcaccaagattggtcacttcaatggtgccgatgcgtatacatttcccacgataaatagattccacgacatcccatgcgaggatcttaatgcccagctaagggctgccaagttcggttatcgggccaagttcatagcacaaacgctgcaagagatccagaaaaaggggggacaaaactggttcataagcctaaagagcatgccgttcgaaaaagctcgcgaggagctgacactgctacccggaatcggatacaaagtggccgattgcatctgccttatgtcaatgggtcacttggagtcagtgcccgtcgacattcatatttacagaattgcccaaaattactacctgccacatctaaccggccaaaagaacgtaaccaagaagatttacgaagaggtctcgaaacattttcaaaagctacacggaaagtatgccggttgggctcaagctattctcttttctgccgatttgagtcaatttcaaaatacttccacagttgcttgtaagaaaaaatccaataaaaaacctaaaaagtgatcttatctattggattaaaaaaaaaaatattcctacttgtaatatttgaatattaaaatataatagaaatgtatatactaatgtatatataaatatatatct

SEQ ID NO: 2424 - protein, 327 aa, DROSOPHILA
MKAVLQDRGVIGLSLEECDLERTLLGGQSFRWRSICDGNRTKYGGVVFNTYWVLQQEESFITYEAYGTSSPLATKDYSSLISDYLRVDFDLKVNQKDWLSKDDNFVKFLSKPVRLLSQEPFENIFSFLCSQNNNIKRISSMIEWFCATFGTKIGHFNGADAYTFPTINRFHDIPCEDLNAQLRAAKFGYRAKFIAQTLQEIQKKGGQNWFISLKSMPFEKAREELTLLPGIGYKVADCICLMSMGHLESVPVDIHIYRIAQNYYLPHLTGQKNVTKKIYEEVSKHFQKLHGKYAGWAQAILFSADLSQFQNTSTVACKKKSNKKPKK

SEQ ID NO: 2425 - DNA, 8912 bp, DROSOPHILA
tgccggttatcgcactgcattcggaatatcgatgccatcgagcaatcggcatcgataaaaacgctaggtggtaaaaaacctagctaaggttttcgaattaaatgtgtccagtaaacaattaaaattaaatataacaaaacacgaccttactcgtaggattatacccgtcgtagagtaaatggagtgtactagatacgttgaaaagtatgtaacaggtagaaggaagcgtgtccgaccatataaagtttatatattcttgatcaggatcaatagccgagtcgatttggccctgttcgtctgtccgtccgcataaacttcaagatcttaggaagtttaaaagctagaaggttgagattaagcatacagattctggagacagcgctagtttgttgacccaaaccacccaaaactgccacgcccacttttttaaaaaatgtcttaatattttatttttatattagtcttgtaaatttctttcgacatgccaaaaccgatacattttttcaatttatttaccaatttctagacagaaaaatgatgatatttctctgagtaacggttatctgatagtcggggaactcgactataggtttctctctgattcgtggtaaaatacattgtgttctctcttgtttttgcgtagcaccagcgatttttaagtaatgaacttgaattagcctaataccgctgctaatgaaaaaaatgtaatgtatttctaattaattgtgaatacttaatgtgacaaattctaagcttgaaggtgttcaatattatctatgaaaatttcaaaacattgggcatgtaaatgcgtagtctgaaatagtcatcaaaatgtgctttgagaacaaagtactggtatgttttaaggcaaaataagaatattttcaaaatcccctgccgaaaatcaaacttctcacactcaaaccatccgttttgtgcgggagtgcagacccgccaaccaatttctgtcgtttgttaaatttatattttaaattgtaaaatgccggccagcaagggtcttcttttcaagcgctacatccgcatcgagttaaatctgtggcggcggacgctcttcgagatcgtcgccctagtgataatggtcctagtgatctttctcaaccccatcgctcactccaaaaggcttctatacacgaccaccgagaacgaaaacgagcagagcatcgtgtcccacaaactgcaggacataaatatattgacgtaagtgcatagtattcacctacaaccttttgaatgtagcgccatccaaaggcgcaacttaatgctcctacctatttatatggttttgttaccttccgcagacgcatggcagactcgaagcgggagaaaaccaagtacatcctggccttcacgccggaaacgacgtttacatcggaggtgaccaagaatgtggccaaaacgctggaactgagctcaaccgtgggctacgagagcgagtccgaaatgcaaaatcagttcgatgagcggactaccctggcgggcattgttttcaatgatctgcgcgatgacggcactcctttgactctgtccatctcgattcggtttcccagcgagttccgcacgatcgctccgttcctcaccgaggatcgcctgtggataacccgctgttcgggtcgcattaatcccggacgggatcgggccaagcacgataagcagcaggatatatatattcgcgaggggtttctgcagctgcagcaccagatctttgtggaatggtaccaccaattgcgcaaggacatagttagcacctatccagaacccaatgtcgaggtctacaacatcctgctgaaggccgccgacgagccgtgctccgtgatgagtgtcgcccagctgcccacattcctttataattttatatacctactgccctttttgaatatcatcagagtaagtacaccatctacaccacctaaccaacatgagatataaggacgctttctggcccaattctcagaacgtcgctgcccaggtggaggatggggtgatggtgcatcagtggcactacggctactcctttggcatgcagtggggcattaagtttttggtgctttttctcagaatgtgcattttaggtgtcatatataccatcatgttgttggtgagtttttgccacttgaccatacctgctcaatttaacaaataaatatatttaggccttttggggctttggaggtcgagaaggggagttctccggcactgggacgatagcctttgtctgcttcatcacactgtacaccgtggagatcattatcaccggcatggtggtggccaaactgtttgccaaccccacgaatgcggtccttttcgccttaatgctctggctgttcatgtacgcggcattctgcattatcctggaacgctactgggacatccacaagtactatgtgttcttcatcctggtggctttctgcaactgccagatgcacttcagcatgagcttgttcagaaactgcatcgagaaaccggaaatggtgaacaccattgatttcgtcttgatcttcacatcggccataagttcggccttgatttacttcctgattctcttggcgattcagtggcgaatgccgggcaccttcctcagtcggcggatagtgaacaataggccgcggaagcagcaggaatcggacaccaccattatgtacttgggcagggctccgagctttcaaaacttcgaattcggcgacgtgggcagtgtggagctcatgcgattgcgtcatgtcagcacatcacatcgcgattcggagcgaaagatcctcaagaatatatcgatgcgaatctatcgtggcgaggtgtttgtgatcctcggccacattggctccggtaaacttacgcttctgaggattttggccggcctcaagttcccactacgtggcaatgtatatataatgggcaatccctttgaacccaatggtaagttggttgtttttgtgattatacccatttctcgtacggtaaaagtatataaattcttgatcaggatcaatagccaagataatccgtttgtccgtccgtatagttccctaactataagagctagaaaagattagattaagatggtattaagcatttagattctctatttgaaaagagccgtccgcttctgcatgcaatttcgtgaggatatcttcaacattcttacactttcccttacgttgagtaaagcgtatccaatagtcgtggtatgctgtagccgttctcatactcatacaaatacaaatacaactaggtgaagcccgtcgcctggtggacttccgtttcgatgagcatgggctcaacaagcatttgaccgtagaacagaccattgactaccatgtgcgtctaaaactgtcgcccagcgagtccgaccgctacgagatcgagaggcgcaagtggttggccatactggatcagcacgtggagagtcggggtgtccggatcggaaagctgagttcaggctcaatgaaactggtggcgctgtgctgctgcttggccggagatacgcccatcattatactggaggagccgaccacccagttgacgggtcgggaggcgcagattttctggtcgattgtccatgcagagaaggaaaatcgcgccttcatcatagccacttacaatgttggcgaggcggagcatgtcgcagatcgcatcgggatcctcagcatgggcgtcctggaggccagtggcacacccttctttttgcgctccaagtttagcagcagtgtggatctggtatttataaaccgattttatatcaatagatctatgtacatataacagataggacgcaacattgaatttgtatcggttttcattttcaaggtcatcatcaagaagccacatgtgcctgatcagcccatcactgactacataaaccagtttatgcagaacatcgagccggaaaatgagatcggtgattcacttacttacagacttcccgtgatatatcgtcccaggctgcagaaactactgattcacctggaaatcgatcgcaagatgctgggaattgagaatgtgagagtggtgggtgcggagctctccgacatctacatgacactggtcacctcgtttcgactgcagcagcagatgattcccgatgtcagtacgtatacattcggggggatatatttatatacatacatatacgaacatatacaacatacatatgttacattcgaactgttcattttcttcactcgcctccaaaatgattagattcattcttatatgccaattgtacatgacagaaggggatgacaatgttgtgcttaatgctaacggggatttgtgcaaattacttacatattattatattatacgtttctattatgtcacgtatatgtacatgatacagtgggacctatataaatatgtcctatctcaatattggtatcccatttatggtacacttacatacaaacaatagaataatattgtttatgaatgttattaaacataaatttttacccgtttctgcagcgcaaactttcaagtaccaggtggtttcccagaagcaattgaccaaacaacgcatgcgggccatgttctacaagaagatgatccacacggcgcccaatgtttggcccattatcatgatcttcaccagcttcgttttaattgccatcattgcccgtttgtccgtgttgctcgatatgccgaaagagcgccagaattcgattcacattggtttcagggaaccagaggacgtggttaagtacttaccaaatctgaaggactgcgggtacatcgacatccggtcggcggtgaaagtgaacaagaagaaaagcgtcggtgtctcccgaacttttgatgacgattcttttgtttgtgaaaaaggtagctatcggaacaatcttagaaagaagaacgagttgagaagttttggagcagtggagtcggacggggatgagcacctaaatggttatataagccaggatatgtttcactcggctcccatgatgctcaatttgctgcaaaatgtcatacttaggtgagaattacctttctcagatacagagttctatgaacgtctgataaaagcgtaataagaggcgtagtagacttatgggatttgatttaatggattccaggagcaacatactcggttaagcagtcgattatttctaattcagtcgcttttctgattgcgtaactggtagccaatagtcgatttactcgactaaaacgatttttctgtgattttcatttacagactttcatatcccatgcaaacggacctagttgtcctcgtggagaaccatcccctgcccacacagctgtcccagaagatcaatgtgctggataacaagatcgcacatatccatgtgccattggttgtcggctgcatcataccgctgaccgtatccgttttcgtcatccccctggtggaggaggagatatacgatgttcgattcctgcagcacatggccggacttgggctgaaggtcttctggggcatcaatctgttttgggactggttcaccttcttcgtctactcggtcattattgtggttatcatgagcctgatgggtatcggtggctttgggttctacgagaatgccatcatggtggtcctgttgaccacctttggactggcggccctgccgctcacctatctggtctccatgttcgtgaataagtcaattgttcgggcatttctcgtttccgtactcctgcagggagtgtccggcctggtcctatatatcatctactgggacgtcgctaacagcaacacgatcttcttctacgccgcctgcatgtcgccaggattctcgctcttggacggagtcagcaatgtctatgcccagaacctggagcaggcgatctgcatagacaagtgcgaggcgaccgacagctgcacggaggagaacatgaacgaggtggtgccgaattgcaagtgtgagtacccggtcttgatagtccatcttttaaccccctcatttcagttatgtttttaagcaaacatatcattcgttctgatcattttatttatacgacgatatttattggtcacaaaacgctagaatttgtaatggacaactattttgtggtttattataacctttacacgtagagtaacaggtagggaatcgtttccgaccatataatgtgaacatatatatttctgatcaggatcaatccgtatgaacgtcgagatctcgggaactacagctttgctagatagttgagattagacatgaagattgcgcaagtttgtttctaaatattgccacgcccactctaacgcccacaaaccgatcaaaactgtcacgaccacacttttgaaatgtgttttaatatttatctttggaaacttctatcgttttgccaaacaaatttttttgcacgcccacaaaccacctaaaactgtcaagcccacacttttcagtcctttttaaattttttttcatataattttgttttcccgatttcgaccgatatttcaaaaagtattgaaatttcttgttcacacaagcagctgagaaacaggaacatatcgaatctagtcgggaaatttggttaaagcattctctcttgtttttacatcgttttcgtaaattaaatatgtttcacttttggttttctccagttgacacatttttcaagtgggctgctccgggtatcttaccccctattttgtacatggtattgtctgctctaattttcttaatgcttattttctggattgagttgcatcgcagggagaagaagttccatacctccagagagtgagtttgtaatatattgatatgcctcgtcctataagagaattcaacactccggcagtcttcgtaaaatgagaaccgccacatatccattcgacgatggcgatgtggcggatgtgaagcaaaagatcgctgaagcggataacaccaaggccaagcagtccgtcttcctggtggatcaggtggaagccagggtcccagctgcgggcaaaaggatacacaccgtctcctttgccctgaacaagtgagtcttgttttgcttttacaatattattaatatccatctagacaaatattaaactgtttgaagaaaaacgatttgatatgaaagcgcgtaaaacctgtatttagctattgtaaaaagaacagtgttgttttcttcccccaagttcaaacttttgacttatgccttttaaacttatgttaccatgttttgttgttgttttagatacatgagcatgggtatcttcgggccccgcaactctggaaaaagtcacttgatgaggcagctggtgggccagcgtggattcgcctttggcgagatctacgtgcggggcctggacttcaagtacgatctggaaagcatccacacctacatgggctactctccgcagcatcgaggactcctcaatgagctgacaccgcgggagcacatccgtctgttgtgcatgatccgtggtgttcccgaggctaagatcggcgagaagatgcatgacctgtgcctcatgctcaacatgaccgggtggatgcaccgaaagtgcagtttgctgacggcagagaagcggcacaagttaaaaattgccctggcactggtggcctacaacaagatcctcgttctggacgagcccacgtgcggcatgccggcaactaccaggcgggaaatctggaacatccttcggtatatccgatactgcggcaaaacaatcatttttgccaccaacgatgagctggagtgcaaaatccttgccgactttattatcctgttccaggacagcgagatgctggccatcggcagcctgcagtatctacgatacaagtacagccatggattctatctagaggttcggctcatccgcgatggagccaccctcgccgaatcggaggagaagtgggttttacatagctttgtcccctggttcatggataataataataatataatgcatttttttctccatcagtttgcgtaaggatgtggaaaatttggccaagttcgtcaacttcctgcacaatagatcagagctagtgtaagtttcctatatgaattttcctatatcattaaagcataggctccacatttattcgaccgatacttaaataactattgagttgatttaaattcgcttttaaaaaagatttcataataatttacttttaatgttgtcgtgtatgtttcagaggtcgacttaacaattggttcaaattctacgtgccagtgggccacatcgtttactcattcctgtatggcgcaatggagaagaacaaattgcgtctcaacgtgagcgactactgcatttaccaggcggacatgatgagtgtggtggcccaggtgcaggagacccgggcccagttgaagcaccacctcgtccagacggagggtccgcttcccctggacacgacgtcccccaaaaagggcagagcaaaaaagtagttccgagcacttattggggaaggcgtttattataccattatataccattatacgtttctaaacagtgttcaaatgtaaaattgattaattttccagcagttatttaaaaatgttttaaatgggagaacaatttaaaataactaaaaattaaccaaatcagctgactcatgcggaggtcaatgtctggcctcagttgtccagacgcagggccttggaaatgtgggcttacccgctttcaagaaatgagaactttgctggttccacacgtgtggctttgcataaataataataatccctggggaagttcataggttctgggaagctctgcacgtgcccgcattcatttttcatttgcgtgctcgtttctttgacacatttccgactagcaattgataattaattgatgaacagacagtttagctgcaggaccaacattgagattaaaaactacattattagagtacttagtgcgagcttttgagtttagagtttttggcaaggatactatttaaaaataaatactacgctttacgtagatt

SEQ ID NO: 2426 - DNA, 4536 bp, DROSOPHILA
atgccggccagcaagggtcttcttttcaagcgctacatccgcatcgagttaaatctgtggcggcggacgctcttcgagatcgtcgccctagtgataatggtcctagtgatctttctcaaccccatcgctcactccaaaaggcttctatacacgaccaccgagaacgaaaacgagcagagcatcgtgtcccacaaactgcaggacataaatatattgacacgcatggcagactcgaagcgggagaaaaccaagtacatcctggccttcacgccggaaacgacgtttacatcggaggtgaccaagaatgtggccaaaacgctggaactgagctcaaccgtgggctacgagagcgagtccgaaatgcaaaatcagttcgatgagcggactaccctggcgggcattgttttcaatgatctgcgcgatgacggcactcctttgactctgtccatctcgattcggtttcccagcgagttccgcacgatcgctccgttcctcaccgaggatcgcctgtggataacccgctgttcgggtcgcattaatcccggacgggatcgggccaagcacgataagcagcaggatatatatattcgcgaggggtttctgcagctgcagcaccagatctttgtggaatggtaccaccaattgcgcaaggacatagttagcacctatccagaacccaatgtcgaggtctacaacatcctgctgaaggccgccgacgagccgtgctccgtgatgagtgtcgcccagctgcccacattcctttataattttatatacctactgccctttttgaatatcatcagaaacgtcgctgcccaggtggaggatggggtgatggtgcatcagtggcactacggctactcctttggcatgcagtggggcattaagtttttggccttttggggctttggaggtcgagaaggggagttctccggcactgggacgatagcctttgtctgcttcatcacactgtacaccgtggagatcattatcaccggcatggtggtggccaaactgtttgccaaccccacgaatgcggtccttttcgccttaatgctctggctgttcatgtacgcggcattctgcattatcctggaacgctactgggacatccacaagtactatgtgttcttcatcctggtggctttctgcaactgccagatgcacttcagcatgagcttgttcagaaactgcatcgagaaaccggaaatggtgaacaccattgatttcgtcttgatcttcacatcggccataagttcggccttgatttacttcctgattctcttggcgattcagtggcgaatgccgggcaccttcctcagtcggcggatagtgaacaataggccgcggaagcagcaggaatcggacaccaccattatgtacttgggcagggctccgagctttcaaaacttcgaattcggcgacgtgggcagtgtggagctcatgcgattgcgtcatgtcagcacatcacatcgcgattcggagcgaaagatcctcaagaatatatcgatgcgaatctatcgtggcgaggtgtttgtgatcctcggccacattggctccggtaaacttacgcttctgaggattttggccggcctcaagttcccactacgtggcaatgtatatataatgggcaatccctttgaacccaatggtgaagcccgtcgcctggtggacttccgtttcgatgagcatgggctcaacaagcatttgaccgtagaacagaccattgactaccatgtgcgtctaaaactgtcgcccagcgagtccgaccgctacgagatcgagaggcgcaagtggttggccatactggatcagcacgtggagagtcggggtgtccggatcggaaagctgagttcaggctcaatgaaactggtggcgctgtgctgctgcttggccggagatacgcccatcattatactggaggagccgaccacccagttgacgggtcgggaggcgcagattttctggtcgattgtccatgcagagaaggaaaatcgcgccttcatcatagccacttacaatgttggcgaggcggagcatgtcgcagatcgcatcgggatcctcagcatgggcgtcctggaggccagtggcacacccttctttttgcgctccaagtttagcagcagtgtggatctggtcatcatcaagaagccacatgtgcctgatcagcccatcactgactacataaaccagtttatgcagaacatcgagccggaaaatgagatcggtgattcacttacttacagacttcccgtgatatatcgtcccaggctgcagaaactactgattcacctggaaatcgatcgcaagatgctgggaattgagaatgtgagagtggtgggtgcggagctctccgacatctacatgacactggtcacctcgtttcgactgcagcagcagatgattcccgatgtcacgcaaactttcaagtaccaggtggtttcccagaagcaattgaccaaacaacgcatgcgggccatgttctacaagaagatgatccacacggcgcccaatgtttggcccattatcatgatcttcaccagcttcgttttaattgccatcattgcccgtttgtccgtgttgctcgatatgccgaaagagcgccagaattcgattcacattggtttcagggaaccagaggacgtggttaagtacttaccaaatctgaaggactgcgggtacatcgacatccggtcggcggtgaaagtgaacaagaagaaaagcgtcggtgtctcccgaacttttgatgacgattcttttgtttgtgaaaaaggtagctatcggaacaatcttagaaagaagaacgagttgagaagttttggagcagtggagtcggacggggatgagcacctaaatggttatataagccaggatatgtttcactcggctcccatgatgctcaatttgctgcaaaatgtcatacttagactttcatatcccatgcaaacggacctagttgtcctcgtggagaaccatcccctgcccacacagctgtcccagaagatcaatgtgctggataacaagatcgcacatatccatgtgccattggttgtcggctgcatcataccgctgaccgtatccgttttcgtcatccccctggtggaggaggagatatacgatgttcgattcctgcagcacatggccggacttgggctgaaggtcttctggggcatcaatctgttttgggactggttcaccttcttcgtctactcggtcattattgtggttatcatgagcctgatgggtatcggtggctttgggttctacgagaatgccatcatggtggtcctgttgaccacctttggactggcggccctgccgctcacctatctggtctccatgttcgtgaataagtcaattgttcgggcatttctcgtttccgtactcctgcagggagtgtccggcctggtcctatatatcatctactgggacgtcgctaacagcaacacgatcttcttctacgccgcctgcatgtcgccaggattctcgctcttggacggagtcagcaatgtctatgcccagaacctggagcaggcgatctgcatagacaagtgcgaggcgaccgacagctgcacggaggagaacatgaacgaggtggtgccgaattgcaatcttcgtaaaatgagaaccgccacatatccattcgacgatggcgatgtggcggatgtgaagcaaaagatcgctgaagcggataacaccaaggccaagcagtccgtcttcctggtggatcaggtggaagccagggtcccagctgcgggcaaaaggatacacaccgtctcctttgccctgaacaaatacatgagcatgggtatcttcgggccccgcaactctggaaaaagtcacttgatgaggcagctggtgggccagcgtggattcgcctttggcgagatctacgtgcggggcctggacttcaagtacgatctggaaagcatccacacctacatgggctactctccgcagcatcgaggactcctcaatgagctgacaccgcgggagcacatccgtctgttgtgcatgatccgtggtgttcccgaggctaagatcggcgagaagatgcatgacctgtgcctcatgctcaacatgaccgggtggatgcaccgaaagtgcagtttgctgacggcagagaagcggcacaagttaaaaattgccctggcactggtggcctacaacaagatcctcgttctggacgagcccacgtgcggcatgccggcaactaccaggcgggaaatctggaacatccttcggtatatccgatactgcggcaaaacaatcatttttgccaccaacgatgagctggagtgcaaaatccttgccgactttattatcctgttccaggacagcgagatgctggccatcggcagcctgcagtatctacgatacaagtacagccatggattctatctagaggttcggctcatccgcgatggagccaccctcgccgaatcggaggagaagtgggttttacatagctttgtcccctggttcatggataataataataatataatgcatttttttctccatcagtttgcgtaa

SEQ ID NO: 2427 - protein, 1511 aa, DROSOPHILA
MPASKGLLFKRYIRIELNLWRRTLFEIVALVIMVLVIFLNPIAHSKRLLYTTTENENEQSIVSHKLQDINILTRMADSKREKTKYILAFTPETTFTSEVTKNVAKTLELSSTVGYESESEMQNQFDERTTLAGIVFNDLRDDGTPLTLSISIRFPSEFRTIAPFLTEDRLWITRCSGRINPGRDRAKHDKQQDIYIREGFLQLQHQIFVEWYHQLRKDIVSTYPEPNVEVYNILLKAADEPCSVMSVAQLPTFLYNFIYLLPFLNIIRNVAAQVEDGVMVHQWHYGYSFGMQWGIKFLAFWGFGGREGEFSGTGTIAFVCFITLYTVEIIITGMVVAKLFANPTNAVLFALMLWLFMYAAFCIILERYWDIHKYYVFFILVAFCNCQMHFSMSLFRNCIEKPEMVNTIDFVLIFTSAISSALIYFLILLAIQWRMPGTFLSRRIVNNRPRKQQESDTTIMYLGRAPSFQNFEFGDVGSVELMRLRHVSTSHRDSERKILKNISMRIYRGEVFVILGHIGSGKLTLLRILAGLKFPLRGNVYIMGNPFEPNGEARRLVDFRFDEHGLNKHLTVEQTIDYHVRLKLSPSESDRYEIERRKWLAILDQHVESRGVRIGKLSSGSMKLVALCCCLAGDTPIIILEEPTTQLTGREAQIFWSIVHAEKENRAFIIATYNVGEAEHVADRIGILSMGVLEASGTPFFLRSKFSSSVDLVIIKKPHVPDQPITDYINQFMQNIEPENEIGDSLTYRLPVIYRPRLQKLLIHLEIDRKMLGIENVRVVGAELSDIYMTLVTSFRLQQQMIPDVTQTFKYQVVSQKQLTKQRMRAMFYKKMIHTAPNVWPIIMIFTSFVLIAIIARLSVLLDMPKERQNSIHIGFREPEDVVKYLPNLKDCGYIDIRSAVKVNKKKSVGVSRTFDDDSFVCEKGSYRNNLRKKNELRSFGAVESDGDEHLNGYISQDMFHSAPMMLNLLQNVILRLSYPMQTDLVVLVENHPLPTQLSQKINVLDNKIAHIHVPLVVGCIIPLTVSVFVIPLVEEEIYDVRFLQHMAGLGLKVFWGINLFWDWFTFFVYSVIIVVIMSLMGIGGFGFYENAIMVVLLTTFGLAALPLTYLVSMFVNKSIVRAFLVSVLLQGVSGLVLYIIYWDVANSNTIFFYAACMSPGFSLLDGVSNVYAQNLEQAICIDKCEATDSCTEENMNEVVPNCNLRKMRTATYPFDDGDVADVKQKIAEADNTKAKQSVFLVDQVEARVPAAGKRIHTVSFALNKYMSMGIFGPRNSGKSHLMRQLVGQRGFAFGEIYVRGLDFKYDLESIHTYMGYSPQHRGLLNELTPREHIRLLCMIRGVPEAKIGEKMHDLCLMLNMTGWMHRKCSLLTAEKRHKLKIALALVAYNKILVLDEPTCGMPATTRREIWNILRYIRYCGKTIIFATNDELECKILADFIILFQDSEMLAIGSLQYLRYKYSHGFYLEVRLIRDGATLAESEEKWVLHSFVPWFMDNNNNIMHFFLHQFA

SEQ ID NO: 2428 - DNA, 4504 bp, DROSOPHILA
cctcaagaaggagacctttgtggtcctggtggtggagttgccgcctgctgttgtaaatgccattgtgggggccattaatccacgggaaatacgcaagcgagagactgaaccggaaatcaactatgtgatcgagcggtaagttaacaaatcaattctatttggtctgctttcaactgcaacttcatcaattcatacagattttcgaaatacaagcgctacatctccgagataaacgaagaggttgtcgactatctgagcgatgccaagactcccattgtggccttgtacagcatatccgattcctactaccgcgtcatcatctagccaacatcaaatgcatagaatcggctgaactacttagtagaccagccagtagtgtaagctcgaaagtgtcacaaattattttcgccgaaattctacttaactggctgccctccgtgccattaacacttttgtttgtttgtgcgaatcaaaattgatgagattgtatgtttctgtatccatttcaaatggttgagaacttatttctattctgccaatttattgaatgcctttctagtggaagctctcattcataaacacatattttattataacttggtttaaagttaaatccatactaaagctgttcgctcctaagtcaaaagaatagttggaaactaaaatgattctttttgaatttgtataattatgtttaaacaagattaagtatccgaactttcttgcacttcgaaattaaagttaagtagaggctaatattttcagagaaaattcttaaaaattgttttataaatagcatctcggggttgaatcgagcaataacaatttatttatacagctgacggtcaaataggtgaatcttcatccaatattttatatacgtacaacttttaaggacaacattttttagcctacaataaaatttcaagttttgaaggcgtcttttcgcagacgaaacataaggaaagctcactgtacaagttaatttgcatcttggaactcacgttccgctctctccggcagatttgttgagcgaacgggggattcccagggcgggcccttggagaacctttcgcgaaagacgcataaagccggagacgggatcgcggccaaagtacttgacctggatctcctgacccacttccaggtttagggcagagggatgggctatcttgcgctgatccagctgcgagttgtgcagcaaagcgggtggcatactgggatagaggatgaccattactccggtgtctcgcaattcggtgattttggcagtgtagattccgccgaactccaggtccggcactcgttccttcaccatgtagccctcgatcagctccttggcctcatccatggctgcttgcgaaggagcaaaaacattgaaatgggtctcatcgactgctgttagggaggtgcccgtttccaagtaaatccgcttcatgtgaaggccgctgggaccaattaactgcgccctctgttgcggctctacagttagggtttcactcactggccagctctccttggggtattttctaaacgattgcgagagtattataaaattagcatttaaaaccatgtagttcccttaagtgacgtgtactcaccgaggttccctaatagcctcactcatgatgtccagaatattagatttggcatcggtggccttttgtagcgattccatcacaaccttaagaggaattcccgggatcttgaggtccgcctggatggcggtgaagccttttctcgtgccagccaccttcatgtccatgtcgcccatgtaatcttcgatgcccaggatgtcggtgagaatgcggtagtcctgcaggtgcttagtgtcgtcgttctcgaactttgtgaccaggccaatggccacacctgccgcaggtgcgctcactggaacgccggcgtccataagggccaaggagccaccgcaaacgctggccatgctactgctcccattggattccaggacttcagaggtgagtcttacggtaaagggataatcattcggcagggtgggaagcaacgatctctccgccaaggctccgtggcccatttcccggcgacccactggaccaatccgacccacttcacccgtggcatagggcgggaactcatagtgcagcataaagttcttggccttcaggccaccgctatctaaagcagccaacgagtcaagtttcattgcgctttcctgcgagtccaagctaaccgtgcagaagacctgcgtctgaccgcgctggaatagggcggatccgtggagaggcttgtacatgtccacctggcaggagatgttcctcagctggtcgtaatctcgtccatcgcaacgcagaccccgctcaaagatcagttcgcgaaaaatggttctactggtctggttgaactgctcggtaataagcgacggttcggtatccggaaacgaactccacaccttgtcaataacgttggagcgcacctcgttaaccgcattgtcacgagacatcttgtcgtgcgtcgaatcctggaagatctctctcagccgcatttcgcacatgctacgaacggctttccccagttcgggatctacttcggcagccacttccacttcgcgcttctgtcgaccataggccttctgcagtcgctcgatctcgtggataatgaattgggcctcacgagtcccttgtttgatagcctttagaaggtcctgctgaagaaccacattccccttgccctccaacataacgacgaggttttgtttggtggcggagactaccaaatccagttgcgaagtctgcagctcccggcgcgtggggttgatcagcacctcgccgtcgcagaggccaacgctttgtaggattaaaagagttataagcggttaccagttagattcgttcgtgagtactcaccgcacagctccaatgggtccattccagggaatgtcacttagagatagcgccatggaagcggcattgattgcaagcacatccggactgtgcaccgcgtccatagccaacatgttgcacaccagctgtgtctccgtgcgataatctttgtggaagagcgggcgtagcgaacggtcgataaggcgggcggacaggatctctttttccgaggggcccagttcgcggcgcataaagttcatgggtattctgccagaggcggcgtttttcagtcggtagtcaaccaccagaggcatgaatccctggccgggatttggcttcgccttggccaccgcggtgaccatgacggcggtatcgcccatttggcacacagctgttccattcgcaaatctcgccaggcggccggaactgaaggtcatgttacgtctgcggaggattcaagactttgctattggaactcggagtggaggccacgaactcacccattgctgaagttgacttccacggagggcgcttctccgttggaactgctttggattcctctccttcctcctgggcaggacaaacttaggcatttgaggcgatagttgagcagcttcagcgatttccgtgtgaaaatcatggccattacctaaaagtgccgggtgattccggctgaggcgacagttctgtacgctgtattttcatggttatttaagaaataattagtggtcaaaatcttacaataaaagccctgtacgtttcttgagacttggaagttagacttagagcgcctcaactatttgtattgtttaattcagttatctcaaaactagaatgcccatttaaaacaaagtagagtgtgcaacatgtgtgcgttcggcgttgccacctggcaagggtaacaacaaatgaattatatagacaaactattacacggattatgtcttaggaataatgtagtaaatattaatacagcgtattttaaaaaaattaatttcgtttccaataagatatttagaagggttcccagaaaatgaactattagcttgtgtccccgataatgtcaaatttgcagtgctgccaactcttagcaatgttagttacagcatgcaagaaacagcatttaaattccttttcagaaacgaagaattaagacggtatgttctgaaaggtcctaaaacgaccaacagaatgacgcgacgatgtccaaatcgccagatctaagtaattcaagctagctagaaaatagctgaggcatcagcactacacagtccgccaaaattagtccgtctttttacgcgtttagagttttttaccgcgagtcgaagacgtctttcactaactcaacgacggtcttacagaagactccaatatttttcgagcaggcaattcgcggatccatcgttaattttgggcacttgcagaaagcccagttgcgaacgtcgtcgtgtgtcgtcttagaaaagccactcctccaaccggaaaaccgcaagagcgtcgagcccttgttttgcgagccttttcgaaaaaagctgggaatttcacgccgtatttttcgtatcttttccgtcaacgaaacgccgcgtgtgtcgtagtgtgcgtgtgtgtgttctgtgtgcccgcccatctgtgcatgtgtgagagcg

SEQ ID NO: 2429 - DNA, 2247 bp, DROSOPHILA
atggccatgattttcacacggaaatcgctgaagctgctcaactatcgcctcaaatgcctaagtttgtcctgcccaggaggaaggagaggaatccaaagcagttccaacggagaagcgccctccgtggaagtcaacttcagcaatggacgtaacatgaccttcagttccggccgcctggcgagatttgcgaatggaacagctgtgtgccaaatgggcgataccgccgtcatggtcaccgcggtggccaaggcgaagccaaatcccggccagggattcatgcctctggtggttgactaccgactgaaaaacgccgcctctggcagaatacccatgaactttatgcgccgcgaactgggcccctcggaaaaagagatcctgtccgcccgccttatcgaccgttcgctacgcccgctcttccacaaagattatcgcacggagacacagctggtgtgcaacatgttggctatggacgcggtgcacagtccggatgtgcttgcaatcaatgccgcttccatggcgctatctctaagtgacattccctggaatggacccattggagctgtgcgcgttggcctctgcgacggcgaggtgctgatcaaccccacgcgccgggagctgcagacttcgcaactggatttggtagtctccgccaccaaacaaaacctcgtcgttatgttggagggcaaggggaatgtggttcttcagcaggaccttctaaaggctatcaaacaagggactcgtgaggcccaattcattatccacgagatcgagcgactgcagaaggcctatggtcgacagaagcgcgaagtggaagtggctgccgaagtagatcccgaactggggaaagccgttcgtagcatgtgcgaaatgcggctgagagagatcttccaggattcgacgcacgacaagatgtctcgtgacaatgcggttaacgaggtgcgctccaacgttattgacaaggtgtggagttcgtttccggataccgaaccgtcgcttattaccgagcagttcaaccagaccagtagaaccatttttcgcgaactgatctttgagcggggtctgcgttgcgatggacgagattacgaccagctgaggaacatctcctgccaggtggacatgtacaagcctctccacggatccgccctattccagcgcggtcagacgcaggtcttctgcacggttagcttggactcgcaggaaagcgcaatgaaacttgactcgttggctgctttagatagcggtggcctgaaggccaagaactttatgctgcactatgagttcccgccctatgccacgggtgaagtgggtcggattggtccagtgggtcgccgggaaatgggccacggagccttggcggagagatcgttgcttcccaccctgccgaatgattatccctttaccgtaagactcacctctgaagtcctggaatccaatgggagcagtagcatggccagcgtttgcggtggctccttggcccttatggacgccggcgttccagtgagcgcacctgcggcaggtgtggccattggcctggtcacaaagttcgagaacgacgacactaagcacctgcaggactaccgcattctcaccgacatcctgggcatcgaagattacatgggcgacatggacatgaaggttgtgatggaatcgctacaaaaggccaccgatgccaaatctaatattctggacatcatgagtgaggctattagggaacctcgaaaataccccaaggagagctggccagtgagtgaaaccctaactgtagagccgcaacagagggcgcagttaattggtcccagcggccttcacatgaagcggatttacttggaaacgggcacctccctaacagcagtcgatgagacccatttcaatgtttttgctccttcgcaagcagccatggatgaggccaaggagctgatcgagggctacatggtgaaggaacgagtgccggacctggagttcggcggaatctacactgccaaaatcaccgaattgcgagacaccggagtaatggtcatcctctatcccagtatgccacccgctttgctgcacaactcgcagctggatcagcgcaagatagcccatccctctgccctaaacctggaagtgggtcaggagatccaggtcaagtactttggccgcgatcccgtctccggctttatgcgtctttcgcgaaaggttctccaagggcccgccctgggaatcccccgttcgctcaacaaatctgccggagagagcggaacgtga

SEQ ID NO: 2430 - protein, 748 aa, DROSOPHILA
MAMIFTRKSLKLLNYRLKCLSLSCPGGRRGIQSSSNGEAPSVEVNFSNGRNMTFSSGRLARFANGTAVCQMGDTAVMVTAVAKAKPNPGQGFMPLVVDYRLKNAASGRIPMNFMRRELGPSEKEILSARLIDRSLRPLFHKDYRTETQLVCNMLAMDAVHSPDVLAINAASMALSLSDIPWNGPIGAVRVGLCDGEVLINPTRRELQTSQLDLVVSATKQNLVVMLEGKGNVVLQQDLLKAIKQGTREAQFIIHEIERLQKAYGRQKREVEVAAEVDPELGKAVRSMCEMRLREIFQDSTHDKMSRDNAVNEVRSNVIDKVWSSFPDTEPSLITEQFNQTSRTIFRELIFERGLRCDGRDYDQLRNISCQVDMYKPLHGSALFQRGQTQVFCTVSLDSQESAMKLDSLAALDSGGLKAKNFMLHYEFPPYATGEVGRIGPVGRREMGHGALAERSLLPTLPNDYPFTVRLTSEVLESNGSSSMASVCGGSLALMDAGVPVSAPAAGVAIGLVTKFENDDTKHLQDYRILTDILGIEDYMGDMDMKVVMESLQKATDAKSNILDIMSEAIREPRKYPKESWPVSETLTVEPQQRAQLIGPSGLHMKRIYLETGTSLTAVDETHFNVFAPSQAAMDEAKELIEGYMVKERVPDLEFGGIYTAKITELRDTGVMVILYPSMPPALLHNSQLDQRKIAHPSALNLEVGQEIQVKYFGRDPVSGFMRLSRKVLQGPALGIPRSLNKSAGESGT

SEQ ID NO: 2431 - DNA, 6654 bp, DROSOPHILA
caatcccgcccactgagtagccccatccgatcccaacgccaaccgatccccagtccaatcgattcgatcttatctctaccgatatggatgtttttcctgtaggacacatttgaacgaactgatttctcagcgcagtcaaggaaatatgaaccatatcttttacgttaagtagttcaggaacatattaatgctaatgcttttttcatttctataacttttttaactttaaacagttaataattgaatactttgtaattttaaagatataaactgcatgctttgctagatcgaatcaacactaattggtagctcaaaggacgatttgcattagactaagctgagaaatcaggtcgtggaaatgaggctttagctccaaatatacacatatatatatatacttacatatacatacatatatattatatacatatatttttgataagcctgaatgggtgtgagcaagcaagaagaagctaaaaagagcgagaaatattgtgtgtttttgagtgaatgctttccaaaaatctcgtacgtaaccccaattttctatgtctatactttggctcttatcggcatttttgtacactgtatatagcttgtttaagtgtccttaccaagggttaaccaacatcaaaatcttttcgattcattgctaaattcaatctttaatcaaacgtatacttatgtacttcaatatatcgaaatatatacatctatattctcaaaagataactaaacatctgatttattttattaaatgctccctgaactgtatactatcctattgaccagagctttttgttcctttagcaaagcttttggcgaaaaacaaacttgcgcataccaaatcggccaacagccagaatcccagtgtccacaattgataacaacgaccgaaaacatattacattattgggcgagctgataaggtctatacccctttcatagagtgcagataaggttgacctccgaggtattaaattaaaagccgcttggagatacttttcagttagtttcagttcacatttaataagtttggcagagttttaaaacttgaagctagcttcggtataatagtaaacatccaacactatacaaatagagattaacatctatatacatatagcgtgcaaaataagtaagcggccaaccaacgcgttgcgctttagatatatatagcgaatagttgaagattatatactttctatacagatcaagtaacctgcaaacacttataattaggattctgtctaccagacagatggattaagtatacacatgtattcgggcgattcgaggtaacctccaccgccatcaaaaaggggaatctacattggaatcgtaatctttaacgtcagcgattccgattaaacttaacctaacattggaaaaaatccaggggaaaaggatgcgctattcgagcgctcgattctcttttcttctctcacttgcgatcgaataggcgggtgtagtcgagcagtgggcctgctgcagatcggtggcgatgctgttgctgctgatggtgttgctgctgctgctgctgctgctggacaggggcaggcactcctccactgcccgtttccgtcgcagccatcgtcgtatgttagaagagacgcttctcgtagctgaagaggccatggacattgccttccagttgagcggaatgggtgcgcttcatgaagcgcagttggccattatagatcatatccctgcggaaatttaacatgcggagataaagattagtttcatgttctttggaattaggtccatgttagcctacctcaatttattaatggagttagcaccgatgtcctgacaactgtgctgcagtccgcactccaaatagggtagatagcgcagcacactgcccttgtccacgatgctgccactgacgccctgtgccaccttcattttatccatctcgttgtggtagtagcgcgacatggcagcgcccttggcatcgccgcgctccatggcctccagggagcccatgccgcggtacttcttaaggcgcactccgtcggagaagaagtactcgcccggtgcctccgatgtgcccgccagcagggagcccatcattacagcgctggctcccaatgcaatagccttcacaatgtgtccaatggactggatgcctccgtccgcgatcactggcactccgaattggcgagcgtacgtggacacctggtagacagcagtggcctgaggacatccgcaggccatcacctcctgggtgatgcagatggaaccggaacccatgcccacacgcagtccatcgacgccggcatcaatgagatttttggcctgggcacgtgttaccactgttcagtgaataaaataaatattttgaattagtggaaaatttgcaagtaacaataaattaaaatcacttgattataatcaatataataattatgtcaattaactggaaatctgtttaaaaacttgcaccctatctttatttcaacccaattgtcatttcgtgatactaaagataacaatatgttttactccaaatcatgattgctataataataagtacttcatcgcgacgtaattagccatagataatggttaaaaatagttttgaaaacgtgagtatatcaaaatgtgatactttaagagcattgaacttaaaaacatctcaaattcatacggacaagcgaatgacctgtgtatactatatgtgtcttcatttttgaaatacccttttacgtagtgttctggtacttaccattgccaccaatgacctgtagttcgggataggtctccttaatgtacttgatcatctccacctggtagacggagttgccctgcgatgaatcaaggatgataacgtccacgccgttggccaccagcagagccaggcgcgccttgtcctccgatcgcgttccgatggcagcgccgacgaggagctgcttattggagtccttggaggcattcgggtaggagcgggccttcttcaaatccgtgcgggcaatcatggccaccagttcgccggcctgattcacaatcggcagtttgcccttcttgctcttctcgagaatagcgtttgccgtgggcagattgatgccattgggagcggtgaccagttcggtggtcatgatgtcggccagcaggacctccggctggttctcgcggaagtcaatgtctcgcgacgtgaccatgcccagcagcttgccgccaagtttgccgttctcggtgaccggatagccggtgaatccgttcttccgccgcgcctccaacacatcccccaccgtattcgtgggcgacatcaccgaggggtcgcgcatgaagccgtgcttgtacttcttaaccttgtgcacctccaacgcctggtattccggcgtgcagttgtgatggatgatgccaatgccaccacacagctgcgcgcgggattcgaatggatttggatggtgtgtgagcagtggatagaaacattggcggttagagaggcgcataagagtgttgagttacaaccacaggctagcacagctcaggcgaacccgccagcggttctgggccgtatatatatgtgtatatatgtatgtctagggattcattaaaatccgatacttaccgccatggcgatggccatctccgattcggttaccgtgtccatgggcgaactaaccagcggtgctcgcaatgtcagcgacttggtcagtggcgaactgagatcgacctcctcggcggtgaagtctatgtagccgggcagtatgagaaagtcgctgttttttttcgggattgtcgggaatttcggatgggggcaatgacatgagatttggataacgacttttgcagaggcttgatcactactcacttgtaggtgagtccctcaccgttctggaacagttccttacaactcagcccatcctgcagctcggcatcgaatccggtggtactctttgtctggattgccggcgccgctgaagacgacgtcgattccacaaagccgttcaccttcacctttgtcgtgctctccattttccgcgtgcgttcaacccaaacaaacagtcaacaaacaacggggagctgacaataacaagccgtatagagataaaaaccgcctgttttgggatcttctcctgttgcagatttctttttatggatacagattcctctcgagcttttgagacgcaattagcagggggcacatacacaaatgcggcagtgaagaagatgcacggcacacggcgcagccagacaattgggatcaaaaggaaaaggttaattgcatcgatcggagggtgattcgcaatgggaatcggcccgattggctggcaagccagcgagcacatggttgggccatcttaccagtccgctggagtccaagtgccgcgtgtgctgcgcgaatcgagttcgtgaagtggtgtggccgccgtgcggccgcttaaatatactcgctggaccaccgggaaacccactaaatattaccacgatacgctttggccttaatcgcgctttccatggcagccacactaaggcgctttcaatatcgactatgcaatttattaagcatattaaacaataatcattacatattagcctgaatagcctgaatctcgagcaatatccatttcctctttatttaatctttaaaatatggcagcgaattagcttctttccgcttaaagctattgctgcactgcgatactattgcttacaatgccagctatcgatagtaacgatagtagtgtcacagttaactgtttcatggctggcttcgtgcacagctcaccgagactatcgataaatatcgcatctgtgtggctgcacaccgaattcgtaatacaccaaataccggtaccgtactcgatggcattatttaggaactttcccatcgccgcggcaagactgaaatcgactggcctttagatgctctttggcggtgggcgccgcttgacttgccagactctccaggccgagtgtgtgtgtgtgtagtggttgtgctagcagagctgttgcagaaactaactgggaaaacacaagatagacgcgtgtgcggcgagcagtagctaaattgaactgaagtgaacagaaaatatttacacaaaataatagagatacaacttcggaaaagcaagcatacaacacaccgggactccgcaatacgggttttttatttcgtctactcttccgtacctgggcagagatttagatttatcgcctcctccacccactacttcatcatcgacatcaccagtgctgttgttgttgctgtcgttccgccttcgctctcacgtaatccgcccccgcaccacctcgcccgtcggccaaccggcccacaaactaactgactgatagaccaaaaatcgattagcggactctcttcctcttcaacatcttcggcattcgtgtgtgcgttgctttgcgttacgttacggttaccgttacgtcgcccgcgcgtgtgtgttggtgtgtgagcaaggtgtggtgtgtatagaaaatcgattggcaatttgaaccgaagagcgctatcgtcgccgcagtcgccgcgtgtgtgccgttacgcgattttcaacagcagccgcgcagtaatattgcttttatttttttgcctgtgagtcctcctaagtgagtgcgaaagagagagagcgagagtgagctctctaaaacctctgcagaaaataaaaaggaaaagaaaaacaccggacatggataaatcagcggccacgaactcggccactgccgatggccaaaacgaggcagcagcagcagccgccgccgcagcaacagcagctgggtgtggcagcaacaacagcagcagcaccagcagcagcaacaacactgcaaacagcaataatgcactgcagcgtttggcaacaacaacaagtgccgttgtggcatccccgatgacgatcaacctgaacatcagcaccaccaccggcggcaatttcggcgtcagcgtcgagccgcacatcagtgtcgagagtctgaagaagatcatcgccaagaagctgaaggtggccaaggatcgcatctgtctgctgcaccgggaaaagtgagtacccctttagtatttttttttaatttacgttacatttaaaagaaacttggcttgaactgtaattttttggcagtcaagttttttgttgtttgttactaatttaaaaattaataacagttaatatggcttagatcgccaatttttatgttatttatctgaacattttctttttgtttaattgacgagactaatgttgaatgttaaatattacttattaatctatgcattatatttgttacataaaaaggattgttaaggtttaataagcctgtgtttggacaagtgtgtcatttgcatattgcccagaatatcttatgattgtgccaatgaggtaatatcaataaaccagaaataactgataatgcaaaatgtttcgcaaagaatattatcttgaaagtcaggtgaaaagttaagtgtgatatcttttatagaaaaattcttgaggagtgaataagtcctgttctaattaatccttgcgttaagaaaatcgtatggcttcggtgaaacgccttgtatgttgagagttttcttttttatatttttattggatatcctctttttttcgagctttgtttggttaaaatgcttttgattatcttctttcaccgctccacccccctccacagagctccttctctaacccc

SEQ ID NO: 2432 - DNA, 2908 bp, DROSOPHILA
cggtgtttttcttttcctttttattttctgcagaggttttagagagctcactctcgctctctctctttcgcactcacttaggaggactcacaggcaaaaaaataaaagcaatattactgcgcggctgctgttgaaaatcgcgtaacggcacacacgcggcgactgcggcgacgatagcgctcttcggttcaaattgccaatcgattttctatacacaccacaccttgctcacacaccaacacacacgcgcgggcgacgtaacggtaaccgtaacgtaacgcaaagcaacgcacacacgaatgccgaagatgttgaagaggaagagagtccgctaatcgatttttggtctatcagtcagttagtttgtgggccggttggccgacgggcgaggtggtgcgggggcggattacgtgagagcgaaggcggaacgacagcaacaacaacagcactggtgatgtcgatgatgaagtagtgggtggaggaggcgataaatctaaatctctgcccagattcgcgcagcacacgcggcacttggactccagcggactgctcgagaggaatctgtatccataaaaagaaatctgcaacaggagaagatcccaaaacaggcggtttttatctctatacggcttgttattgtcagctccccgttgtttgttgactgtttgtttgggttgaacgcacgcggaaaatggagagcacgacaaaggtgaaggtgaacggctttgtggaatcgacgtcgtcttcagcggcgccggcaatccagacaaagagtaccaccggattcgatgccgagctgcaggatgggctgagttgtaaggaactgttccagaacggtgagggactcacctacaacgactttctcatactgcccggctacatagacttcaccgccgaggaggtcgatctcagttcgccactgaccaagtcgctgacattgcgagcaccgctggttagttcgcccatggacacggtaaccgaatcggagatggccatcgccatggcgctgtgtggtggcattggcatcatccatcacaactgcacgccggaataccaggcgttggaggtgcacaaggttaagaagtacaagcacggcttcatgcgcgacccctcggtgatgtcgcccacgaatacggtgggggatgtgttggaggcgcggcggaagaacggattcaccggctatccggtcaccgagaacggcaaacttggcggcaagctgctgggcatggtcacgtcgcgagacattgacttccgcgagaaccagccggaggtcctgctggccgacatcatgaccaccgaactggtcaccgctcccaatggcatcaatctgcccacggcaaacgctattctcgagaagagcaagaagggcaaactgccgattgtgaatcaggccggcgaactggtggccatgattgcccgcacggatttgaagaaggcccgctcctacccgaatgcctccaaggactccaataagcagctcctcgtcggcgctgccatcggaacgcgatcggaggacaaggcgcgcctggctctgctggtggccaacggcgtggacgttatcatccttgattcatcgcagggcaactccgtctaccaggtggagatgatcaagtacattaaggagacctatcccgaactacaggtcattggtggcaatgtggtaacacgtgcccaggccaaaaatctcattgatgccggcgtcgatggactgcgtgtgggcatgggttccggttccatctgcatcacccaggaggtgatggcctgcggatgtcctcaggccactgctgtctaccaggtgtccacgtacgctcgccaattcggagtgccagtgatcgcggacggaggcatccagtccattggacacattgtgaaggctattgcattgggagccagcgctgtaatgatgggctccctgctggcgggcacatcggaggcaccgggcgagtacttcttctccgacggagtgcgccttaagaagtaccgcggcatgggctccctggaggccatggagcgcggcgatgccaagggcgctgccatgtcgcgctactaccacaacgagatggataaaatgaaggtggcacagggcgtcagtggcagcatcgtggacaagggcagtgtgctgcgctatctaccctatttggagtgcggactgcagcacagttgtcaggacatcggtgctaactccattaataaattgagggatatgatctataatggccaactgcgcttcatgaagcgcacccattccgctcaactggaaggcaatgtccatggcctcttcagctacgagaagcgtctcttctaacatacgacgatggctgcgacggaaacgggcagtggaggagtgcctgcccctgtccagcagcagcagcagcagcagcaacaccatcagcagcaacagcatcgccaccgatctgcagcaggcccactgctcgactacacccgcctattcgatcgcaagtgagagaagaaaagagaatcgagcgctcgaatagcgcatccttttcccctggattttttccaatgttaggttaagtttaatcggaatcgctgacgttaaagattacgattccaatgtagattcccctttttgatggcggtggaggttacctcgaatcgcccgaatacatgtgtatacttaatccatctgtctggtagacagaatcctaattataagtgtttgcaggttacttgatctgtatagaaagtatataatcttcaactattcgctatatatatctaaagcgcaacgcgttggttggccgcttacttattttgcacgctatatgtatatagatgttaatctctatttgtatagtgttggatgtttactattataccgaagctagcttcaagttttaaaactctgccaaacttattaaatgtgaactgaaactaactgaaaagt

SEQ ID NO: 2433 - protein, 537 aa, DROSOPHILA
MESTTKVKVNGFVESTSSSAAPAIQTKSTTGFDAELQDGLSCKELFQNGEGLTYNDFLILPGYIDFTAEEVDLSSPLTKSLTLRAPLVSSPMDTVTESEMAIAMALCGGIGIIHHNCTPEYQALEVHKVKKYKHGFMRDPSVMSPTNTVGDVLEARRKNGFTGYPVTENGKLGGKLLGMVTSRDIDFRENQPEVLLADIMTTELVTAPNGINLPTANAILEKSKKGKLPIVNQAGELVAMIARTDLKKARSYPNASKDSNKQLLVGAAIGTRSEDKARLALLVANGVDVIILDSSQGNSVYQVEMIKYIKETYPELQVIGGNVVTRAQAKNLIDAGVDGLRVGMGSGSICITQEVMACGCPQATAVYQVSTYARQFGVPVIADGGIQSIGHIVKAIALGASAVMMGSLLAGTSEAPGEYFFSDGVRLKKYRGMGSLEAMERGDAKGAAMSRYYHNEMDKMKVAQGVSGSIVDKGSVLRYLPYLECGLQHSCQDIGANSINKLRDMIYNGQLRFMKRTHSAQLEGNVHGLFSYEKRLF

SEQ ID NO: 2434 - DNA, 2608 bp, DROSOPHILA
gcattagacattaataagataaaacacaaagagctacatatatttaaagtcccagcaaaactggctgcatataaaagtgcatgtgatcaagaaccacgactttttcgcacgtaataaaaagtgtttggggatcgtacattttattaagataacagataagcctcacgacgccgtaccgatttcgtcaaaagacgtaagagtgtgtggctctaccctacccccttttctcttatcgcaactaataaaaccttttaaacttgcccttacctcaacccaaaacttttgcatcgtgtctttggaaatgcacctaatcactcagcactcttcaaataaaaaaaaatatataatttaaattatcactttgctttgtgcactaaaagaaaactatgatgacttttcttggagataaaaacttgcaagtgcaaaaaccgagtaccaaatttaaatattaatacttatttaatattattcgcttatcacaaagatatgagcagagtaaacattcaattgatctgcgcacttaaagtgataaagagccacatttttgtcgttttaattttaccacttatcaaatagatatgaacaaaatgaaaatggactattaattttgtttatactctatatctatatccatacaatttcacactatgaaatctcataagaatagtataaatatgtatagatttactcgcatttccgtaatgtctgcacttgaaaagtcgcaacattttctctgtgtctttcgcaatgaacttacctttggccaccttgcagagcacgattccataccaagaggcgacaggcgtctcattctcgtcctgcgtctccaggaaactgctaccgttgcgcgggatgaccagccgctgggattggttttggatttggctgtgactatggctgtgattgcgatgcggcggcgatgggtggttggtcagtgggcagtcgagctcctccagagcgtccacgtcgaggtcgttgtcaccggtgtcggctgctgcggccgctgctgctgcgttagctgcggccgcctcggctgcggcgctgctgcggatctcgaccacgaaaccgcactcgacgacggcgcaaaagatgcgctgctcctcgggcttgaaccacttggattcgcgcagcttttgcactgccacactgctgccgaatgtggcgcccacggtgccgccagcaattccattcttttgcccgctgggcggcagtaggcggtgggcggtgccggttgtgggattctgatgctgctgcagtggcggtggccaattggaggtgggcgagctgggcgccgattgggagtaaccgctggcaggtggcgccaccggttggttgttgtgaccctgcagtggccaccatttcagcgagctgacaaagctgttcgaacggttcattgtgggcgttgttgggcctgaagcgcccaactttcactcgaaaaaaaattaatgaaattcgaaatgcacttttccgcgcgttttccggaataacttttctctcgctgtttgcgttggattttatttaaatttgttgtgttgtgttttgttctgtgcttctttcaatttgctctgttttttttttttacgcttcgattcgctgctgctgcttctttcggtttcttatgttatctgtttcagtttctttttgagtttgccacactgcacacgaagttcgagttgtttcggtttgggtttttggtttctgtttctggcttttcgtgtttttcgctgctgctcttcagatattccgccttatccgctcgtcggtttgctttttacaaatacaaatgttttcgggcacgtcgctttatatggctctgctcgagctctgcccaagctctgccgactttgctctcatcggcgctcttcgctctgctcacgcactgttaaccgaacgttaacagtgcaagagagcgccagctctcaatgttgcatttgtttacagtacattggccgaaatgcagcaacatatgcaatgaattcaggatttaaatatgcaaaatttgttatctccaacaatgtaggtttttaaaaaatgtattaagtgcttgcgaaagtacaacgagcttgccgctcgagcgcgaaagactagcaatatgttaatttattaatcataaagtaaattaaatctgaactatccacaaacaatgtccataactgttctgtgcatatgactgtgcatttgcattactttttagtgtgcaactcaataagaaaataagttttttaaaaaacttgttgtttgctatatgatgtttacctggatcattgatattcaattacaacttggtattaaatctttaagtcttgcgcccaaaactgcttttctagtccactgttcatattacagtcatgaaattcatgttgcaaaaaaaccaagagtagatcaaatggtaaagttgctcatatgtcttcaactaatcggataggaaatactaatttctgctttttgaagcaaactataaattgcagtttaggaaaatgcaaaccgcaactactaagatagttattgaattccaacacccaagggactgagtctaaagataacttaacggagagcgatattatttataaccgaagccggtttatttcagagaggaatctcaatctcg

SEQ ID NO: 2435 - DNA, 868 bp, DROSOPHILA
aagaagcagcagcagcgaatcgaagcgtaaaaaaaaaaaacagagcaaattgaaagaagcacagaacaaaacacaacacaacaaatttaaataaaatccaacgcaaacagcgagagaaaagttattccggaaaacgcgcggaaaagtgcatttcgaatttcattaattttttttcgagtgaaagttgggcgcttcaggcccaacaacgcccacaatgaaccgttcgaacagctttgtcagctcgctgaaatggtggccactgcagggtcacaacaaccaaccggtggcgccacctgccagcggttactcccaatcggcgcccagctcgcccacctccaattggccaccgccactgcagcagcatcagaatcccacaaccggcaccgcccaccgcctactgccgcccagcgggcaaaagaatggaattgctggcggcaccgtgggcgccacattcggcagcagtgtggcagtgcaaaagctgcgcgaatccaagtggttcaagcccgaggagcagcgcatcttttgcgccgtcgtcgagtgcggtttcgtggtcgagatccgcagcagcgccgcagccgaggcggccgcagctaacgcagcagcagcggccgcagcagccgacaccggtgacaacgacctcgacgtggacgctctggaggagctcgactgcccactgaccaaccacccatcgccgccgcatcgcaatcacagccatagtcacagccaaatccaaaaccaatcccagcggctggtcatcccgcgcaacggtagcagtttcctggagacgcaggacgagaatgagacgcctgtcgcctcttggtatggaatcgtgctctgcaaggtggccaaagtgcacaaagcaaagtga

SEQ ID NO: 2436 - protein, 217 aa, DROSOPHILA
MNRSNSFVSSLKWWPLQGHNNQPVAPPASGYSQSAPSSPTSNWPPPLQQHQNPTTGTAHRLLPPSGQKNGIAGGTVGATFGSSVAVQKLRESKWFKPEEQRIFCAVVECGFVVEIRSSAAAEAAAANAAAAAAAADTGDNDLDVDALEELDCPLTNHPSPPHRNHSHSHSQIQNQSQRLVIPRNGSSFLETQDENETPVASWYGIVLCKVAKVHKAK

SEQ ID NO: 2437 - DNA, 5135 bp, DROSOPHILA
agcagactcaccgaggacgaagtggtggccctaaagcgggagcgacgcaagcgggattgcatatgcgagcagtgtggccggcacttcacctgccccagcaacttcaagttgcacctcctccgacacaccggcgtaaagagctttgcctgtgaccagtgctcccagcagttctacactgctacgcttctgcggcgccaccaagaactgcatgcggggaatgctttgtttcagtgtcgctactgcgaggcaacctacagcaacgccagcggacgcatccagcacgaacgcatgtacgacagaactcgttcccattcatgaaacgtctaatgcttttcacatatttctgaccactttccatttcatcaggcgccacacgaatgtcaagcccttcacgtgcaaggaatgcaataaaagctttgccatgagcggaaaactccgcacgcacatgctgagtcacaccggagtgcgagcgttccagtaagatcttagttacctgaagttttattgaggatccttgactctgtttatctgtttttcagctgcgactcctgccaagtctccttcgttcgccgctcccacctgacctcccactatcgctcaaaaggtcacgcccacacttcaagcgcccaggcggcactggacaatcctgtggaactggacgtgaaggccagtaacggcatgcagacaggggctaaggatgaggctttactaggaaaaagtggatcttaggataaactgtactaaaaatcaatggatccccgatctgatattcggattaatactcaatgcacttaatattaatcgaaaatggaatatgttcaaatatggctgtgttgaataaaaactgattttttcaaaatggccaatagagattaccttacttaggctgcgcactaatttttagttacattatttttatgttttaaaatataataaaatctaaattcgaacattgtttaccggcttggggagtagccagcattttaaaatgtcatgagcctggtcacactgtcttgcactaaataaattagggggcgtctttaaattgcaaaatttcttgcaaaatcagtagaaaagtgcttggagctgctgttacaatagatcctaagaccaaacgttcttctccggaggataatacctggaaccatcactaaccccaattcaaaagtgtcaatctgtttccgcaaaactgcatgtggtgtttgtttcgcttgtttggttatttttcccaactaacatcctctctctaaaatctcgatttcgtacttgaattgcgcagcttttgctttgggattttgtccgacaattaggcagaatccatagcgaaagacgcagcaagtagcatcgtttacaatccgcgaaagtgcagtcgcagaattttccggcggggcttctggcttaaccaatgtggcacttccaatgagaaatcaattgcaaggcgttggatgctctcagtattggttattggcgagattggccccgggacagcattactagacagttccgatcagtccgcactaaacccctcccgctttagacacacacatccaatacaatggcggagaagccgctggccgactgcccggactctgggcaggtccgcaagcgtccccggctggaggacgaggagcaggagctcaaggtggccggcttttcgctgagcgccatcgaggaaatgcggcggaccagggacaacgagctgcagaacgaacccatggaccagcaactgcgacagttccaggttctcgacgaagtcggctctggcagcgatgaggatgatgagtcaggtgagtcggaaacgaagctcggatattcactcaggtcatccagatcacaggctgtgcaattaccaccttttgtttcacagtgcaggcgcagttcttatctcaagatcttgggggcctatcattgtgcaaatacaggaggctgataaaagagtcagccggcaggttaaaccctgatatagcagcttcagttttcctttatcttattgtaaggcaggtggtggcagttttgtgcggacagttccatgcgcatgatacccattatccgactggcttgtccagttgcgtcaggtagagccagtaataatgaaggatcactttaattaaacatcaaagagctagacaattaggtgccaatggcattcattcaaatattccgtgaagatggccatcaacttcgcggctggttttccatttcccagacaaacagacaacttatttatccgtgattgtatctccttacatggcaaccagacaacgctagcgagcagcagggcggaaggtatggagaaggaggcgacgaggaggaagaggcggctgatggtgacggcgaagaatacgattcctcggaattcgatgatgacgagatcgagaatctgctggacgagaagctgcccgaagagctccgcgagtcaaagcagcccaaatacgagcagcgtttcaagactgtgctggaaggtcagtgcttttcgtcgaaccaagtgtccaagatgacgagtattttaatgtgactactcttttagaaaagcgcctcaaccactttgaagtcctacccgagggatgggtgcaggtgacccacaacagtggaatgccgctcttcttgcatcgcaaaactcgcgtctgttgcgcatcgaggccctattttctcggcactggaagtgcccgcaagcatgcagtgcccttgggagcaatcccctgtcttaactacaggcgggctttggaggaagagtcggaggtggagcaacaaaagacggatggagcgccgccagtggctgtatgtcccatggccggagcttccgctttaccggccgaagccatggacgtggagggaaaagagaacaacgaaggcagcaccgattccaaaacccaaccagatggaataactgcccttatgccggctgctaaaattgttacggtcaacgagaatacccaaaaggaatccattacaccggagcaactaaacacctactgccagaaactcttcaaattcaaggtgattcgtgtgctgcgatttcggagttggaatgctcgccgcaagttcaccaaaaaccgcaaacacatcaagaatattcaacgacccacgctgccggatggcactaagcttattaagttcccaatactagcgaatgctggcgaaggatcaacgaacccgcgcggtcggaaggagtggatcatgaatcccaatggcaagagcttcgtctgcatcctgcacgagtacgtgcagcatgctctgaaaacgcagcccacctatgagttcaaggagctccaaaacgcagccacgccttactccgccaccgtatcggtgaacaatctcaagtatggcacgggctatggcaccagtaaaaagcaggccaagtcagaggcggctcgggaaacgctggaaatactcattcccgatgtcaaggacaagataacgggcaacaataaggaccaaaagagcggcactgcgaagaaagcgcagagcgatctgtctgtaagcaatctacctatagaaaatggaaccacttcttatttttatatttcttgcaggttttcgatgacatccgcatcgaagatccccgagtcaccgaattctgcaacaagacgacggagccatctcccaacgccattctgctgacttgcttgcagcgcaactacggcagcgatgttcagatcagccaggagatcaaccgcaccgcgaataacaagaacgagtttaccatgaccgtgggcaaacatactgccaaagtggtgtgtaaaaacaagcgggagggcaagcagttggcttcgcaagcaatcctccaggtgagcattgatatttctttataactttacttatagctattgagttaacctttcgtcagattttgcatccgcacatccagacctggggttccttgttgcgcctctacggcaacaactccataaagaccttcaaggagaagaagctggaggagcaggagatcaccgtgctgcagagcaaggcggcagtcaaccaacccaactacgccatactggacaaacttaaatccgagatgttgaaactgtgtgccaagcaggagagcgtcctaaccatgggcacttttgtgccgccaagcgacgtcgatctgcccacttcctccgggtccaatttgaacaacgtggaactttgattgggaaacacacatctctctcgccaacattgattctctagtagtgcatgacaacctcctagtctcttagttacccacccatttccatattcgaaaagctaatgacaacaacgacgcgttctctagaggcatacgaactgatttcaaatcggcttcatctatctgagctggttaatctgaagtggctttagcaagtggccaaaaatgaagaacaattgcctatcaagtggttttacattaaggtaaattcatcactaaatttgccaaatataagtagttcatgcttgcaatagctaagattaggggttcaatttcacttgtataatataagcttgaataaaatactattaaaaacgcagtcctttatatttgagtatagagatgttcgtctaagatctttatctgcaataccaattaaaaaagtagagttcttaagtatttgacaactattcatttgggcagacagcaggacaattatttgctcatgatttgtttatcaaatttcctcgtaaatcttctcgtatcgctttcattcttggaacgttcaaacaccattgacccgtaaccaatttggaagacattttaaaaagtcgtatggaatataaaaaaatgcatatttacatggccattaggattctcgggtgtttttaggcggtcggtcgttaggtgagtggatgttaatatttaaggcggtgggcagggtgtaggttcgtaggtgtgtgtgcgtgcaattatttaaaagacgatgcagtcataaattatgctacattttcatttcattctaacgtttccttttttatagcattccaacgagcgtggcacacacacatacccaccacggagaatgcggagagacagtcgcagagagaaagtccgagagagagagcgcgggagagcggcgcaggcgcagatcccggattttgcgcagcagccatgctgcgagatgaattgtggcgagttctgacttgccaattcgcaggccatatctgtatcttcagta

SEQ ID NO: 2438 - DNA, 2484 bp, DROSOPHILA
tggtcacactgtcttgcactaaataaattagggggcgtctttaaattgcaaaatttcttgcaaaatcagtagaaaagtgcttggagctgctgttacaatagatcctaagaccaaacgttcttctccggaggataatacctggaaccatcactaaccccaattcaaaagtgtcaatctgtttccgcaaaactgcatgtggtgtttgtttcgcttgtttggttatttttcccaactaacatcctctctctaaaatctcgatttcgtacttgaattgcgcagcttttgctttgggattttgtccgacaattaggcagaatccatagcgaaagacgcagcaagtagcatcgtttacaatccgcgaaagtgcagtcgcagaattttccggcggggcttctggcttaaccaatgtggcacttccaatgagaaatcaattgcaaggcgttggatgctctcagtattggttattggcgagattggccccgggacagcattactagacagttccgatcagtccgcactaaacccctcccgctttagacacacacatccaatacaatggcggagaagccgctggccgactgcccggactctgggcaggtccgcaagcgtccccggctggaggacgaggagcaggagctcaaggtggccggcttttcgctgagcgccatcgaggaaatgcggcggaccagggacaacgagctgcagaacgaacccatggaccagcaactgcgacagttccaggttctcgacgaagtcggctctggcagcgatgaggatgatgagtcagacaacgctagcgagcagcagggcggaaggtatggagaaggaggcgacgaggaggaagaggcggctgatggtgacggcgaagaatacgattcctcggaattcgatgatgacgagatcgagaatctgctggacgagaagctgcccgaagagctccgcgagtcaaagcagcccaaatacgagcagcgtttcaagactgtgctggaagaaaagcgcctcaaccactttgaagtcctacccgagggatgggtgcaggtgacccacaacagtggaatgccgctcttcttgcatcgcaaaactcgcgtctgttgcgcatcgaggccctattttctcggcactggaagtgcccgcaagcatgcagtgcccttgggagcaatcccctgtcttaactacaggcgggctttggaggaagagtcggaggtggagcaacaaaagacggatggagcgccgccagtggctgtatgtcccatggccggagcttccgctttaccggccgaagccatggacgtggagggaaaagagaacaacgaaggcagcaccgattccaaaacccaaccagatggaataactgcccttatgccggctgctaaaattgttacggtcaacgagaatacccaaaaggaatccattacaccggagcaactaaacacctactgccagaaactcttcaaattcaaggtgattcgtgtgctgcgatttcggagttggaatgctcgccgcaagttcaccaaaaaccgcaaacacatcaagaatattcaacgacccacgctgccggatggcactaagcttattaagttcccaatactagcgaatgctggcgaaggatcaacgaacccgcgcggtcggaaggagtggatcatgaatcccaatggcaagagcttcgtctgcatcctgcacgagtacgtgcagcatgctctgaaaacgcagcccacctatgagttcaaggagctccaaaacgcagccacgccttactccgccaccgtatcggtgaacaatctcaagtatggcacgggctatggcaccagtaaaaagcaggccaagtcagaggcggctcgggaaacgctggaaatactcattcccgatgtcaaggacaagataacgggcaacaataaggaccaaaagagcggcactgcgaagaaagcgcagagcgatctgtctgttttcgatgacatccgcatcgaagatccccgagtcaccgaattctgcaacaagacgacggagccatctcccaacgccattctgctgacttgcttgcagcgcaactacggcagcgatgttcagatcagccaggagatcaaccgcaccgcgaataacaagaacgagtttaccatgaccgtgggcaaacatactgccaaagtggtgtgtaaaaacaagcgggagggcaagcagttggcttcgcaagcaatcctccagattttgcatccgcacatccagacctggggttccttgttgcgcctctacggcaacaactccataaagaccttcaaggagaagaagctggaggagcaggagatcaccgtgctgcagagcaaggcggcagtcaaccaacccaactacgccatactggacaaacttaaatccgagatgttgaaactgtgtgccaagcaggagagcgtcctaaccatgggcacttttgtgccgccaagcgacgtcgatctgcccacttcctccgggtccaatttgaacaacgtggaactttga

SEQ ID NO: 2439 - protein, 642 aa, DROSOPHILA
MAEKPLADCPDSGQVRKRPRLEDEEQELKVAGFSLSAIEEMRRTRDNELQNEPMDQQLRQFQVLDEVGSGSDEDDESDNASEQQGGRYGEGGDEEEEAADGDGEEYDSSEFDDDEIENLLDEKLPEELRESKQPKYEQRFKTVLEEKRLNHFEVLPEGWVQVTHNSGMPLFLHRKTRVCCASRPYFLGTGSARKHAVPLGAIPCLNYRRALEEESEVEQQKTDGAPPVAVCPMAGASALPAEAMDVEGKENNEGSTDSKTQPDGITALMPAAKIVTVNENTQKESITPEQLNTYCQKLFKFKVIRVLRFRSWNARRKFTKNRKHIKNIQRPTLPDGTKLIKFPILANAGEGSTNPRGRKEWIMNPNGKSFVCILHEYVQHALKTQPTYEFKELQNAATPYSATVSVNNLKYGTGYGTSKKQAKSEAARETLEILIPDVKDKITGNNKDQKSGTAKKAQSDLSVFDDIRIEDPRVTEFCNKTTEPSPNAILLTCLQRNYGSDVQISQEINRTANNKNEFTMTVGKHTAKVVCKNKREGKQLASQAILQILHPHIQTWGSLLRLYGNNSIKTFKEKKLEEQEITVLQSKAAVNQPNYAILDKLKSEMLKLCAKQESVLTMGTFVPPSDVDLPTSSGSNLNNVEL

SEQ ID NO: 2440 - DNA, 4624 bp, DROSOPHILA
gtccagtcatggttcccagtaccatgcccatgcccatgcccaattccaaaccataccatacccataccatggtctgggtgcaaagggcagcgggagatgcgccataaataacttggcactgtggaggtcacttgggcagctgataccatggaccactagatgccgcgccatgccaccgcatgcaccatgtacttggagatccatcctttggcactttggcacagtggctcagatgcgatttatcgccgccgagctgcaacttatctctcgtccagcggaagcatagaaatgcgctcaagaaatgagaaacattgagaaagtttcaagtttaaaatttaaatttaaatttatcgccactcgcccactcctgtgcatttattattgtagaaattaaccccataacttttactaaatctgctcagcttaagtttcagttttatgattagttaaagtcaggtgaaaagttaagtttagccagctgaaaattgaagttgattagttagtttaatcttaatgttgcacttaaaaacacacaggttaaatttggtttgaaaatttcatttttcattattactaagatacttttataaatttagggagcctaattattctgaaaatcatttcctaacatttaggcttcagtttctgttttctgttcaaaaagtgttcaaactttgagctgcttaaactcgaaaacttctcattacgcttttcaaaactgtaatgctgcactttcgcaatctgttttggaatatttttttttttgcaatttgccatcgggttaatttgcccgttggcgacttctgttgctctgttatcaggccgggctatccagccctccaattctccgcttatcagtgggcgaaggaggaggaggtgaaggtggaggcggagtagaggaggtggaggtggaggaggttttggcgagattgtgtgtcacgcccgtgccagctggggtatataagaattgggccggatcgggtggcattcagtttgaacgcgctactcaacggagccgtgtccaaggattctcgattctctattctcgattccccatctctcagctcaagcttaagctatctccaaggtaggtgctctcctgcaagcgttccccgtttttttttttcaagtgtgttaaagtgatgcgaaaaagaaggcatagtttatactgaagactttttcgaaaaaacggaagcattattaaaattaaatagaaatttatgagcttgcacaaattaaatttaaatttggtaaaaaatatagctcgaatattttccttctattaaatgtgctattcaaaaactttttccctttttttttaaattttttttttttttttgtattaaaaaaatttcgaaatgagagacttcagcacggattaagtactcaattattttcacatgctccacacatctgagcagctacttgtgaatttggcattttcgaacgctcttgccccactgtgccctctacatgtgtccgataacagaagtgcctgccagtgagcatctctttaaggtctccacttgaccaattcaataacagcagccgaatgacaacaaaagtcaattaaaaatcgctaaatgccaggcgcaatcaaacttaaaagttaatcgcagcatctgttgttgttgttgttgttgcttttgcttttgttgagtatgtgagtgtaagtgaagggcatgacgtcacaagagcacagctgcaacgcacagtggaaccattgctcgataaagctaacgaaaaattgtagctttgcatacagaaaaaaacatgttaattgtatgtatttaaattggaaatactttttactaaattgattaaaaatataaaaccggaaagtggcatatgttacaatcgaaaaaaaaaaactccattgtgctccaccgtcggcctttggaaaaattgaacttaaaacatggaaatggaagtaaataaataatctcgcattgtgttccgcttgcgatgatgacgatgccgccgattctcagccagtaatgtcaagcccctggtctggaggtaataaaagcaactccgagcgatggctttgggctcagtttggattcggagccaacgagcgcaagatgatgttactgattcccgtgattgcagtgtgccttttcggcctaacggtactgcgtctataagtaggaccaactaaagaaattgaagaaaaaaagtgttacgaaagtcaagtgtttgaaactctacaaaaaatcgcatatttaaatgaatatttaaattaaattaaatgattaatttaattgctcattgctcgcatataaattatcctgataattctattttatcgcaatgttgacagtttgaattattagtttttcgcttttgtgcgtaattttctgatttaatcctacatctaaattcgaattctctgtacttcttaattgtttaattcaatttaaaatctaattaaaatggcaaccatgataatgataaccatgaagtgctataatgcattccaaatgccactttatatccactataaatccatataaaatcaattagatgcactaatcgcaaatcggttgttcccaatttcgccaacagatgtcgtacaaggtggaaccattgcccgattcctacgccggcctgggcgagggtccccattgggatgtggccaggcagagcctgtactacgtggatttggaggcaggcagcctgctccgctacgactatgcgcagaacaaggtctacaagacaaagatcgagggcgaaaccttggccggattcgtgctgccggtggagggacgtccgcaggaattcgccgtcggctgcggtcgacgcgtggtgatcgtcaactgggatggcgtctcgcccagcgccaaggtggtgcgcacactgttcgaggtgcagccactgatggagaagaatcgtttgaacgacgccaaggttgatccccgtggtcgcttctttggcggcaccatgcgctacattggcgatgagttcgagttccgtcacggcgagctgtaccgctgggaggccggtggccaggtgtcggtgatcaagggcgatgtgggcatctccaatggactggcatgggacgagaaggccaagaagttctactacatcgataccaccgactacgaggtgaagtcgtatgactatgatttcgagaccggcgtggctagcaatcccaaggttatattcaatctgcgcaagaatagtcccaaggatcatctgctgcccgatggcctgaccatcgataccgagggcaacctgtatgtggccaccttcaatggcgccaccatctacaaggttaatcccaagtgagtagttcactctaacattcgtgatcgagtgttaaatgtcgtacttcattgcagcactggcaagattctgcttgagatcaagttcccaaccaaacagattacctccgccgccttcggtggccccaacttggacatcctgtacgtgaccactgccgccaagttcgatcagcccgctccagctggcaccacctacaaggtgaccggactgaacgccaccggctatcccggcgtcaacctgaaggtctaggagctgcaatctctatctatccttagccgcagtaaaatgtaccaatcgaatccaagtgcaattatatgttatgctctttaacgttttaaatcgcgtctatcaatgttttgcatgctagttaggttatccttttttgcagttctagttcaaggtcagcttaaggatcacattctctcctgggaatatccaggatcatcatgtaaactcacaaagaggttgactatgctctactttactctgatttcaaacaacaatcttatcagccgcagacacacggtaatcatccgcggatcttatggtcatttggaggacgcagtgctcttatgcttctttattaatcagtggttctataaacaattttatacttatcgtctagtctaaaattaaagatagcaaggtggcgtaaaaaatcagtcgatgttttggtgaatggagatcatccactcaatttcggtgtagataaacatctgcatgaccgtctattcatcagactccgattccgattcggactcttcttcatcgtcatcatcgtcgtcgtcatcgtcgtcgtcgctgccggcggagcgatttagccgcagcatctcctggaactggtgtacacggatcttttgcggcacgatctgcagcagaaactccagattcttgttcttattgaccacctgggagagatgctcgtacttgagcgcttcgcccggtcgctggccgaattcctccgtgtatgccgcgcccgccaaatggcgaacgaatagctccgtgcacttggtcatcaggaagagcacctcgttggtgatcaagcccgtgtccatggagctcttcatgatcgttcgcacgcggctgaggggcagaaaggtttccgcggtcggtggacgctccacgggtggttggctccttggttcgcccatttgtttacttaattcccaagcaaactatggcttgggaatttttttggttttagagctgggctcacaagtggagctgtgaaactatcgatgttacaatcgaggcatgaaattcgtacctttctgagacactatcgattctttttttttatttgctatcgatggttatggtttatgaagacttaaaa

SEQ ID NO: 2441 - DNA, 1086 bp, DROSOPHILA
cgctactcaacggagccgtgtccaaggattctcgattctctattctcgattccccatctctcagctcaagcttaagctatctccaagatgtcgtacaaggtggaaccattgcccgattcctacgccggcctgggcgagggtccccattgggatgtggccaggcagagcctgtactacgtggatttggaggcaggcagcctgctccgctacgactatgcgcagaacaaggtctacaagacaaagatcgagggcgaaaccttggccggattcgtgctgccggtggagggacgtccgcaggaattcgccgtcggctgcggtcgacgcgtggtgatcgtcaactgggatggcgtctcgcccagcgccaaggtggtgcgcacactgttcgaggtgcagccactgatggagaagaatcgtttgaacgacgccaaggttgatccccgtggtcgcttctttggcggcaccatgcgctacattggcgatgagttcgagttccgtcacggcgagctgtaccgctgggaggccggtggccaggtgtcggtgatcaagggcgatgtgggcatctccaatggactggcatgggacgagaaggccaagaagttctactacatcgataccaccgactacgaggtgaagtcgtatgactatgatttcgagaccggcgtggctagcaatcccaaggttatattcaatctgcgcaagaatagtcccaaggatcatctgctgcccgatggcctgaccatcgataccgagggcaacctgtatgtggccaccttcaatggcgccaccatctacaaggttaatcccaacactggcaagattctgcttgagatcaagttcccaaccaaacagattacctccgccgccttcggtggccccaacttggacatcctgtacgtgaccactgccgccaagttcgatcagcccgctccagctggcaccacctacaaggtgaccggactgaacgccaccggctatcccggcgtcaacctgaaggtctaggagctgcaatctctatctatccttagccgcagtaaaatgtaccaatcgaatccaagtgcaattatatgttatgctctttaacgtttt

SEQ ID NO: 2442 - protein, 303 aa, DROSOPHILA
MSYKVEPLPDSYAGLGEGPHWDVARQSLYYVDLEAGSLLRYDYAQNKVYKTKIEGETLAGFVLPVEGRPQEFAVGCGRRVVIVNWDGVSPSAKVVRTLFEVQPLMEKNRLNDAKVDPRGRFFGGTMRYIGDEFEFRHGELYRWEAGGQVSVIKGDVGISNGLAWDEKAKKFYYIDTTDYEVKSYDYDFETGVASNPKVIFNLRKNSPKDHLLPDGLTIDTEGNLYVATFNGATIYKVNPNTGKILLEIKFPTKQITSAAFGGPNLDILYVTTAAKFDQPAPAGTTYKVTGLNATGYPGVNLKV

SEQ ID NO: 2443 - DNA, 3554 bp, DROSOPHILA
cttaagctatctccaaggtaggtgctctcctgcaagcgttccccgtttttttttttcaagtgtgttaaagtgatgcgaaaaagaaggcatagtttatactgaagactttttcgaaaaaacggaagcattattaaaattaaatagaaatttatgagcttgcacaaattaaatttaaatttggtaaaaaatatagctcgaatattttccttctattaaatgtgctattcaaaaactttttccctttttttttaaattttttttttttttttgtattaaaaaaatttcgaaatgagagacttcagcacggattaagtactcaattattttcacatgctccacacatctgagcagctacttgtgaatttggcattttcgaacgctcttgccccactgtgccctctacatgtgtccgataacagaagtgcctgccagtgagcatctctttaaggtctccacttgaccaattcaataacagcagccgaatgacaacaaaagtcaattaaaaatcgctaaatgccaggcgcaatcaaacttaaaagttaatcgcagcatctgttgttgttgttgttgttgcttttgcttttgttgagtatgtgagtgtaagtgaagggcatgacgtcacaagagcacagctgcaacgcacagtggaaccattgctcgataaagctaacgaaaaattgtagctttgcatacagaaaaaaacatgttaattgtatgtatttaaattggaaatactttttactaaattgattaaaaatataaaaccggaaagtggcatatgttacaatcgaaaaaaaaaaactccattgtgctccaccgtcggcctttggaaaaattgaacttaaaacatggaaatggaagtaaataaataatctcgcattgtgttccgcttgcgatgatgacgatgccgccgattctcagccagtaatgtcaagcccctggtctggaggtaataaaagcaactccgagcgatggctttgggctcagtttggattcggagccaacgagcgcaagatgatgttactgattcccgtgattgcagtgtgccttttcggcctaacggtactgcgtctataagtaggaccaactaaagaaattgaagaaaaaaagtgttacgaaagtcaagtgtttgaaactctacaaaaaatcgcatatttaaatgaatatttaaattaaattaaatgattaatttaattgctcattgctcgcatataaattatcctgataattctattttatcgcaatgttgacagtttgaattattagtttttcgcttttgtgcgtaattttctgatttaatcctacatctaaattcgaattctctgtacttcttaattgtttaattcaatttaaaatctaattaaaatggcaaccatgataatgataaccatgaagtgctataatgcattccaaatgccactttatatccactataaatccatataaaatcaattagatgcactaatcgcaaatcggttgttcccaatttcgccaacagatgtcgtacaaggtggaaccattgcccgattcctacgccggcctgggcgagggtccccattgggatgtggccaggcagagcctgtactacgtggatttggaggcaggcagcctgctccgctacgactatgcgcagaacaaggtctacaagacaaagatcgagggcgaaaccttggccggattcgtgctgccggtggagggacgtccgcaggaattcgccgtcggctgcggtcgacgcgtggtgatcgtcaactgggatggcgtctcgcccagcgccaaggtggtgcgcacactgttcgaggtgcagccactgatggagaagaatcgtttgaacgacgccaaggttgatccccgtggtcgcttctttggcggcaccatgcgctacattggcgatgagttcgagttccgtcacggcgagctgtaccgctgggaggccggtggccaggtgtcggtgatcaagggcgatgtgggcatctccaatggactggcatgggacgagaaggccaagaagttctactacatcgataccaccgactacgaggtgaagtcgtatgactatgatttcgagaccggcgtggctagcaatcccaaggttatattcaatctgcgcaagaatagtcccaaggatcatctgctgcccgatggcctgaccatcgataccgagggcaacctgtatgtggccaccttcaatggcgccaccatctacaaggttaatcccaagtgagtagttcactctaacattcgtgatcgagtgttaaatgtcgtacttcattgcagcactggcaagattctgcttgagatcaagttcccaaccaaacagattacctccgccgccttcggtggccccaacttggacatcctgtacgtgaccactgccgccaagttcgatcagcccgctccagctggcaccacctacaaggtgaccggactgaacgccaccggctatcccggcgtcaacctgaaggtctaggagctgcaatctctatctatccttagccgcagtaaaatgtaccaatcgaatccaagtgcaattatatgttatgctctttaacgttttaaatcgcgtctatcaatgttttgcatgctagttaggttatccttttttgcagttctagttcaaggtcagcttaaggatcacattctctcctgggaatatccaggatcatcatgtaaactcacaaagaggttgactatgctctactttactctgatttcaaacaacaatcttatcagccgcagacacacggtaatcatccgcggatcttatggtcatttggaggacgcagtgctcttatgcttctttattaatcagtggttctataaacaattttatacttatcgtctagtctaaaattaaagatagcaaggtggcgtaaaaaatcagtcgatgttttggtgaatggagatcatccactcaatttcggtgtagataaacatctgcatgaccgtctattcatcagactccgattccgattcggactcttcttcatcgtcatcatcgtcgtcgtcatcgtcgtcgtcgctgccggcggagcgatttagccgcagcatctcctggaactggtgtacacggatcttttgcggcacgatctgcagcagaaactccagattcttgttcttattgaccacctgggagagatgctcgtacttgagcgcttcgcccggtcgctggccgaattcctccgtgtatgccgcgcccgccaaatggcgaacgaatagctccgtgcacttggtcatcaggaagagcacctcgttggtgatcaagcccgtgtccatggagctcttcatgatcgttcgcacgcggctgaggggcagaaaggtttccgcggtcggtggacgctccacgggtggttggctccttggttcgcccatttgtttacttaattcccaagcaaactatggcttgggaatttttttggttttagagctgggctcacaagtggagctgtgaaactatcgatgttacaatcgaggcatgaaattcgtacctttctgagacactatcgattctttttttttatttgctatcgatggttatggtttatgaagacttaaaa

SEQ ID NO: 2444 - DNA, 1119 bp, DROSOPHILA
ccaacgagcgcaagatgatgttactgattcccgtgattgcagtgtgccttttcggcctaacggtactgcgtctataagtaggaccaactaaagaaattgaagaaaaaaagtgttacgaaaatgtcgtacaaggtggaaccattgcccgattcctacgccggcctgggcgagggtccccattgggatgtggccaggcagagcctgtactacgtggatttggaggcaggcagcctgctccgctacgactatgcgcagaacaaggtctacaagacaaagatcgagggcgaaaccttggccggattcgtgctgccggtggagggacgtccgcaggaattcgccgtcggctgcggtcgacgcgtggtgatcgtcaactgggatggcgtctcgcccagcgccaaggtggtgcgcacactgttcgaggtgcagccactgatggagaagaatcgtttgaacgacgccaaggttgatccccgtggtcgcttctttggcggcaccatgcgctacattggcgatgagttcgagttccgtcacggcgagctgtaccgctgggaggccggtggccaggtgtcggtgatcaagggcgatgtgggcatctccaatggactggcatgggacgagaaggccaagaagttctactacatcgataccaccgactacgaggtgaagtcgtatgactatgatttcgagaccggcgtggctagcaatcccaaggttatattcaatctgcgcaagaatagtcccaaggatcatctgctgcccgatggcctgaccatcgataccgagggcaacctgtatgtggccaccttcaatggcgccaccatctacaaggttaatcccaacactggcaagattctgcttgagatcaagttcccaaccaaacagattacctccgccgccttcggtggccccaacttggacatcctgtacgtgaccactgccgccaagttcgatcagcccgctccagctggcaccacctacaaggtgaccggactgaacgccaccggctatcccggcgtcaacctgaaggtctaggagctgcaatctctatctatccttagccgcagtaaaatgtaccaatcgaatccaagtgcaattatatgttatgctctttaacgtttt

SEQ ID NO: 2445 - protein, 303 aa, DROSOPHILA; identical to SEQ ID NO: 2442

SEQ ID NO: 2446 - DNA, 6778 bp, DROSOPHILA
ttttaaatttagttttagcaaactacgagaaacagtgctatttttgttaccgcctaaatttaaaggtttttatttgttttaccaattgtttttaaaatatacattagatctgttactaattttgttatttcgattgaaaatcattgtagtatttaagtttagtgagtaaaattattaataagtgtcagaaaatacagaaacgctggtacaaacacggaatgtgcttatggtgctattattgttaccgcaactgtacatatatctctctcagtaacattttgatacaaacattgtaatgagattttttccatagctgcgggccattgggtttgtttagacacattttaagcaacataatttgttttttgatttctttatacattgtaaccctatattttctccaatttccgtaatttgagtaaatgtaaaagtgatttaatacaaatattaaaaaaaatttatttatattttcagaaatattttccctttcaaacagttctatgagctcaattgtatctggagatgctacatcgagttattcgcagaataaatctcgactaaactcaaacgaattgacctttaccggtcggtttaaggctgttgatcatttgtttcgaagcaccgagtcagggaaacacaaaattgatgaatatagtgcttacgactcaaacgcatcatgtagtcgtctatcgccttcaactgtagacgaagtaaagaaagctgaacatttatttgatgctcagttaactaatacaaccgcaaatcagatacctatgtccgctgtcagcatcggctatgagtcgaatactagacatgagtatttggaaagcgattcgccttcccagatcccaaagcgacgtggtaggaaaaaaggatcaaaaggagtagacgcacttattgcaaaggaatcatcaagcctgtctcaacaaatattttttggtggctctactgttaaaaaagttaagactacaaaggaactttttaatgaaattcagagcagaaaattgagtgtttctatgcaatcatctgcgagtaatctttcaaattcgtcaacaaatcgagatctgccttcgcataccacatttccgagacaaacttcttcttgctcaggttgttttttgtaaatgctaaattttcgcaattaaattgtaccacaatcttttcagacacttcaatgaattctccacatatattggaaactttatctggcagtgctatcttcgcaagtaaaatagacggtaagagcaaataattgttggaaaatcaattaagaagattagacctgaatgatagaagaatgtttacaattttgtcacaaaagtaaataaatgtaaccaagatgccgtggcttactctgtatccgaaaaaaatattttcccggtttttgaacaaccctattatacatatatatttttacttgctcatatatgcgtatatatctattgagtaatatgtttattattcccttcactagtatatgattttactctacgagtaagaagtttgccagatatgaacaaataattttgagcatgagccatggtcctataaaagtggagagtcttgacttaaaatgcagatgcacgcttattacaatctttagccatgtcaaaacttttgaacaacccaaaaataggaacaaaaataatcagatttttaaaagcgaagacactagaaaaacaagattcgtaacaccatatgatgtggctctagaggtgcaccaggctctcgaatttttgttcaagagcgagagagcggagagctctacagcgaacagctcgtttacacgcatacagtgacagtcgacaactgtatgtgtgcactcgaatgctcatgcattgtaaatttgccaaaaaaaagcaaaaaaaaacgtaattattatttaaatatagcttagaaatagtaacaagcgaatctatgtatgtacatatgtatgtatgtaaacataataacaaaataaattttaaaaattactttataatatttgtcattagggtgttaagcttgcaaaatatttttttctcaatgtaatgacttctttttagaaaatttataatttaaattacagtagttataatttcttttgtatttgcttttattatttgtgtaaatacacatacacgttctagtctattgtgtttactcacacaaacaagatttttagatttcttacgctctcagcgtaagccagaggacagagggcaattttggctgtcaccaaaaaagtggctgcatagtgtaaaaccaatgtatggccgttacgcatcttgttattctagtgtctttggtaaaagggttactatattcgttgaaaattatgtaacaggcagaaggaagcgtttcccctatataaagtattcacattattgattaggatcaatagacgagtcgatctacccatgtccgtctgtccgtatgaacgtcgagatctcaggaactataaaagcttaaaagttgcgattcggcatacagattctagagacacagatgcgaaagaagtttattgacccatgttgccacgccctatctaacgccctaaagccgccaaacgggccacgctcacactttcgaaccactttcacattttttctcattttattccaaaatatatatcgatatcgcagaaaaattatgaaatttcgcgttcgcattcatactagctaagtaatgggtatctaatagtcggggaactatatatacagcattctattttgtttaatataaacatttctctttttacagatctgggaaacactgatagtgataccgtcacttcagatccatcacacgatagtaataaatcacaagagataaaggaatgtacctcgttagatagcaatagcaattcaattcagagcttaccgttagcaaataatcgggaaaacttgattcctacaaatgttaatgatatcaccactcaactaatgcatctaattcacagcttaaacagtccgctgagtgaaattgaaattgagagggtgtaccaagaaaaaataataccatgtacttgtatagttatcgaaggggttcaaggaacattaggagaatcgaataattccactttagatgagcagtcgtacaatgcaaaaataagtttaaattctaaagataacctttcttgtcacaatcaagataattattctacatcgcaacgctctgttaatggtgaagtaattgacactcagccaaaattggtaaagtccatatttgatttagattttgatgataacgacgatcctttatattttattatggatgaaattcaaaagcctattgctagagctgatgagttaaaaaataataaatcagataccaaaaacataaattttggtgcatctgcacaaaatgcttcgttgaatatcatacatttcaacgatgatgctcaacaagataattcgaatcaagaaagaggaaaaaatgaaacacaaaatgctattcctgcttttacagttcacgaagatcccgattgcttagcaaggcaaaggttttatatacaaaccaacaaagtgaccagctttcacattaatgcgttgcacaactattatataccaaacataaatggtaattgggacagtgtggaatcatttacaagttttcaatctgagcacacaattatggataccatggaatcgtacacggtgactaatggagctgatgttgttcctaaatatggacttctaacatcagatcgaataagaaaagatctaagttcattaaaaagtataaagccttatagggttaaaaattttacatctttaatttcaccgtttcttggtgttgcaaagtgcttaccaacgtgtcgaagagctagacgaaggtttaaaaattttgttaactcgtccacggcgaatgataaaatatctaacaatttcgaaagcctcgaaaatatgaaaacttcctttaaaaactgcaacccgttaaatgttaaaatcgatggtacaacttctgcgatttacagccataatgaaaaccacgtgccaatgcaagtcaataccaacgtcgaacaattaccgccgtcgcaatcgttctccagtaatgccatcagttataatttactgaagctggccgatgataaagtgtgtcatgacggaattagcgataaaagcagtaataccggttgtcaaggtaacagtccctatagcagttctagcagtagtagctactccggtagaaaggaagatcaacacattataactaaaaatctgcaaaataaaaacattcaattaaacagtagaaaatcagatatgaagcgaagaaaaagaatatatttagagaatgattcaaaaaagaagaaacattatcgaaaacgaataaagactgctgtaaacagaactttttcaaatctgcatagaaacttatacagcattgacagcgaaaatggaatgaaaaatgattataaaaatgaatacggaaacagtaataatgaagaatacgctattgttcaacgtccagcaggtgatggggaaaattgcagcaatcacatcgtattgacaataaaaaaaactccaagtaaaattaattctccagcaaactctatgactgcattttctcctccatctacatcagatggagcaaatttgcaaaaatcgattctagacttgcgtctggaagatacaaatatatcacaaagtataacagaaattccacaaaaaaaggatttgtcaaaaacggacaggattgtccatcagtctcgatcttctgcctatcgcagaatatttcgaaaaccggacaaaagtcaaactaaatttattgatctggatttaaaacatttatttcatttgaaagcaaattcaccatgtatatcggccaatgctaagctacacaacaaactattttttcctcacgaattgtctagggataatacttcaggcataagagaaagattaataaattatagcagtagcagcagctcgagttatgatgatgatagcgaagttgaaaatacttcttttctgaagaaagctaatgtaaacaaattttcagcttccaataaccgtaatttaaaaactgagactgaaacctgtgccgccactgcgatttctgagttcaaattcgaaagtgatgaagactcaatattaacatcattaggcgatagtgatatagatattcaggatgaaatacaagtaataaacgataaggttgattattgcaatgattttcaaaacaacaaaatgctagaatcttttaattcaatatttgttgacagtctacggacgaacacaaaaaatgcatctgacaatatgggatcatctgcgcatattacatcgctggaatcattaaaacctgagaatgcggatgctatcacaagatattgtaacaataacaacttgggtgtaaacttatccaatgagctcagtaacattagtgcgaaaccgctgaaatcgtttgattcaacaatgaagctgccatcacttggcattgagcactgtactggtattaaaacatcttcagacatggcctctacgaatattgctgaaaaaaaattaactaggattcaacaattcaaagaatggcatcaagttcttcagttgagatcgtacaacaacgagcccttaattgttttgccttacgttttgcttgaataaatttgacgtttctttcacgctgtgtgataacatttccgaaacaaaaaaaaacatgagaaggcgtgtagtaaaataaaatacgttaataaatattttaacttacatttaatcttgtttagtatacacttagtacattttgaacagatcacagcacggttggttaattctatatctaactggattaaaatataataaaaaagaaaaaatttggttcgcaataagaattttcgttactctctagtttttaaaaaattaaaattttttaactttgagaaatttatttaaatttataaataaaaatagcaccacgtaatgtataattgtatataaactaacccttctagtttcccaataaattttattttaaaaaaagacttactggtccacatggtgggggtagctcttctagcataaatgttgtttataaaatgaatccatattgaatttaattcgaaaataattaaaatgttcttaaaaattggcactcaataaaaatcgcgtctgcttctcttctaatcgcaagtgaatccgcgataaaggttgtgtttttttttagaaacgtaatccgttaatcaatttctttctcttattgttgtttttctcgccctttgctcgtccccgtctcttttaccaacataatttgtctttgcatgttccgttgtgccttccaaatttaatatttcttacgatgcctatgcgctcgccgaatgagagcgacggcctattaatcggctagaaattaaatatcaattaattagtttaaaatatcgccaattcctcgctgtgattaggcacattaacttcggcttatattctgagtcaatatacatacatataaattattgaattcacctttttcatttctattgcagttaagggggcggaagcccctagattaggaataaggaagattcttaccttgaatggccagacggttcaatttgttaatagaggtctagaagccgcttccacaaaaccaagttcgctaacctagtacttgttaaaatggttaccgtcagctaataacaaggaagtccacgttattgaaacactttgtcggcaacgatcatatcggtgccaatcaattattattgccaaaatattccctaatgcgtcagatgtggtctgaaaaaggggatgtttaatgcgttaactgttgcggaaaccacacagccacctattaaggttttgtc

SEQ ID NO: 2447 - DNA, 2690 bp, DROSOPHILA
aaaattgagtgtttctatgcaatcatctgcgagtaatctttcaaattcgtcaacaaatcgagatctgccttcgcataccacatttccgagacaaacttcttcttgctcagacacttcaatgaattctccacatatattggaaactttatctggcagtgctatcttcgcaagtaaaatagacgatctgggaaacactgatagtgataccgtcacttcagatccatcacacgatagtaataaatcacaagagataaaggaatgtacctcgttagatagcaatagcaattcaattcagagcttaccgttagcaaataatcgggaaaacttgattcctacaaatgttaatgatatcaccactcaactaatgcatctaattcacagcttaaacagtccgctgagtgaaattgaaattgagagggtgtaccaagaaaaaataataccatgtacttgtatagttatcgaaggggttcaaggaacattaggagaatcgaataattccactttagatgagcagtcgtacaatgcaaaaataagtttaaattctaaagataacctttcttgtcacaatcaagataattattctacatcgcaacgctctgttaatggtgaagtaattgacactcagccaaaattggtaaagtccatatttgatttagattttgatgataacgacgatcctttatattttattatggatgaaattcaaaagcctattgctagagctgatgagttaaaaaataataaatcagataccaaaaacataaattttggtgcatctgcacaaaatgcttcgttgaatatcatacatttcaacgatgatgctcaacaagataattcgaatcaagaaagaggaaaaaatgaaacacaaaatgctattcctgcttttacagttcacgaagatcccgattgcttagcaaggcaaaggttttatatacaaaccaacaaatgcttaccaacgtgtcgaagagctagacgaaggtttaaaaattttgttaactcgtccacggcgaatgataaaatatctaacaatttcgaaagcctcgaaaatatgaaaacttcctttaaaaactgcaacccgttaaatgttaaaatcgatggtacaacttctgcgatttacagccataatgaaaaccacgtgccaatgcaagtcaataccaacgtcgaacaattaccgccgtcgcaatcgttctccagtaatgccatcagttataatttactgaagctggccgatgataaagtgtgtcatgacggaattagcgataaaagcagtaataccggttgtcaaggtaacagtccctatagcagttctagcagtagtagctactccggtagaaaggaagatcaacacattataactaaaaatctgcaaaataaaaacattcaattaaacagtagaaaatcagatatgaagcgaagaaaaagaatatatttagagaatgattcaaaaaagaagaaacattatcgaaaacgaataaagactgctgtaaacagaactttttcaaatctgcatagaaacttatacagcattgacagcgaaaatggaatgaaaaatgattataaaaatgaatacggaaacagtaataatgaagaatacgctattgttcaacgtccagcaggtgatggggaaaattgcagcaatcacatcgtattgacaataaaaaaaactccaagtaaaattaattctccagcaaactctatgactgcattttctcctccatctacatcagatggagcaaatttgcaaaaatcgattctagacttgcgtctggaagatacaaatatatcacaaagtataacagaaattccacaaaaaaaggatttgtcaaaaacggacaggattgtccatcagtctcgatcttctgcctatcgcagaatatttcgaaaaccggacaaaacttccaataaccgtaatttaaaaactgagactgaaacctgtgccgccactgcgatttctgagttcaaattcgaaagtgatgaagactcaatattaacatcattaggcgatagtgatatagatattcaggatgaaatacaagtaataaacgataaggttgattattgcaatgattttcaaaacaacaaaatgctagaatcttttaattcaatatttgttgacagtctacggacgaacacaaaaaatgcatctgacaatatgggatcatctgcgcatattacatcgctggaatcattaaaacctgagaatgcggatgctatcacaagatattgtaacaataacaacttgggtgtaaacttatccaatgagctcagtaacattagtgcgaaaccgctgaaatcgtttgattcaacaatgaagctgccatcacttggcattgagcactgtactggtattaaaacatcttcagacatggcctctacgaatattgctgaaaaaaaattaactaggattcaacaattcaaagaatggcatcaagttcttcagttgagatcgtacaacaacgagcccttaattgttttgccttacgttttgcttgaataaatttgacgtttctttcacgctgtgtgataacatttccgaaacaaaaaaaaacatgagaaggcgtgtagtaaaataaaatacgttaataaatattttaacttacatttaatcttgtttagtatacacttagtacattttgaacagatcacagcacggttggttaattctatatctaactggattaaaatataat

SEQ ID NO: 2448 - protein, 826 aa, DROSOPHILA
MQSSASNLSNSSTNRDLPSHTTFPRQTSSCSDTSMNSPHILETLSGSAIFASKIDDLGNTDSDTVTSDPSHDSNKSQEIKECTSLDSNSNSIQSLPLANNRENLIPTNVNDITTQLMHLIHSLNSPLSEIEIERVYQEKIIPCTCIVIEGVQGTLGESNNSTLDEQSYNAKISLNSKDNLSCHNQDNYSTSQRSVNGEVIDTQPKLVKSIFDLDFDDNDDPLYFIMDEIQKPIARADELKNNKSDTKNINFGASAQNASLNIIHFNDDAQQDNSNQERGKNETQNAIPAFTVHEDPDCLARQRFYIQTNKCLPTCRRARRRFKNFVNSSTANDKISNNFESLENMKTSFKNCNPLNVKIDGTTSAIYSHNENHVPMQVNTNVEQLPPSQSFSSNAISYNLLKLADDKVCHDGISDKSSNTGCQGNSPYSSSSSSSYSGRKEDQHIITKNLQNKNIQLNSRKSDMKRRKRIYLENDSKKKKHYRKRIKTAVNRTFSNLHRNLYSIDSENGMKNDYKNEYGNSNNEEYAIVQRPAGDGENCSNHIVLTIKKTPSKINSPANSMTAFSPPSTSDGANLQKSILDLRLEDTNISQSITEIPQKKDLSKTDRIVHQSRSSAYRRIFRKPDKTSNNRNLKTETETCAATAISEFKFESDEDSILTSLGDSDIDIQDEIQVINDKVDYCNDFQNNKMLESFNSIFVDSLRTNTKNASDNMGSSAHITSLESLKPENADAITRYCNNNNLGVNLSNELSNISAKPLKSFDSTMKLPSLGIEHCTGIKTSSDMASTNIAEKKLTRIQQFKEWHQVLQLRSYNNEPLIVLPYVLLE

SEQ ID NO: 2449 - DNA, 4539 bp, DROSOPHILA
aagtatctgcgcctgtgcgtcgactacgacaatgcgccgcataacgccaagtactgtgtgcagagcatactcagggagctgcaggagacgccgcgtggcaagcgtttccttcagtgccagacgctgcagcagatctgcgagatctgggagctgggcgactattgccgccgcaagcagcgggagctaaagacgatgggcaactcgggacgggcggaggtggagccaccggaggcgctggccaagcgacagaagctggaggatgcggccattgccataacggacgagtacgacggcatcatttgccgacacatgccattcctgcgctccacctatcccagtggtaagtgtttcgatcaatctcttgccatgatagccatcatccccattcggtatttttcatgccacagataatcatctgccgaaaacgcaactatatgtgcatgctgtcaaaactggcaaatccccgccagcgtacgaaacgcagcagtgtgacaaattgtttcgctccatctgcacgtacgatggccagcgctttagtagctccttctgggagaagaacaagaagcaggcagagcagggcgccgctctggtggccctgctccatcttggccagctggaggcggaggttctgcgcgacaatggcagcctgctcaactgagcagcaaagttcctcctgttttatgtaaatgtcatccattttggctatgttttggacaccattatttagttgttttttttttttttgattattgcaatggctgttgcaactgccttaggtgctgggagcagtatctggactacctccattgggttaacaaagtttgcatctgaataaacaaaactgcaagtgtgcagtgctttaaatatatgtatgtatttagataaataaattatatgagctgttttaagtttataaggagtacagctggttggagtgctcctagtactaagtaattcgtagttcagctaatccaagaaaacccaagttcacacagtttttcggtacataactcacgattaattttattctttctttttttattacgctctgattaatttcctaatgtcgggttcacgcagggacgacgctggtgttggccatgaccatggggataaaagtggttatggttgtggttttggttatgggaattgatcggcggcggcatcatgacatgatcattccgatagccagagcttgcgataaagtttagtaggtactccttggtgactggatgctttatgctgtccacaacggctgaaattaagatgagttgagaatgagtatagggatcctcctactgctggtgaagattactactcacagcgggctgtattataactgttgggattctttttgtccgttcgctcgcgcataaagtcccagttgccaaactgattcatggtgcactcaacgattctgttgtccaattctctggtctccttcgttaacctttgcatccgtccatagggtgcatcgtgtccgccgacatagaggaagcccacctttttcgtcagcaagctgccagaggcggagaatggcatggtatgaattgagcccgttgaacggatagatcactacaactcacccctcgccgcgctctgttatgatcttcagccgaaagtccaccgagttgagctcatgtggcttccatttgaagacatcggagcatgtgccagccgtgtagggctgctttgatggctggaagatgaggccatccggttcgtgtgccagtgtccgcgagaatttctcacccagcagccgggcagacatccaaatgtcccagaagtccttgccgcgcacactgaacgcctgcagccgctgattgatgatgccatgcttcatgcccaggattcggggacctgcagcgatatatggatgtgtccttcataaacgaacatcgaataattactcacctataacttccgtcttaatgtagtccagtcgatttggatagaatggctcgtcccgcacatcgcgattcgataatcgcacaatgtcgtagatgaggtagcgcggcgttacggtctcgccgatcttgtccagcaccatctcctaaacggacaaatagaacgataatttagttgcaatcaggagtgccagctagaatcacataccccgtcgacgagagtgccgtcgagatgctcgtttaggttcctgctctccacaaatgtcacattctccacctggaaacaggagtgattgcgatcgaagaaatatacctcgtcccttccatcgatgagcatcatataacgtgtaccgtccgccttccacgacacacgatacggtatctcgcttagccgctttatgttctccctgtccatggagacgggctgtgcgccagggaagccgttcttcttccagtcgcaccagtcctgcaccttacgctgcagatcgcccagtcgcggctgatcgctcacctgtcgcacgcccggcactcccgccataaaggtggcattcttgatgatcatttcgcgccgtcgcttcttacgcggctgaccgtccgacgtggaggcgtcacagtcgccgcccgcatcctctccctccacctcctcggcgtcgtcatcctgctcgccggcctgctgtgacgtggatgaggagttgtcctgcacaaaaccatcgccgttgccatcatcatagtccaggcaccaattgggctgttctggtgccgctggagcggcattcgtgtcctcgtagcgtttgtacagctcgttgatgtaatcctgcttgtagatgcccggcggccgggcgctggcaaagatagcgagcgctgccgaaacggagcaatcgagtcgctcgaccaaatagcagacaatcaggaagccagtgcgattgaaaccgtgcgtgcagtgcacggctataacgtcaaatggacgttcgttaataaagttgtccacgatctcgatgaaactgtgcgtctgctccggcgatggcgtctcgccatgtccacggcactgcagcttaatatatttcgcgccgagctcctccactgcggatcgatcgtagaatcgtttcgtattggtcaggtcaacccagaggcccagtttcacctgaaaccataagatggattggataagtgagttggaaattgggggatgttgcgtttgcattcacctttagcgttttgcagtattcgaagagcatctcgggttgaaaggtgcactcgatgggcatcttgtcgtgaaagttattgctcagcggggtcttaaaggccaggaagcgttccgcaatgatggtatcgctcttgcgcggacagtatagccagcgattgggcaatggaccagagccccgttcccgatcccgattagttagggccatagtgccacagtggctccgcctctcctgctcctcctcctcctcctgctgctgctgctgctgctgctgctgctactgctgacgacgatggaaacggcgggcgcagcgatgggacgacgccgttgcgtttgtgttaggtggtttattgctggtgcagattgtggtggatgcagatgcagcgagaactcgcgggcctgggaattctgtgtaggatttgtctagagatgtggaatatatatgtaaaaatatcgatatcttatttgtttccctttttataaaaataaatgatatatatatatataagatatcgcgttttttgctaaatatatttttcatatttcttattggtcacactaatatgcaagtgaattcaaataagaaagacgttaataataaaacggaaataaaatgagcacagccagaagttattattctggaataatcgacaacagcgcgacctgcaatgtttgtagcaaatctagttaaatctttatatcttttatcattttaatgattttattaaaaatgatatatcatcgaactgtccagccaaattatcgatgcgtccgttacatcgatagcatcgattgtttgaaaatattgttgggggaattcgtcaaaaagttgttctcacggggaaattacgagaaagtatttacaaaagtatttaataatatatataataaattttagtgtaattaaaattaattaaataaaaaaattaaaatttttttaaatatacagaacagaattaaaaaaacatgtttttcccctaccttctgccgctcatttgtatcgataatcgtttttcaaaatagctgcgaatcttttgcataaaaataaacaatttaattgctgcatatttcggtcgatgtgtgcatacacacatacgcacatacctatatatatatatatacgcatcagtttcgatatgaacttggggcacacacagccagccgtacaattatttactgcaatgtaaataaacaacaaataacaacaaatcgcccgcagaaatcgaacgaagtcgcgaaaaaaaagaggaacgaggaggtttgggctcgtaaccacacaatttcgcctctcactcgatttttgatcgccgcccggacgcgatcttcacttcatacaaattgtgaaatttttgcgaaaatttgaatacactccgttccgaaactcgattgtttttttgcggtccgttcaaaccgaactagtacgtaagccac

SEQ ID NO: 2450 - DNA, 2225 bp, DROSOPHILA
atctctagacaaatcctacacagaattcccaggcccgcgagttctcgctgcatctgcatccaccacaatctgcaccagcaataaaccacctaacacaaacgcaacggcgtcgtcccatcgctgcgcccgccgtttccatcgtcgtcagcagtagcagcagcagcagcagcagcagcagcaggaggaggaggaggagcaggagaggcggagccactgtggcactatggccctaactaatcgggatcgggaacggggctctggtccattgcccaatcgctggctatactgtccgcgcaagagcgataccatcattgcggaacgcttcctggcctttaagaccccgctgagcaataactttcacgacaagatgcccatcgagtgcacctttcaacccgagatgctcttcgaatactgcaaaacgctaaaggtgaaactgggcctctgggttgacctgaccaatacgaaacgattctacgatcgatccgcagtggaggagctcggcgcgaaatatattaagctgcagtgccgtggacatggcgagacgccatcgccggagcagacgcacagtttcatcgagatcgtggacaactttattaacgaacgtccatttgacgttatagccgtgcactgcacgcacggtttcaatcgcactggcttcctgattgtctgctatttggtcgagcgactcgattgctccgtttcggcagcgctcgctatctttgccagcgcccggccgccgggcatctacaagcaggattacatcaacgagctgtacaaacgctacgaggacacgaatgccgctccagcggcaccagaacagcccaattggtgcctggactatgatgatggcaacggcgatggttttgtgcaggacaactcctcatccacgtcacagcaggccggcgagcaggatgacgacgccgaggaggtggagggagaggatgcgggcggcgactgtgacgcctccacgtcggacggtcagccgcgtaagaagcgacggcgcgaaatgatcatcaagaatgccacctttatggcgggagtgccgggcgtgcgacaggtgagcgatcagccgcgactgggcgatctgcagcgtaaggtgcaggactggtgcgactggaagaagaacggcttccctggcgcacagcccgtctccatggacagggagaacataaagcggctaagcgagataccgtatcgtgtgtcgtggaaggcggacggtacacgttatatgatgctcatcgatggaagggacgaggtatatttcttcgatcgcaatcactcctgtttccaggtggagaatgtgacatttgtggagagcaggaacctaaacgagcatctcgacggcactctcgtcgacggggagatggtgctggacaagatcggcgagaccgtaacgccgcgctacctcatctacgacattgtgcgattatcgaatcgcgatgtgcgggacgagccattctatccaaatcgactggactacattaagacggaagttataggtccccgaatcctgggcatgaagcatggcatcatcaatcagcggctgcaggcgttcagtgtgcgcggcaaggacttctgggacatttggatgtctgcccggctgctgggtgagaaattctcgcggacactggcacacgaaccggatggcctcatcttccagccatcaaagcagccctacacggctggcacatgctccgatgtcttcaaatggaagccacatgagctcaactcggtggactttcggctgaagatcataacagagcgcggcgagggcttgctgacgaaaaaggtgggcttcctctatgtcggcggacacgatgcaccctatggacggatgcaaaggttaacgaaggagaccagagaattggacaacagaatcgttgagtgcaccatgaatcagtttggcaactgggactttatgcgcgagcgaacggacaaaaagaatcccaacagttataatacagcccgctccgttgtggacagcataaagcatccagtcaccaaggagtacctactaaactttatcgcaagctctggctatcggaatgatcatgtcatgatgccgccgccgatcaattcccataaccaaaaccacaaccataaccacttttatccccatggtcatggccaacaccagcgtcgtccctgcgtgaacccgacattaggaaattaatcagagcgtaataaaaaaagaaagaataaaattaatcgtgagttatgtaccg

SEQ ID NO: 2451 - protein, 649 aa, DROSOPHILA
MALTNRDRERGSGPLPNRWLYCPRKSDTIIAERFLAFKTPLSNNFHDKMPIECTFQPEMLFEYCKTLKVKLGLWVDLTNTKRFYDRSAVEELGAKYIKLQCRGHGETPSPEQTHSFIEIVDNFINERPFDVIAVHCTHGFNRTGFLIVCYLVERLDCSVSAALAIFASARPPGIYKQDYINELYKRYEDTNAAPAAPEQPNWCLDYDDGNGDGFVQDNSSSTSQQAGEQDDDAEEVEGEDAGGDCDASTSDGQPRKKRRREMIIKNATFMAGVPGVRQVSDQPRLGDLQRKVQDWCDWKKNGFPGAQPVSMDRENIKRLSEIPYRVSWKADGTRYMMLIDGRDEVYFFDRNHSCFQVENVTFVESRNLNEHLDGTLVDGEMVLDKIGETVTPRYLIYDIVRLSNRDVRDEPFYPNRLDYIKTEVIGPRILGMKHGIINQRLQAFSVRGKDFWDIWMSARLLGEKFSRTLAHEPDGLIFQPSKQPYTAGTCSDVFKWKPHELNSVDFRLKIITERGEGLLTKKVGFLYVGGHDAPYGRMQRLTKETRELDNRIVECTMNQFGNWDFMRERTDKKNPNSYNTARSVVDSIKHPVTKEYLLNFIASSGYRNDHVMMPPPINSHNQNHNHNHFYPHGHGQHQRRPCVNPTLGN

SEQ ID NO: 2452 - DNA, 5237 bp, DROSOPHILA
ttattgccgacgaccttaaatactgagtaataaattctatatacaaaatgtaagcctagaaagtccttccatttatcgtcaattcaacgaagaacgttttagtgcaataaattaggcagtgtccttgtctcagaatcgcaagaaaatactacttttaatgtttacttaaatggggatgttgaaaaaaaaaattgatatatgaatgaatgagtgatttagcttcgacgaagaaggacagtccagaattaggaacgaactttttctagtttatacaaattaagtacatgttctacatattttacactctattatcagagctcgtaaaaaaggttttttttttgcgtaaagaactctacgaaataacttaatagcaagtatgtgcaaaatgaattggccgtaattggtcaagtttaacaaattcgatataaatcataaaggtggtgggtgtatgcctttcgacgcagtgaatgctaattctttataaacattatgcttcgttaaatttacttaattttatcacaacatagctctaaaatgtttgctttttcattcttcaaaaaagtgactgcattttcaaacacatgaatgacaagtatctgccatttttatacattatgtttgcttatggatgaactatgcatggcaattaaagaagggtctcagccacacaaataaatcctatttttcgagctctgacttatcaatcaagtgagaaatgaaggcatatgcggtttatacaagttaattaaaagttatttaataatttaccattgtctgtgtattcgttcgagagcgaaattaaggcatatgcggtctttacatgtttcatttccgtgcttggcacattttcgttactgcagtcatcacaaaatctcgcatgtacataggtctacgctagctacacatagtatatataaaaatatcatgagaatcgctaaattcgatacggataggatggagatggagatggaggcggaggcttgcagagacttgcagagagttaggcatcacaattgggcacatagatggccacgcaggttgattcccacacatcgttgggcgagtcccacgagtccttttcgtgccaccattccttggtatccaagtcgtaggccattgtttccgcactggcccgatcaatcgactccgtggagtccagtccgcccacaaagaatattgttctgcccatcgcggtcacgccggtgtagaacttgggggccggtatcttggtctccacgctccacgtgttagtctcaatatcataggcatatatgtgctccaccagaacccgccattccgtcaaactctcgtgccatccgccgcaggcatagatgcgattatccaccgccaccaaaacgtggtcacaacagggcgtgggcatcgaggccagctcctgccagacttccgtctttgtgtcgaatacccacatgcttgccagtatgttggccaagtggacgccacctgttaaataagaaagaaagttcagtaatttaaggggcttaaaaacgaacgcctttcgctcattgtgaactatgcatgaacactttcggcaactttaatttagtgcgtagcgctgcatcgtttacaagctgttttttttttttgcattgcattgaaaacacaccagagatgtaaagcttatcgcccacaacgacgccggcatgctgactgcgattctcctgcagactaggcatataggtccatacattcttggcgatatcgtagcgctccacgttggagatcatgcgcagggcttcttcgttatcatcgtccagaatgccgcccaccgcatacagatgctgagtgcccactgcgttcaacgagaaacggcagcgatcctgctgaatgggtgctatggtcatccatgtattccttagcggacagtagcagaagccaaagggatggatgtactccttcaaaaagacatcgtacgctccgcccacgatgaacagtttgttgttcagtacggccgtgccaaagttgcctggaatgcaatggaacatgtatattgtctgtacaatgatataatacgaatgtatcctaattcgaatccgaacacttacactgatcgatgtgcggaatggcggtcaactcataccaattcattttctttggcgaaaagcacattattacattggtcaggccgttccactcgaagcccccgatcttcagcagacacagctccatgccccgcatgtttgttggtccctgtggcagtgactgatccttcagggacaccactccgttgagtaggtgccccatgtgctcctgttttattcggttgtagtagctggtaggcagtggcagctgttttcccttatccagcgagcagttcatgttcctcagttcgtccacggacttatagctaatgtgttgccatttgatcagcctcagcagatcccccaaagcgctctcattcagctgttgttcgatcgcaaagctgcataccagacgcaccagatcctgctcggccacgtcaatgggatagttgctgctgaggatgaagcgcagctggtccaccttcatttctttaaagtccgatgtggtcgcgaactcctcaaagtgagcgcacatatagcggtaggcccgttcggataagtccataattccatagatatcggccattcccgcaatggccaggcagttttccatctcgatctttgcgcccagaaagatcgtgcatcggtcaatcacctcgcgcacctggacgtgcgtggctgccgccaggatctcctcgatgttatcgtagttcagttccagcatcgatgtgtatatgtagtcaatgatcgagcccatggccctggctttaataccgtagagatttatctcgtccttacgcgactcaatcatggcacagtcggcgaacatggcgcaaaagtagtcactgctggctgccaggacgacgcggtgagcctgcaaagttgggattacgtatttcgttcgattacttggggaaaaatgttactataagtgtaataagtgtaacgaaaaacgctgatattccccatgttatttttgaaaacatttgaaatcagatttctgaaaatctgtatcataaaacatttctatgaattttctggatttatgtatgtatctgaatatatgagtctgattccgggaatccctaaatattcataggtagcgcgatgaaaatgcgtcatcggccgaaacacatcaatttgtgtcgcgaatttgttttcgtatttgtattattagcaagagaaagtaaagatgagcttttttgctggccacgattatcgattcgcctaccacttgccactctaaccctataactagtcaccttatgctttcgtggtttccgatatataattaacacgagctcgcaaaatggccaaatggccaactggccaactagccaaactgccaaaccgccgagtttaggatgcgagcaatccggtttagtgcgatttctatttgtcctatgcgcaggccattgaaggtattgtcgtaactaacctagcctaatcacaaccaagttgctctgaaagataatctatgcatacttgctatgcgcactctgggagccaaacttgtgcaacccaacttcatccgccttcgccgatgtgccgtgtccatgaggctagacgtaaccgctcgtagctcagctgatcccacagatgtggcacgatctctgaagcagatccacagatggggctgttccatgtagctattgctcggatctataatggtgtgggtggggtcctaccttgaatcggtgctcctcgacgatcagagtgacgtccgtgagtttctcctcgttgcgcagcttgttgaggccccgcagaagggtctcctcctcgggggacacgggattcacaggaattttggccgcagccgacgttgctgtcgctgccggcgtcactgctggcgctggcgtcgctgccatgctgttcgctgtactctctcggaacggaccaaagattagagcgggctattaacctatatatatgttaacctatgtggtcccaaggttggggaatccgtctgataagaaattcttgagatgaccgagcttctggtgcgcgagtgcgagtgcgagcgagagggcagcacgttctgtttacactcgcggccagctgtctacaaaccgttatttggcgaactatgaaccgttctacgacaaatatacgcacgaaattagctaaattattgctaaacactggcagagaaaaaagtttcgcgtgcgatttctttgcttgttgctacctctttgcttcttttccctcttgcgactttttacttttcgcgtttttgacgtttcttctcttgacgtttgaactgccaagtcggctagcaccgctagtgatgcgcatttagctatcgattgcggagcgcgatcgtttaaaattatattttcaaatttcatatatatacccgtattcctgggtgcttttaattgggagacgggtgagtatgcaatttaaaaggtttttataagagaatgctagcttttgaagtcaaaagctcgcgaatttcccctttaacattgatatggtagcatttaaaaatgaaattgttaaatttgcaccaaaataagtctatgttagttacttagtttagcttagtaagatagcttacgttaactttaggcagaaatattaatactaaaagaataattaattaatttctttaaaaaagtcaatcttatcagagacattgaagtatttcacgttaggcagttgtttcttgttagaaaatgtttttcggatccgcaaataattttgatacgagaaaagatatctaattaagtattatatattatataaatatatatttaaattaatacactatgatattagtgtgggtgagttcaaatacactcttaaaaatacgcgttccattcttggaccaacatttattcagcgtgctgtatctattcactgcaaatatttcagaataaagtgcaggctagcaggtaaaaaaattgtatttaattttttttctcacaatatctatagtctccagtgttaactaatggccaaagtttcgtccagtggtgatatcgcagcataagccgataagctgctgcaaagtatcgacatacgtccaggcatgaaaacatcgatagcctgcgtggcatcggccgtattccacctctactcgactggtctggtcactcgaaaatcacatcggacgaaatcgagtggaaagcggagcaagtaaaacaagaagtagagtaaaatacacaactaattaattgtaatttggccgaaagt

SEQ ID NO: 2453 - DNA, 2181 bp, DROSOPHILA
aagcaaagaggtagcaacaagcaaagaaatcgcacgcgaaacttttttctctgccagtgtttagcaataatttagctaatttcgtgcgtatatttgtcgtagaacggttcatagttcgccaaataacggtttgtagacagctggccgcgagtgtaaacagaacgtgctgccctctcgctcgcactcgcactcgcgcaccagaagctcggtcatctcaagaatttcttatcagacggattccccaaccttgggaccacataggttaacatatatataggttaatagcccgctctaatctttggtccgttccgagagagtacagcgaacagcatggcagcgacgccagcgccagcagtgacgccggcagcgacagcaacgtcggctgcggccaaaattcctgtgaatcccgtgtcccccgaggaggagacccttctgcggggcctcaacaagctgcgcaacgaggagaaactcacggacgtcactctgatcgtcgaggagcaccgattcaaggctcaccgcgtcgtcctggcagccagcagtgactacttttgcgccatgttcgccgactgtgccatgattgagtcgcgtaaggacgagataaatctctacggtattaaagccagggccatgggctcgatcattgactacatatacacatcgatgctggaactgaactacgataacatcgaggagatcctggcggcagccacgcacgtccaggtgcgcgaggtgattgaccgatgcacgatctttctgggcgcaaagatcgagatggaaaactgcctggccattgcgggaatggccgatatctatggaattatggacttatccgaacgggcctaccgctatatgtgcgctcactttgaggagttcgcgaccacatcggactttaaagaaatgaaggtggaccagctgcgcttcatcctcagcagcaactatcccattgacgtggccgagcaggatctggtgcgtctggtatgcagctttgcgatcgaacaacagctgaatgagagcgctttgggggatctgctgaggctgatcaaatggcaacacattagctataagtccgtggacgaactgaggaacatgaactgctcgctggataagggaaaacagctgccactgcctaccagctactacaaccgaataaaacaggagcacatggggcacctactcaacggagtggtgtccctgaaggatcagtcactgccacagggaccaacaaacatgcggggcatggagctgtgtctgctgaagatcgggggcttcgagtggaacggcctgaccaatgtaataatgtgcttttcgccaaagaaaatgaattggtatgagttgaccgccattccgcacatcgatcagtgcaactttggcacggccgtactgaacaacaaactgttcatcgtgggcggagcgtacgatgtctttttgaaggagtacatccatccctttggcttctgctactgtccgctaaggaatacatggatgaccatagcacccattcagcaggatcgctgccgtttctcgttgaacgcagtgggcactcagcatctgtatgcggtgggcggcattctggacgatgataacgaagaagccctgcgcatgatctccaacgtggagcgctacgatatcgccaagaatgtatggacctatatgcctagtctgcaggagaatcgcagtcagcatgccggcgtcgttgtgggcgataagctttacatctctggtggcgtccacttggccaacatactggcaagcatgtgggtattcgacacaaagacggaagtctggcaggagctggcctcgatgcccacgccctgttgtgaccacgttttggtggcggtggataatcgcatctatgcctgcggcggatggcacgagagtttgacggaatggcgggttctggtggagcacatatatgcctatgatattgagactaacacgtggagcgtggagaccaagataccggcccccaagttctacaccggcgtgaccgcgatgggcagaacaatattctttgtgggcggactggactccacggagtcgattgatcgggccagtgcggaaacaatggcctacgacttggataccaaggaatggtggcacgaaaaggactcgtgggactcgcccaacgatgtgtgggaatcaacctgcgtggccatctatgtgcccaattgtgatgcctaa

SEQ ID NO: 2454 - protein, 616 aa, DROSOPHILA
MAATPAPAVTPAATATSAAAKIPVNPVSPEEETLLRGLNKLRNEEKLTDVTLIVEEHRFKAHRVVLAASSDYFCAMFADCAMIESRKDEINLYGIKARAMGSIIDYIYTSMLELNYDNIEEILAAATHVQVREVIDRCTIFLGAKIEMENCLAIAGMADIYGIMDLSERAYRYMCAHFEEFATTSDFKEMKVDQLRFILSSNYPIDVAEQDLVRLVCSFAIEQQLNESALGDLLRLIKWQHISYKSVDELRNMNCSLDKGKQLPLPTSYYNRIKQEHMGHLLNGVVSLKDQSLPQGPTNMRGMELCLLKIGGFEWNGLTNVIMCFSPKKMNWYELTAIPHIDQCNFGTAVLNNKLFIVGGAYDVFLKEYIHPFGFCYCPLRNTWMTIAPIQQDRCRFSLNAVGTQHLYAVGGILDDDNEEALRMISNVERYDIAKNVWTYMPSLQENRSQHAGVVVGDKLYISGGVHLANILASMWVFDTKTEVWQELASMPTPCCDHVLVAVDNRIYACGGWHESLTEWRVLVEHIYAYDIETNTWSVETKIPAPKFYTGVTAMGRTIFFVGGLDSTESIDRASAETMAYDLDTKEWWHEKDSWDSPNDVWESTCVAIYVPNCDA

SEQ ID NO: 2455 - DNA, 4692 bp, DROSOPHILA
tccaatattattgactattgaattggcttgaataatgggtttataattaatatacaaacgtacagcccagttacaattatagtatttcctgcagtgagtgatgaacccggcatcccaacccatggccacctcggaaccgctttgagttggcttttttccagttcagtcccgctccttttcattcaaaaaaagtacaaacaaaacccgagggggagcacaaaagtaaaaagcattcgacaggctattgatgctgattttgtaaagattccgatgccaatgccgatgccgttgtcgatgccaatgaaaatgagaatgagaatggagctggccatgggaatgggtatgggaatatgggtggccaagggtattgtggggaatgccccgagttcgagcctgagcccctgcgggttttggttgccgctttgttgtgccgtccggctggacgtacaacaaattacaaaatgttgttgaaaggcgattttaaagccccggccacttggcaccacccacccactctattcagaggccaaagccgaactcggtaaacagagattacaaatgggccaagtgtgggtggagtaggaacaactagaactacacaactacaatgggcattgttggccgctcacgctaataccggattctcttttacattttgcagatttaagaattcttaaaaggataccagcagaaggacgaccagcagcagcagaaggaccagtaggaggagcagaaggcacccacaagaaccaactttccactcgaagcgaattaaaagaaaagaactcagccaaactggaggcggagggcaaaaaacggcaaaatcaatagtgccgaagaagtgtggccaaagtgctgagtaatgtggagtaatggaaacctttttgctggcggcggcaacatgatgtgaaacatggcaatcgaatcagccaaagccatttagggtcatcaattgccagggtagtggaaaatcggcagcaggagccccgaacgaagccatatgcatcgcagcatggatcgcagaaggagcagaaccccgaggactctgccaggtgagttgtcattcccaggtagcaggtgccacactccaaaatagacggtcaatacaaaggaaacccacagattagctacgtacatatgtatatatgtatatgatcttagaccccagctttaatgtggctatgtgatttataagtgctacatttaaattcgttttcctcatttctcctttagtctgctggattctgctgtgcctggtggcctggactgttgcagatgactggtctctaagttgcgcctccaactgcacctgcaagtggaccaatggcaagaagtcggccatctgcagctccctgcagctgaccaccattccgaacaccctgagcacagagctgcaggtgctggtgctcaatgacaaccacatcccgtacctcaaccgggaggagttctccactctgggcctgttgaacttgcagcgaatttacctcaagaagtccgaggtgcagtacatacacaaggagtcgttccgcaatctgaagatactggtggagatcgacctgtcggacaataagctggagatgctcgacaaggacaccttcatggggaacgatcgcctgaggatactctatttgaatggaaatcccctcaagcgcctagcggcttatcagtttcctattctgccccatctgcgcaccttggacatgcacgactgcctcatctcctacattgatcccatgtccctggccaatcttaatctgctggagttcctcaacctaaagaacaacctgctggagagcctgagcgagtacgtgttccagcacatggccaatctgaagacgctctccctggaggagaatccctggcagtgcaactgcaaactgcgaaagttccggggctggtatgtgaacagccgcctgagctccgtgagtctggtatgcaagggccctccggcccagaaggatcgcacatgggatagcgtggacgacgagctcttcggctgtccgccgcgcgttgagatcttcaacaatgaagaggtgcagaacatcgacatcggaagtaataccacctttagctgcctggtgtacggggatcccctgccggaggtggcttgggaactgaatggaaagatactggacaacgacaacgtgctcttcgaatcggagagcatcgcctcggataagctgtggagtaatctaaccgttttcaacgtgaccagcttggatgctggaacctacgcctgcacgggctctaattccatcggcagtatgacgcagaacatcagtatctacctcagcgagatcgttcagcatgtgctggagaaaactccggagaccttctggtactttggcctcatcatgggcatcttcggaaccgtctttctgctgatctccatctcgtttgtggtctgtctctgcaaacgcactacccgccagcaccgtcatgccaacaaggccggcgtgaagtcgagtgttagcttcaatgatcaggaaaagaaacttctcgactcaagcgtcaccacgaccaccaatgatcgcggtgacagctatggcatcgacaaccagcccacttccatcggtatgaacaagggggactcggccggaatgggcttcaaccaaatagagatccatgcggtggagagtcatcggcatggaagcatgttggtgcagcagcagccgcaacagcaacaggttgcaggtggtggtggaatgcggcaacagctgatgcaggtcaaagattccacctgcggcatgatgagtgtgcccacctcaatggcaggccatgcccattcgcatcctgcccagatctctgaggagttcccgctgaacgtgggcgtctttccaccgccaccagagttttgttcgaacatagtcccgaatccagcgtttgggggcaacattttcatccgggtatccgtcacacaggacatgctggatggtgcggacctgaacatgtatccagatctgctgaacattccgaagaggatgcaggacgtacaggagagtggtgctggtgcagttgccgtgcccgagggtcagtttgccactctgccgagacacacagcccggagaggtattctcaagaaggacacctccttgcagcaacagcagcagcagcaccagcagcagcatcaacatcaacagcagcagcagcaacagcagatacagcagcagcagcaccagcagctgcaacagcaacaccagccatccggactctacacacatgatgaaatcgtgacctacaacctggaggccagtggctacgacccccaccagtcggggtaccacagcaatgccatggagctgcctcctccgccgccgccgcccgccgtaacagcggtggtgcagtgtcatcacccgagtcccaacaactgcgccagctgcatcaacaatgcgccgccaccgccctccgcctgccaatcgccgcccgtcgaggtgacgcccatgaggccgctggacagctccgcctaccccaagtacgacaacatgggtcggcggatcaccgcaagcggaggactaggtggatccaatctttcgctgcacgacgaggagcgctacgaaaatgagacgctctttggccaggcggagagtcagaccaagggaatgccggagcagtcacaggatcttcaccagccgcaggaggtgactcaaggccaggacaagggcggcggtcctggcgagttcgtgtcgctctagtattatggtacccaggtgtaaataggtcaatagattcgtgtccccagagtccccgggaaacccttggcaatcgtttggttcatatcagtttgagaaacgagtgctctaaatgaacatatgtatatgtagcgacccacacaatctattgactgcatcacattcacatctgaagaacatagaacgaacaagaaatgcggacaggatcgatagggttttcatttttggggactaaactagcccattaaatgaaaatccatatgagactgtcgtgttacatcccaatcaaaattatagatttcgaaaatgttgagttaacagcgaggcgagcaaagacaacatttattttccattcggattgcactctcagactagataccgttacagaatatatttctaattcatactccattagagtcccaatcctagctagcatttggtagttgtcccctcgaagtcagcacctttatagaggtcgacagcggtgtattctataaggtatagcgaccaaaactgatcttcataaggtgtatagtacgattaatcgcaaatgtattggacccatagatggtcgagtcttagacatattgcttctggggtgctagagttttagagacgagtcactactgaataggattagattggtataggatggtgtgagacgaggaactcatatctctaggcatgcatatatataatatatatatgaaacgttagccagatctattacgccccatataatcgcccttataatcctcgatgtgcattggatatataaatactttatctagtttttagcccctcaccccgtaaaatagttcctttcttgtacatatgtaaatgtattcctattgcttaaggacttttaaatcaaaataattttatgctcactacccgaaaagtatcgaaaagtatcgaagagtatacatatatcacagagtcgtgccaaatgtttttaatgtctgttttaaacctgttagcctcatgcgattgtttagacgtg

SEQ ID NO: 2456 - DNA, 2511 bp, DROSOPHILA
atgcatcgcagcatggatcgcagaaggagcagaaccccgaggactctgccagtctgctggattctgctgtgcctggtggcctggactgttgcagatgactggtctctaagttgcgcctccaactgcacctgcaagtggaccaatggcaagaagtcggccatctgcagctccctgcagctgaccaccattccgaacaccctgagcacagagctgcaggtgctggtgctcaatgacaaccacatcccgtacctcaaccgggaggagttctccactctgggcctgttgaacttgcagcgaatttacctcaagaagtccgaggtgcagtacatacacaaggagtcgttccgcaatctgaagatactggtggagatcgacctgtcggacaataagctggagatgctcgacaaggacaccttcatggggaacgatcgcctgaggatactctatttgaatggaaatcccctcaagcgcctagcggcttatcagtttcctattctgccccatctgcgcaccttggacatgcacgactgcctcatctcctacattgatcccatgtccctggccaatcttaatctgctggagttcctcaacctaaagaacaacctgctggagagcctgagcgagtacgtgttccagcacatggccaatctgaagacgctctccctggaggagaatccctggcagtgcaactgcaaactgcgaaagttccggggctggtatgtgaacagccgcctgagctccgtgagtctggtatgcaagggccctccggcccagaaggatcgcacatgggatagcgtggacgacgagctcttcggctgtccgccgcgcgttgagatcttcaacaatgaagaggtgcagaacatcgacatcggaagtaataccacctttagctgcctggtgtacggggatcccctgccggaggtggcttgggaactgaatggaaagatactggacaacgacaacgtgctcttcgaatcggagagcatcgcctcggataagctgtggagtaatctaaccgttttcaacgtgaccagcttggatgctggaacctacgcctgcacgggctctaattccatcggcagtatgacgcagaacatcagtatctacctcagcgagatcgttcagcatgtgctggagaaaactccggagaccttctggtactttggcctcatcatgggcatcttcggaaccgtctttctgctgatctccatctcgtttgtggtctgtctctgcaaacgcactacccgccagcaccgtcatgccaacaaggccggcgtgaagtcgagtgttagcttcaatgatcaggaaaagaaacttctcgactcaagcgtcaccacgaccaccaatgatcgcggtgacagctatggcatcgacaaccagcccacttccatcggtatgaacaagggggactcggccggaatgggcttcaaccaaatagagatccatgcggtggagagtcatcggcatggaagcatgttggtgcagcagcagccgcaacagcaacaggttgcaggtggtggtggaatgcggcaacagctgatgcaggtcaaagattccacctgcggcatgatgagtgtgcccacctcaatggcaggccatgcccattcgcatcctgcccagatctctgaggagttcccgctgaacgtgggcgtctttccaccgccaccagagttttgttcgaacatagtcccgaatccagcgtttgggggcaacattttcatccgggtatccgtcacacaggacatgctggatggtgcggacctgaacatgtatccagatctgctgaacattccgaagaggatgcaggacgtacaggagagtggtgctggtgcagttgccgtgcccgagggtcagtttgccactctgccgagacacacagcccggagaggtattctcaagaaggacacctccttgcagcaacagcagcagcagcaccagcagcagcatcaacatcaacagcagcagcagcaacagcagatacagcagcagcagcaccagcagctgcaacagcaacaccagccatccggactctacacacatgatgaaatcgtgacctacaacctggaggccagtggctacgacccccaccagtcggggtaccacagcaatgccatggagctgcctcctccgccgccgccgcccgccgtaacagcggtggtgcagtgtcatcacccgagtcccaacaactgcgccagctgcatcaacaatgcgccgccaccgccctccgcctgccaatcgccgcccgtcgaggtgacgcccatgaggccgctggacagctccgcctaccccaagtacgacaacatgggtcggcggatcaccgcaagcggaggactaggtggatccaatctttcgctgcacgacgaggagcgctacgaaaatgagacgctctttggccaggcggagagtcagaccaagggaatgccggagcagtcacaggatcttcaccagccgcaggaggtgactcaaggccaggacaagggcggcggtcctggcgagttcgtgtcgctctag

SEQ ID NO: 2457 - protein, 836 aa, DROSOPHILA
MHRSMDRRRSRTPRTLPVCWILLCLVAWTVADDWSLSCASNCTCKWTNGKKSAICSSLQLTTIPNTLSTELQVLVLNDNHIPYLNREEFSTLGLLNLQRIYLKKSEVQYIHKESFRNLKILVEIDLSDNKLEMLDKDTFMGNDRLRILYLNGNPLKRLAAYQFPILPHLRTLDMHDCLISYIDPMSLANLNLLEFLNLKNNLLESLSEYVFQHMANLKTLSLEENPWQCNCKLRKFRGWYVNSRLSSVSLVCKGPPAQKDRTWDSVDDELFGCPPRVEIFNNEEVQNIDIGSNTTFSCLVYGDPLPEVAWELNGKILDNDNVLFESESIASDKLWSNLTVFNVTSLDAGTYACTGSNSIGSMTQNISIYLSEIVQHVLEKTPETFWYFGLIMGIFGTVFLLISISFVVCLCKRTTRQHRHANKAGVKSSVSFNDQEKKLLDSSVTTTTNDRGDSYGIDNQPTSIGMNKGDSAGMGFNQIEIHAVESHRHGSMLVQQQPQQQQVAGGGGMRQQLMQVKDSTCGMMSVPTSMAGHAHSHPAQISEEFPLNVGVFPPPPEFCSNIVPNPAFGGNIFIRVSVTQDMLDGADLNMYPDLLNIPKRMQDVQESGAGAVAVPEGQFATLPRHTARRGILKKDTSLQQQQQQHQQQHQHQQQQQQQQIQQQQHQQLQQQHQPSGLYTHDEIVTYNLEASGYDPHQSGYHSNAMELPPPPPPPAVTAVVQCHHPSPNNCASCINNAPPPPSACQSPPVEVTPMRPLDSSAYPKYDNMGRRITASGGLGGSNLSLHDEERYENETLFGQAESQTKGMPEQSQDLHQPQEVTQGQDKGGGPGEFVSL

SEQ ID NO: 2458 - DNA, 3051 bp, DROSOPHILA
cagcagtggcaaggcatcgccgtacgtctcctctgccggcagtagcagcagtggagcgggtgcagctcgtcattataccaagacggaatcgatataatctggagctgccgtgaccaagcccgcatatttgtatttgtgacaggacggccgccgaaaggttgacctccatcagactagaagccacgcattgctcgtccttcattctggaacatggtccacacatggccgtctgtcgaatttgtttttttgtcagcaggaagcgcgaaaaacgcgcgctcacgaactgcacccaaattttcatttgttgtcccagtcccactgtgcatccggcccggagtccgggcacatggactgcgagagagggcgccaggtggcgccagagaattgttttttgagccgtgcccagatgcacgctgccattgtaaagtaacgaaaatcttttggaacaccgtcggaatgcggggtgaaaacttttttaaatcgctaaatgtaataatatgtttatgtgtgtgtatctatgtactatatgtgtatgttcttgtacaaaaaaaaaaccgaactaaaatctaacaaaaataaaacgttgacgacggtgcagctcgaagctcgaattacgataaggttttcaccaagtacaactatcactaccactaccccaatccgctccggcctaaacttaagtacgtccttgcacctgtactttcgccgggcaccgctgcgcaggcgcacgaattgtctagtggcccacacttgttttacttaacgttttatatctatgtatgtatgtacgtatatgcacatggccctcgaggaggttttcggatgtgctagatccggcgaattcgtttaattctcagtgtaaactaccatgtatgtaaacaatacggaaatcaataaatacttgtgaccctctggtttgatacgaattgcgttttcatgtggaagtagtttaggaacgagccaagaaagctaaatagctaagtagaccgtcgtttccattatgtttaaacatctcatagtgatcacgttttattgatctaattaccatttaacaaaccgacttcggattacttcttggctggagcctgtggcggaactacctcggcggggggattagcgttgcggaagttggggaactgttcccaaggcgccgacaagtcaaacttcctgaactcctgggccaactccaagggctcgcagacgactcgcttcttctcatcatcgtagcgcagctctacgtagccggacagcgggaagtcgcggcgctggggatgtccctcaaaaccgtaatcggtcaggatgcggcgcaagtcgggatggttggcaaagaacacgccgtacatgtcccagatctcacgttcgtaccagttggccgccttatgcacctcgcaggcggagtccagaggagtcagctcatcggtgtaggtcttaacgcggatgcgcgaattgtagcgcagcgagagcaaattgtagaccacctcgaatcggttcttgcgacagggcacatccacgccggcaatgtcaaccaggttggtaaactgcgcctgatgatgatccttaaggaactgcagcacgggcaccacgccctctggcgcaataagcacctccagctcatcgccggcggtcagctgcaccttctgcacgtacttgggcaggcactcggccacatagcgcccgaaatcggagagatgcgagcgagcgactgcgtccggctggcggacagtggctgtgggtggaatgtcttacatgtaattgacaccgcgataaagtcgacttttacctacgcttatccgccttcttaggctccactggcgttgtactggccatccgaagagcagtggatccagcagcgggcaccactgattgttgaagggttagaatagatcagttgaagctctagaggcaaggcatttaccaaccatgtttggccgacagagcggcgactgcggcacgggcacccagattcctgattaaggccgccattctacaaactgttcaatataaattcaacaatttgctccgtttttgacaatttatgtaatgctaaaatgtcaatatagttgttggagcctagggttgtcagtgcgccaaattaatctactcgacagccctacttcggtattttgacaatttcggtacaacacaaataccgcacatacattattgtatttcgtgtacgttaacaccgaattattcttcattaaaaacctcaacatttttttggaatatttgcttaaatgatttatataaaaaataaatataccctactacttgatttattatttaattaaaaataccaacacgttccttgaagtacagcagatggaaaacatttacaattattcttcattaccaaccacaaaacttttctagaatatttggttaaatgatttttaaaaaaaagaaatgtaccctactacttcatttattatttcattaaaaataccaacacgttccttgaagtacatctcatggaaaacataccgaaataccgagatcttaggtgcattcgactaccctggctgaaaactgtgacaacgcgttgcgtttggaattgcgagaattgaaaacttcttggaaatcaattggaaatcaaaacacaacaagatggtaagtgaaacgcgtcctcccaaatccccgggataagtgaaatttaaatctacaatcgtcgccgtttgcagaatcatcttaagtggatgggccactcatccacgataatggacatccagcgctcgctgcgtaatgataatcagcactgcgaggtggtgctggcctccagggacggcgttcgagtgcgcgcccatctattcgtgctaagcacttgcagcgaactgatgcgcaacctcctggtggacgttccgcgcggccaggaggcaaccataatgctgcccgacatccgcggagatttgctggagtgcatgctgtccttcatttacatgggcgagactagcctgccctccgcgtcgctccccgagttcctggaggccattaacctcctcggcatcaaatctgccatcagctttgagtgcaatccatcggctagtccaccca

SEQ ID NO: 2459 - DNA, 933 bp, DROSOPHILA
cattttagcattacataaattgtcaaaaacggagcaaattgttgaatttatattgaacagtttgtagaatggcggccttaatcaggaatctgggtgcccgtgccgcagtcgccgctctgtcggccaaacatgtggtgcccgctgctggatccactgctcttcggatggccagtacaacgccagtggagcctaagaaggcggataagcccactgtccgccagccggacgcagtcgctcgctcgcatctctccgatttcgggcgctatgtggccgagtgcctgcccaagtacgtgcagaaggtgcagctgaccgccggcgatgagctggaggtgcttattgcgccagagggcgtggtgcccgtgctgcagttccttaaggatcatcatcaggcgcagtttaccaacctggttgacattgccggcgtggatgtgccctgtcgcaagaaccgattcgaggtggtctacaatttgctctcgctgcgctacaattcgcgcatccgcgttaagacctacaccgatgagctgactcctctggactccgcctgcgaggtgcataaggcggccaactggtacgaacgtgagatctgggacatgtacggcgtgttctttgccaaccatcccgacttgcgccgcatcctgaccgattacggttttgagggacatccccagcgccgcgacttcccgctgtccggctacgtagagctgcgctacgatgatgagaagaagcgagtcgtctgcgagcccttggagttggcccaggagttcaggaagtttgacttgtcggcgccttgggaacagttccccaacttccgcaacgctaatccccccgccgaggtagttccgccacaggctccagccaagaagtaatccgaagtcggtttgttaaatggtaattagatcaataaaacgtgatcactatgagatgtttaaacat

SEQ ID NO: 2460 - protein, 265 aa, DROSOPHILA
MAALIRNLGARAAVAALSAKHVVPAAGSTALRMASTTPVEPKKADKPTVRQPDAVARSHLSDFGRYVAECLPKYVQKVQLTAGDELEVLIAPEGVVPVLQFLKDHHQAQFTNLVDIAGVDVPCRKNRFEVVYNLLSLRYNSRIRVKTYTDELTPLDSACEVHKAANWYEREIWDMYGVFFANHPDLRRILTDYGFEGHPQRRDFPLSGYVELRYDDEKKRVVCEPLELAQEFRKFDLSAPWEQFPNFRNANPPAEVVPPQAPAKK

SEQ ID NO: 2461 - DNA, 4585 bp, DROSOPHILA
aacgtcttaacgtcttgccaacttgaataagagctttttattgctgaaccgtccaaaccgaaagcttagtataatcaagcttgcgaatatcggctaatatatacgcaaatccagttaaatggcaaattagtgttaggtgaaatttatctacaagttacatttcgaacacagaactaacgaaatacttatgatctatctatggtaaaatattatacaaatttaaatgttggcaaaacctggacatcttaggcttgttctataaactaatagatactataattatattatattcatatatcttatgaaatgctatacattttataacaagccaattttctcaatgtttaaatatatgggttcaaaagttttcagttcattatcaatgtaaatggtgtgataaaaaacgcaattaggcgataatttcatgataatttcatgagcgttataaaataacacaagaccataattgcagaaaatttttatattttccaattttaaagggagatacatattcatattaacactaaattccaccttcaaatgattctccaaatattcaaacctcagatgtaagatatactcattaaatattttcacatatatttaaatatttattagtttcttctgggatcagctctaccccatccacattccgcagcaaaccgaaaatgtggaaaagcatctgttgcttttccacacactgaaagtgggcaatagttttaaccttggctaaaatgccttctacaagaccgcacttttcccaactctctctctctctagcgatctcagcttgggtttcgctacctctccgagagagagtgggagagagagtaggagagagtgagagcgaggtgttgggcagtacctgtgcgttcaggtatttgaggtgtagccatatgtgtacacacatacatgcatagatgtgagagcataagtggaaatggctcgctttaaagcgctcgatgagaattatttttagtttgttttcgcctcttggtgcgtacagttgcactcacgatccgtccaatccgcttatatttttattttttattatttttttagttcagcttcagttcgattttgttttgatttcagttcgtttttagttcagtttttctttttttttttgtgaacgctgctttccccgccttcgctgttctccatcgcaacgattccgaatcggattttcgtttttctgttggtacgacaagtttgctctttataaagttgtaaagttttttagtctggcccgcccaaccgacgatcaaaaatgttttttgttgatttcgatgtgtgttatgtgtgtgcttgtgtgtatatgtgtgtgtccctaaatagatcgaaagtagtggagtttggcaatcagaggtttatatatcgattgtacagcggcagaaatatcttcgtattttcccattaaacgaactccggttcagcgatccgtaactgtagaacccagaaattttgagagttccaacaacctggccaagtaacgaaaccagcaaataccaatatcgtcgttctctggaatttgtgaataactatcattcctctctctccctctctctctctctgtcacgctctcgatgtctgcatctccctctcgccgattgggagcatcatcaatgggatgccaacgacccatttaaaaaccggaaaaatctatgaaaccggaaaaaaatgactaatcttaacgcaccggtgctttgaattaatagaactagaaattgtttcaaaaacagctaaaatataacaaaaactaaataataatatattgataagattgcaatctcaaaatataaacatttaggatctcatatttacttacgaaaatagttgcatatccagaggcgtgggaattgttattgaaaacaacaaaccttgaagcattacttgattatttaagaactcatatttcatatatgtagctgcagttttgttaactaaacaaacatttttcttgcagcgaatgcagccgagagtactatgctcgtagcacttggagcgctgcttccgcctggttatctcctagttccggaatgtccatctagccaggcgattgggaagtcatgccagtgcagcaagtgcgtcccgtgagcacctacgacaacttgggcgtctctcagtccaggcagctgacggccggaatggctggcgaaccggaaacggaagtcgaagtggagctcaatggcagccacaccagccatagcatagccgctgtgaaggcggctctgaacgatgccaagtccaagttcttcggcatcaacaactatgagtcacccatggccagtaagagtgcagcagtgacgacgattgccaaaccggagccaagatatcaaaatgttccgcaacgcgacgaactgccggcagtggctgctcccgatcctccagcgcaaccagcacagccgacggctccagttagcgatcatagtagggcactgcgctatgcgaccacctacgaacagattccactcagcgacatggaagcaccgcaggcatcgcaggtaattgacgccatctaagcaatcgcaaagtccaaatcaaatgtccaactcttatcccaaaaaaggccgtctacatgagcaccacagtgccgcagaacatgaagggcatgaagatcgccggacgacatacgccaactcgcaacagcctcaggcacagccgcatgatcgttgtcaatcacaaaaaccacgacagtaagtacaccagctgtctagcgaagctatatgatggagtgtgtgggtgtcacacagtcattgttgatttggcaaagaacaaacacatttcgatttcaattactcaaagtttggctatatgtacaggtctccaggccaccaggaatctgaatatatctcgccagcttctggttatgcaattagctgtgggcctgttcatcgtgggtcttgccgtttggatactaatcctagcccccaatgcgtccatattgatcaatccgtatctgagtggattgtcggtaagatgaatgtgtggaatggttggattagtatgtataataagaatgaacttacctctcgctcagctgctattggccagcattgcggggctcatactgctgcgaagggatcacaagatcacggagcacagaccgcagaccaatagttgctacaaggtcctgctggccgagtcgtatgtgttcactggcctggcgttgatcttctgctgcttggccctcgtctgtgcggcaattgagttcgcggagctcatctcatccgcagacggagaatgtggaccaacatcgagctcattgcttagctatcacaattgcacctgcttggcggcaggtgaggtggtggccaactactcctccgaggctccaatggcatttgcagttggtcaggaggaggcgtcacagtaagtttcgaactgcagttatacttaaacattggcattgagaatattctcatttctagaaacgatggttgtgccgagcttcggatcgaatggaagtatctgctcgccttctccatggcgctcaacactttgggcattgttgcaacattcttatacataacgttatttatttgttgccaccgcaagcgagaacacttttacacgtctgtgtagggatatattgtaacttaaattcaacatactacttaaattatttttagcaactgatacaaattacaaataaattattttttatatctaagtaccattaaagtaacacaacgtttaaaaacaaatactgtttgctttcgtgcgatagcatctaaaaaaaaactaaatactaacttattgaaaaataatttgttaattcattcatatttgagcaattaacgtgtttgaataagtttctgctggaaaacataattaatactttgtgtaaatactatatgtttggtatagtttgtgaaaagaattcgacttttttaaaatccactaactccacctggcttccgaaaatccgagttcacccagatggtgtcgttagcttgagcgattccacagatgacggaaccgcggttctcataacgctcgcatcgatgtcccctctccgccaagctatccacatagctctgccgtagtccatactcgtagagcagaacattgggcagcatttgatgatggatgcggctggcatcgatggcggccttgatgcttgcctcctgccacaggatgcgcacgaggaggggagagagggcagagattattttggtaccgccagcggcacccacaaccaagcgaacgttgccagtggcgcgttccgtgacaatcactggacacatggaggacatgggacgggcggcaggagctacaccattcgtgccaggcacgaagggcagatcgaagtagttcttgagctgttcgatggagaaatccgacatggcattgttaaagatgacacctgtgcgcctgccagttcgtccactgccaaaactgcaaaatgaaatgggatatatatatatatataggaatatatataaataagattcttaatatataattactagaaattgatggagcttgtcactgaaactgcatcgtttccatggagcactgaagtgtgcgctgtgccgtgctcatcacgtatttgaattccaggtgaagctccatagaactc

SEQ ID NO: 2462 - DNA, 1630 bp, DROSOPHILA
gtacagttgcactcacgatccgtccaatccgcttatatttttattttttattatttttttagttcagcttcagttcgattttgttttgatttcagttcgtttttagttcagtttttctttttttttttgtgaacgctgctttccccgccttcgctgttctccatcgcaacgattccgaatcggattttcgtttttctgttgcgaatgcagccgagagtactatgctcgtagcacttggagcgctgcttccgcctggttatctcctagttccggaatgtccatctagccaggcgattgggaagtcatgccagtgcagcaagtgcgtcccgtgagcacctacgacaacttgggcgtctctcagtccaggcagctgacggccggaatggctggcgaaccggaaacggaagtcgaagtggagctcaatggcagccacaccagccatagcatagccgctgtgaaggcggctctgaacgatgccaagtccaagttcttcggcatcaacaactatgagtcacccatggccagtaagagtgcagcagtgacgacgattgccaaaccggagccaagatatcaaaatgttccgcaacgcgacgaactgccggcagtggctgctcccgatcctccagcgcaaccagcacagccgacggctccagttagcgatcatagtagggcactgcgctatgcgaccacctacgaacagattccactcagcgacatggaagcaccgcaggcatcgcaggccgtctacatgagcaccacagtgccgcagaacatgaagggcatgaagatcgccggacgacatacgccaactcgcaacagcctcaggcacagccgcatgatcgttgtcaatcacaaaaaccacgacagtaagtacaccagctgtctagcgaagctatatgatggagtgtgtgggtgtcacacagtcattgttgatttggcaaagaacaaacacatttcgatttcaattactcaaagtttggctatatgtacaggtctccaggccaccaggaatctgaatatatctcgccagcttctggttatgcaattagctgtgggcctgttcatcgtgggtcttgccgtttggatactaatcctagcccccaatgcgtccatattgatcaatccgtatctgagtggattgtcgctgctattggccagcattgcggggctcatactgctgcgaagggatcacaagatcacggagcacagaccgcagaccaatagttgctacaaggtcctgctggccgagtcgtatgtgttcactggcctggcgttgatcttctgctgcttggccctcgtctgtgcggcaattgagttcgcggagctcatctcatccgcagacggagaatgtggaccaacatcgagctcattgcttagctatcacaattgcacctgcttggcggcaggtgaggtggtggccaactactcctccgaggctccaatggcatttgcagttggtcaggaggaggcgtcacaaaacgatggttgtgccgagcttcggatcgaatggaagtatctgctcgccttctccatggcgctcaacactttgggcattgttgcaacattcttatacataacgttatttatttgttgccaccgcaagcgagaacacttttacacgtctgtgtag

SEQ ID NO: 2463 - protein, 441 aa, DROSOPHILA
MPVQQVRPVSTYDNLGVSQSRQLTAGMAGEPETEVEVELNGSHTSHSIAAVKAALNDAKSKFFGINNYESPMASKSAAVTTIAKPEPRYQNVPQRDELPAVAAPDPPAQPAQPTAPVSDHSRALRYATTYEQIPLSDMEAPQASQAVYMSTTVPQNMKGMKIAGRHTPTRNSLRHSRMIVVNHKNHDSKYTSCLAKLYDGVCGCHTVIVDLAKNKHISISITQSLAICTGLQATRNLNISRQLLVMQLAVGLFIVGLAVWILILAPNASILINPYLSGLSLLLASIAGLILLRRDHKITEHRPQTNSCYKVLLAESYVFTGLALIFCCLALVCAAIEFAELISSADGECGPTSSSLLSYHNCTCLAAGEVVANYSSEAPMAFAVGQEEASQNDGCAELRIEWKYLLAFSMALNTLGIVATFLYITLFICCHRKREHFYTSV

SEQ ID NO: 2464 - DNA, 3536 bp, DROSOPHILA
ccctcggacatcgtcaatggctacctcatggtgcgcggctataccagcgccgtgggatagtttgttcgatccatatactgcatacatcccaagtactcgctgtgttccgcacctggaggccttgcgttgcaactaccactcataataggcaattagagcgctgctgaccttactcttactggcattgcgtgcgaggctgttgctttcaagtgattcgatgactgtttcctgcctggaacaccgcgttcaaggggagttacatccacaattaccatatatatatatatatgcatacactgcctaaaaggagatgatctctgtaaattagttatagagatttgtcactagtttgaccgcaaaaatagattaggtaattccaaggtgagatgaataccttggcggtttgaaagtgtctaaattaacgaaacggctgccacatagatcctaatgcgaaaagcaaatatttaaacagccgactcgtgcaagtttggagttcgcaatgaacggcccacagattaatatagtgttaagttaaccagctatacaaaattcagcaagaaggcaaagtaaacaaaactgaataatatgattaatgagtttaagatattatattcattttcttatcgggcattttggcgaaaggacgatttataaatgtttcatcaactatattctatactcgcatagtcattattattgtgtattatttgaggacgatttataaatgtttcatgaactatattctacattcgcatggtcataattattgtgtattatttagcagctatcagaagtaccaaaagcaagtttctaaaacttttgtaattactggggcttctccctcgttcgctcaggtcctccattcgtcatctctcccgaaagtgttattcgagctccaatacaaagaaccggactagtggctccgtgattcaacaccatttttccacctcattccattttgtggcagtcgactccggcttattccttacggctttggacgctagccagcttggttgatgggccggctaatactgttcggctgtgtcagcatctgcaggtccgagcggaagctccttggcagccccgagatgtccagctggtgcttgagcaccaccatggtggccagggtttttagagtgggctcaaagtcgagcacatgcagatcgctgtagtcgataagcgccacaccgggcggaacaactccgccagccgctgcggctccgcccgtctcttgagtgggtgaaacagctgccggcgagctggaggagccgctccttggactggtgccgccaaacaggaacatcctagtgcccatcacaatggcgcactgtctccgacgcgccgtcggtgccttgccgttggcccgtatcaggttccacagcttggtgcgcggatcgaaggtgtacagatcgttgaaatgctgatccaacaggccattatagccaccgaagacatatatcagcttgttgtaaacgaacatgctgtggctgcgtcgaccaacgggcaccttaccggccgtgaacggtcgatgccacaccttggtcttcatgtccaggtagacgatctcgtgacagtaggtctcctcctggctgtggtacggactgtgcttatcgccccgcccgccgaagatgtacattcgctcctgttcgtaggccaccgacgcatgaaaatctctgtagctgggcggcacgccaaatgtctgaacatagcgccactccatggtgtccagattaagggaatgcacatcgctgctgaactcgttgatctcatcgacgaatccaccgaagatgtacatactattgccaatgacacaggccgagtgaccatcccgcgctccgggtagacagccagtgacctggggcctcgaccactgcgctgtcttgggatcgaagcagtagagggtattgcagagattctcgtcgttgcgaccgccccaaatgtagatgcgatccttgtaggccaccaccgtgtgtccgtagcgctggaagggcaccagcggatacttgagtggcacacccgcgtcgtccagctgctggggcaccagagtccagcgcattgtgtgtgcattcagggcgtgcacatcgatgggctcattgtagcgataatcgtatccggtgcagtagccaccaaagctgtagatgaagtcgcccacgcccaccgctgcgtgattgacccgctgtggcccaccgtccagatgcaccgtccacagcatgtcttggccaactggataagctgtgcgctgtgggctgcgagccgtgtagcaccagtgtgctgtgcgaggagacggagatctttgctttgggcccaagctgcccgagcagcccaagcagccaaaacacacaaaggaaagcaagtgcgccgcagttgtcgctccttttgggagcgggggcagggtggtgcgggcgcaggtgcgagcaattgaaggccacacaggtataaacactgataccaagcgctagctgcgctccgctctgccagttttgccagatgttgaaacgaaacgaaacggatcgaatttttgaacaacacaagcacacagagttgcgtgcgtgagcggacgcacgaaatagcagggctccactgggtcgtgctgttatcgatatcgatagtatagatttctgattgacaattgcatttaaaaaatgacaaattcgaaaatccaatgtatttgcattaaatatttagctattttagcgaaacagttgcaatggcaatgtgcatttacactagattgatttttaagatgaagctccaaacaatgaattagaatattctaatgtctttggtcaatttacctgaactttttttcactcaatcacaaattctcattgaatattcttagtttttgcaagcttagttgcgatatttatttactgttgtatatatgtgtttttatatacgtcaagtgtttgtgtgtaaattagattgattgtagtacaaaagttataacaaaataaataacaagaaatcatttaatacaatattacgcgaacatacattatatatgatgcaatctatgcacattttggtttacgaatagtggtccccatgtgtctggccacaaaaaaataaagggacgccgcagcgggattggtacgaaaattggaggcaaatcaaatgctacgattgcagggaaggggtgggcgggggggttggggtgtaatggaggaaatggggtattcgaagccccgcctcctatacattcgtgggcgcgtccatgccgcagataaccgacttaaccaccgacgccgccgaaatggcagcgaagttttgccacttcctggtggacgtgccgtccttgtagtcagcgatgcccttcaccagtataaagctctctctgcaattgccaatgatgctgtccagcacgctgctcatctccacatcggtggccagtaggccgtacttcctggcgaactgggtgcgcagctcgtcgctcctcaccagatcccttccggatccaatgggacccagatggagtcgcaaccgattgacaccgtccacctcgtcggcggcaatgggatgggccacctcgatca

SEQ ID NO: 2465 - DNA, 1536 bp, DROSOPHILA
tgtgcttgtgttgttcaaaaattcgatccgtttcgtttcgtttcaacatctggcaaaactggcagagcggagcgcagctagcgcttggtatcagtgtttatacctgtgtggccttcaattgctcgcacctgcgcccgcaccaccctgcccccgctcccaaaaggagcgacaactgcggcgcacttgctttcctttgtgtgttttggctgcttgggctgctcgggcagcttgggcccaaagcaaagatctccgtctcctcgcacagcacactggtgctacacggctcgcagcccacagcgcacagcttatccagttggccaagacatgctgtggacggtgcatctggacggtgggccacagcgggtcaatcacgcagcggtgggcgtgggcgacttcatctacagctttggtggctactgcaccggatacgattatcgctacaatgagcccatcgatgtgcacgccctgaatgcacacacaatgcgctggactctggtgccccagcagctggacgacgcgggtgtgccactcaagtatccgctggtgcccttccagcgctacggacacacggtggtggcctacaaggatcgcatctacatttggggcggtcgcaacgacgagaatctctgcaataccctctactgcttcgatcccaagacagcgcagtggtcgaggccccaggtcactggctgtctacccggagcgcgggatggtcactcggcctgtgtcattggcaatagtatgtacatcttcggtggattcgtcgatgagatcaacgagttcagcagcgatgtgcattcccttaatctggacaccatggagtggcgctatgttcagacatttggcgtgccgcccagctacagagattttcatgcgtcggtggcctacgaacaggagcgaatgtacatcttcggcgggcggggcgataagcacagtccgtaccacagccaggaggagacctactgtcacgagatcgtctacctggacatgaagaccaaggtgtggcatcgaccgttcacggccggtaaggtgcccgttggtcgacgcagccacagcatgttcgtttacaacaagctgatatatgtcttcggtggctataatggcctgttggatcagcatttcaacgatctgtacaccttcgatccgcgcaccaagctgtggaacctgatacgggccaacggcaaggcaccgacggcgcgtcggagacagtgcgccattgtgatgggcactaggatgttcctgtttggcggcaccagtccaaggagcggctcctccagctcgccggcagctgtttcacccactcaagagacgggcggagccgcagcggctggcggagttgttccgcccggtgtggcgcttatcgactacagcgatctgcatgtgctcgactttgagcccactctaaaaaccctggccaccatggtggtgctcaagcaccagctggacatctcggggctgccaaggagcttccgctcggacctgcagatgctgacacagccgaacagtattagccggcccatcaaccaagctggctag

SEQ ID NO: 2466 - protein, 403 aa, DROSOPHILA
MLWTVHLDGGPQRVNHAAVGVGDFIYSFGGYCTGYDYRYNEPIDVHALNAHTMRWTLVPQQLDDAGVPLKYPLVPFQRYGHTVVAYKDRIYIWGGRNDENLCNTLYCFDPKTAQWSRPQVTGCLPGARDGHSACVIGNSMYIFGGFVDEINEFSSDVHSLNLDTMEWRYVQTFGVPPSYRDFHASVAYEQERMYIFGGRGDKHSPYHSQEETYCHEIVYLDMKTKVWHRPFTAGKVPVGRRSHSMFVYNKLIYVFGGYNGLLDQHFNDLYTFDPRTKLWNLIRANGKAPTARRRQCAIVMGTRMFLFGGTSPRSGSSSSPAAVSPTQETGGAAAAGGVVPPGVALIDYSDLHVLDFEPTLKTLATMVVLKHQLDISGLPRSFRSDLQMLTQPNSISRPINQAG

SEQ ID NO: 2467 - DNA, 4545 bp, DROSOPHILA
acgtgtcttccaggacacctttcgccgactgagcacggtgccggatgtgctgtatccttcactgcacacccagtactttgaccagatgcagaaaaagctagaacagcggtctgctttactggacgagccagtgcatccgcgagtaccactcaacgcctttatctatctggacatcaatcgctacgagcgcaagaagaaccacgcccttgccttacattccctgcgccttctgggcgacatgctgcccgccacggacttcaagcgctgtcgcctgatcatcgccgggggttacgacaccagatgcatggaaaatgtggagcacttcgcggagctggagcaccttacggaggagttgaaacttcaggatcacgttgtgctgctacgctcgcctaccgacgaggagaaatgtcgcctgctctttgccgctcactgtctgctgtatacgccagagaacgagcacttcggcattgtgccgctggagggcatgtactgctcgaagccagtcgtggcattaaacagcggcggacccactgaaacggtggtgagcacttccactggctttctgtgcgaaaagaccgagaagagctttggtggagcaatgctccagcttttccgggacgagcagctgcgtgtaaagatgggagaccagggtcacaaacgggtgcagcaaaagttctctttccaagcattcgcagatcggctgaacggcattattagagatcttgttcctatctccagggagtcgagtgctaagaaaaataaataaaattccaattaagaaagcagatctattgtaaactcttatggaattatttttagctgcttatgcgaaatattagtcatcaaatgattcatcaatgtgaagattgcatatatctgaagcccccaaaaaccgattgcagcactgtttatgtactttattattaaattccattcttcagggcgaataatattagcttgtgggactggggtgattcggattggactgagatcgggctggctactgttcgcgcatatacagatacagatagccgaggtccttgggtgggttctgcgacttggccaccttgctatcgttgaagatcacccattcgcccttcttgcgaatgtgacaaacgtagtgtcccacctgggcggaggtgcccatgtgtgagatgaatgccaccaggcgatacttgccgcggccatcgcggtagttggtcttatttggcgtcgaggaggccgctgcagctgatgaattcgcagcgggggcagcatcctcaacaccaattgaatcggcgtgcgagaagatccagtcggtggcgcgctccacattgccatcggtcgctttcagagcagccaccgcctgtctttcgtcgaagcccatgctcatgagcatggccaggctctcgggattggccacaaactggttggcggcgcagtctccaatgctgttgttcggcaccacaaagggctccgagatatcctcgtcggcgatgtgctccatcaaccagttggaggctgcctcaagtccgctgtttttggtgtgatagcaagcacgcttgcaggcttccggtggaaaacccatggtcagcaactcggacatgaccgcctcgtcaaatgcaaacttcacctcctctgtggcgggctcgggaagagcctcctcaccaggctgcaagccaccagcggagcgccagttacttagatccagttcatcgggcatgtctacggaaacgtccagtttcttgggcacccagtcgtcgcccagcgtgaactttcccacgtgaatcatcaggcagtcgggcatggtggccaatcgcgtaattttcctggcattcgtcttggacccgatggcagtggagtagaattgctcgatcagctccgggccgaaaaacctttccaggcatgcctgtagaggcaccttgtgcctcacgatgtcgcgatccggaagccgttgtccggtctcgcgggccgccttcttacgctcctggaactcccgcacctcatccagattggtggccttgtccaacggaacaggcagacggaagctgtattcctcgcgggtattgtacttcaccttgtggctggccagacactcaacgcgatcctccagcaggaactttagagcatctgcgggatttgtttggttccgcgaattcctgtccagcagggtgagcaaatgcagatagaaatcgttggcatcttgctgctgtttggtgctgaaatctgggtgattcttgcccacaatgttcttaaacatggccggcgatattccggtgctgtgatcggtgtccaaagtgttctcggcaatactgctgtactttcccgactgcagaccagttcccagcttggccatttgaatattgaagtcgttggccgggtcgctgggaaactctttgaaatagcgttccgctccagtgcccacgaaccgctgctggaagtctgggatgacgaagagcacttgcatcacgctgtttatgtagcaggagttgcccagattgcgcatgccagtgtatccaggaccagcaacaggctgcagctcactttcgctctccgtaagcgccgtccactcgccgatgcgctggttaatgtccaactctagctccaccatcgacttctcgctcttcttcatcgccgccatgttgatgccaaagtgggagagatggcgctctaagtgtggatcgagtaccatttcatcctccgggtaggagaacacatccgacttgccatcagcggtgatggtgcccagtttcaccgccagcgggaaacccgttactctgtagtgctccacggcgtgatcgttgccgccactgccgtcaaagaacttgcgtccgcacatgatcgaaccatcggtcagattaagccagaggttgttggtcaagtcgcacttctcgcactgccagccggatgggggaatcctcttgccattatccagctgctgcaggttatctgcgtacttcgacgcctgacgcacttcaccatcccaggtgcctgaaaaattattgattttaggctaccttcgtcagcatgggataacaatcctgcaactcacccatcagcgtggccttctccaacttggcaattgccgagtcggcggccaggatcgcttccaccgactgggtgacacgcatgggcagctctggatccggatagggcagcttcttatccaggtgcggagccaccacgatgctgtacgtgtccttgatctcgtacttcttggccatgtccgactcgttgtagccgccctcgacgccaatggccaggcgggtgatcttccgttccggtcctgcctccgactccgcgcattcggcctccatgtcggcgccctccttgatcgtcttcacccgctggatgtggaggaagacccggttgccggtcttgtcggcatactcccgcacatacgcctcgccgaagcccaaaaagctgtgcaggcacacgtacaaaccggtgggcgtctcgggattgtcataggagtagacgcactcgtccttgtagatgggaggactgcccgccccggatgcgcatggcacgttcaccttggataaatgcttgcgtagttcctccataacggtatctggaatcctgtaggcagctcttttctcataaactttacggaccgaatgtaaaatagtatagttgattttttttgcagctgctgcttagagatgaacatgggaaaatgcatcgataccggcgagcatggatatgcgaatatcgatgggttgaaatggtgttttactggttgaaatcagcttttaacaattcttacccttatttttgtaccttataacggcttttgagtgatatttacgtatttggccgcccaataagcacaattagtttaatttgactgctgcaggctatcgttgtttattcaatactgtcatctctagccaaagccaacaacaaattcgcgagtcaccaagggaaccgaactggttccgttaagtacgaacaatgcggggaaagtgtggcaacgccgattgtgattcatcagatgtataaccgaagtcaacattttaaaacaacaattcaaatgttaaccatttaaatacaataaacaaattattttaaaatttgggacaatctttaacaattgggatactagttttgatctaggactggtcacactattaagcgacctgtcaactcgttgtatacaaagttgccatatagtcacaaaaatctttcgcataaagaagtaaaacgtaagaattttcatatgcgtttttcgccaggaaatccgcattaaaataatgtaaaaagtggtaaaaaagttggcgcaaagagtgagccagtcaaaggcattgaaattcagctcgctctaacagttttcggcgttgttttgcccctcgcataaatttgttgcgcgccattttgtttttggaaagcaaaagaaaaagaagaaatacaacagcaaaaacctaccacaaaaagtcaaagtttgtaaaagcgataaaaagcaagaggaaaaggaattctgtggggggaaaagcgagtgaataacatgtggcggcttggctagttcgagcatcatctttgtgcctctaaaagacatacgaaaat

SEQ ID NO: 2468 - DNA, 2484 bp, DROSOPHILA
atggaggaactacgcaagcatttatccaaggtgaacgtgccatgcgcatccggggcgggcagtcctcccatctacaaggacgagtgcgtctactcctatgacaatcccgagacgcccaccggtttgtacgtgtgcctgcacagctttttgggcttcggcgaggcgtatgtgcgggagtatgccgacaagaccggcaaccgggtcttcctccacatccagcgggtgaagacgatcaaggagggcgccgacatggaggccgaatgcgcggagtcggaggcaggaccggaacggaagatcacccgcctggccattggcgtcgagggcggctacaacgagtcggacatggccaagaagtacgagatcaaggacacgtacagcatcgtggtggctccgcacctggataagaagctgccctatccggatccagagctgcccatgcgtgtcacccagtcggtggaagcgatcctggccgccgactcggcaattgccaagttggagaaggccacgctgatgggcacctgggatggtgaagtgcgtcaggcgtcgaagtacgcagataacctgcagcagctggataatggcaagaggattcccccatccggctggcagtgcgagaagtgcgacttgaccaacaacctctggcttaatctgaccgatggttcgatcatgtgcggacgcaagttctttgacggcagtggcggcaacgatcacgccgtggagcactacagagtaacgggtttcccgctggcggtgaaactgggcaccatcaccgctgatggcaagtcggatgtgttctcctacccggaggatgaaatggtactcgatccacacttagagcgccatctctcccactttggcatcaacatggcggcgatgaagaagagcgagaagtcgatggtggagctagagttggacattaaccagcgcatcggcgagtggacggcgcttacggagagcgaaagtgagctgcagcctgttgctggtcctggatacactggcatgcgcaatctgggcaactcctgctacataaacagcgtgatgcaagtgctcttcgtcatcccagacttccagcagcggttcgtgggcactggagcggaacgctatttcaaagagtttcccagcgacccggccaacgacttcaatattcaaatggccaagctgggaactggtctgcagtcgggaaagtacagcagtattgccgagaacactttggacaccgatcacagcaccggaatatcgccggccatgtttaagaacattgtgggcaagaatcacccagatttcagcaccaaacagcagcaagatgccaacgatttctatctgcatttgctcaccctgctggacaggaattcgcggaaccaaacaaatcccgcagatgctctaaagttcctgctggaggatcgcgttgagtgtctggccagccacaaggtgaagtacaatacccgcgaggaatacagcttccgtctgcctgttccgttggacaaggccaccaatctggatgaggtgcgggagttccaggagcgtaagaaggcggcccgcgagaccggacaacggcttccggatcgcgacatcgtgaggcacaaggtgcctctacaggcatgcctggaaaggtttttcggcccggagctgatcgagcaattctactccactgccatcgggtccaagacgaatgccaggaaaattacgcgattggccaccatgcccgactgcctgatgattcacgtgggaaagttcacgctgggcgacgactgggtgcccaagaaactggacgtttccgtagacatgcccgatgaactggatctaagtaactggcgctccgctggtggcttgcagcctggtgaggaggctcttcccgagcccgccacagaggaggtgaagtttgcatttgacgaggcggtcatgtccgagttgctgaccatgggttttccaccggaagcctgcaagcgtgcttgctatcacaccaaaaacagcggacttgaggcagcctccaactggttgatggagcacatcgccgacgaggatatctcggagccctttgtggtgccgaacaacagcattggagactgcgccgccaaccagtttgtggccaatcccgagagcctggccatgctcatgagcatgggcttcgacgaaagacaggcggtggctgctctgaaagcgaccgatggcaatgtggagcgcgccaccgactggatcttctcgcacgccgattcaattggtgttgaggatgctgcccccgctgcgaattcatcagctgcagcggcctcctcgacgccaaataagaccaactaccgcgatggccgcggcaagtatcgcctggtggcattcatctcacacatgggcacctccgcccaggtgggacactacgtttgtcacattcgcaagaagggcgaatgggtgatcttcaacgatagcaaggtggccaagtcgcagaacccacccaaggacctcggctatctgtatctgtatatgcgcgaacagtag

SEQ ID NO: 2469 - protein, 827 aa, DROSOPHILA
MEELRKHLSKVNVPCASGAGSPPIYKDECVYSYDNPETPTGLYVCLHSFLGFGEAYVREYADKTGNRVFLHIQRVKTIKEGADMEAECAESEAGPERKITRLAIGVEGGYNESDMAKKYEIKDTYSIVVAPHLDKKLPYPDPELPMRVTQSVEAILAADSAIAKLEKATLMGTWDGEVRQASKYADNLQQLDNGKRIPPSGWQCEKCDLTNNLWLNLTDGSIMCGRKFFDGSGGNDHAVEHYRVTGFPLAVKLGTITADGKSDVFSYPEDEMVLDPHLERHLSHFGINMAAMKKSEKSMVELELDINQRIGEWTALTESESELQPVAGPGYTGMRNLGNSCYINSVMQVLFVIPDFQQRFVGTGAERYFKEFPSDPANDFNIQMAKLGTGLQSGKYSSIAENTLDTDHSTGISPAMFKNIVGKNHPDFSTKQQQDANDFYLHLLTLLDRNSRNQTNPADALKFLLEDRVECLASHKVKYNTREEYSFRLPVPLDKATNLDEVREFQERKKAARETGQRLPDRDIVRHKVPLQACLERFFGPELIEQFYSTAIGSKTNARKITRLATMPDCLMIHVGKFTLGDDWVPKKLDVSVDMPDELDLSNWRSAGGLQPGEEALPEPATEEVKFAFDEAVMSELLTMGFPPEACKRACYHTKNSGLEAASNWLMEHIADEDISEPFVVPNNSIGDCAANQFVANPESLAMLMSMGFDERQAVAALKATDGNVERATDWIFSHADSIGVEDAAPAANSSAAAASSTPNKTNYRDGRGKYRLVAFISHMGTSAQVGHYVCHIRKKGEWVIFNDSKVAKSQNPPKDLGYLYLYMREQ

SEQ ID NO: 2470 - DNA, 4525 bp, DROSOPHILA
tattttcttttttttttagttttcttcaagaacccacaaattcccgtttggctagcactgcatttcgccatctctttctgattcgctcgctggatcggcgtccctctctctcttcccaacgcccactgtgcgtcgcaactggtttaacgttctgattcgacttttatggctgccgctgcagcacggccgtgggtcgcctctgatcggaatttcaaaacagtggagcgtgttgtggatgttggggcaacagtgggtggcatgtgtggtgcacagtggtcacacacggcacaattcgtggttgaaatgtgtgagggactttaaaaattttataagaaaccgattggtttgcaagtgaaacaataagcggtgttttcatttttttggttagcttttatttgcgtgcaatacaaactatgacaaaatttgcctaataaatagagcctaatttttgggccgctcgatgagcctaaagactacgagttgcggatcaaatggattgatttggacaaggacatggaccggacataaggctagacagtacagatttatactatgcgatcggatatcgtatacaattttggttcagctgctcggaaatcgcattcgagttcgcgttaaacatgtgtgtgtgtgtgtggtgtgtgtgtgtggtgtgtgtgtgggtgggtgtgtgtgtgcatagaattcagttatattgcttatataaataactctgctgccttgcaaacataaggaattatttttggatcacaataaaattataaaaacatatatctatatatatatatatgtatatacatatagtatataacgaaggtaataacgcaaaaccaatatgcaatgcacaggttttggaaccaccaagcattggggcactgggaaggactagataacaagagcagcacggtctgcaaaatataactaagcgcggagactaacagctaacagaccacaggagtatttcaagtacaaaacattatcggccgcagcggcgatcagctcagagcgtctccctggtgtcaagctcaaccaatggcggcactggctccaactccgcactctggcttctgctcctacttaggctgggactggggttgctccttgaacttggactggtgtggtggcttgcgtctgcactgatattacttggctgattttgttcatggttgttatgcggcgacgaggttgccggggtcagaggagccggaagtgctggcgtgccgggcggggagagtgctggcggagtgagtggggcaacggccacttcccttgtctgtggcggccagtggatggaccttaaaacgctttggctgctgctggaggaagtggagggactttcagcatggcctgaagccaacgaggatcccgaggtagaggcaatattgtcatcgtcagtcttggccgtcttcttctccttctccctcttctcgcgctccttctccatgtcggctatcttctttaagtagtttttgtcctgggtcggacattcgaggtggacgcagtggaagatctaagagcaaggagagcattagcttatcggacatgttttgtggcgctgcactgctacgtacctcattcgctgtgttgcgtgtgcccacaatgcggatatagaccactggacgcggagtaaagtgaaagttctgccaggagcgggtcctgtcgttgcggcggtccacgaccatttgccattccttgcggttcgtcgaaatttcgatgtagaagctgtaggtgcgatcatcgcagtcccacagcaacagcctcattgagcccaaatagtagggttggcccaaacggacgacgatctcgccgctgcccaattggtggcaagtatatcccgagtcccagtcgtagcgcacataatcgccgttgataagcgcgttgcgggtgcgactcacgccgtccgtcacaatggcgctcatctctacggtggccacgttcgtcttgggcgccacaaaatggttaactaaacgcggcaccttggccgtgtgcatggcttccagacccacaacatggaatacctatatattaatggaaagggaaaaagttaaagaatggggaaagtttgaagagatcactgctgacttacccggtttacagtgttctgggtgcccaccagtcgaatgaatctgacgggtcgtgcttcgaagtataagtattgccaggagcggcagtggtagtcgctgtagtcgaccacgcgatcccaatgctgctggtcgccggacacctcaacgtagtaggagtacgcccggctgtctctgtcccagagcagcatgcgaatgtgattgatcatgcagaacgtgcccaattcgaccacaatgcccgcatctttgctgtccgtaatgcagtggcgcgtatacccgttctccatgtcataggtggtcacatctccatccagcagcgcgtcgcgacactctccctggatgcagcgcgacaaaaacgtctccgcggccacgttttcctccggccagagcgccgccctgtagggcagcgcctttgaagtgctgcgctcgtcgatggcgtcgagaatcttgtcgggatccaggatgcccgagggacgcaccacctgcagcagatgctcgaggttcatcagtggcaggcggacataactaaccacggacttgaagtccacgttgctattgaagcggctccacttccacacggccaaaaagatctgcacctcgggggcgaagaagcagtcacgccgtagtacctcctccagcgattcctgtaagcattacatactcttagtgccaactttaccaattggttgtgaacttaccttggatagcgtattgaagctgttgtgcagcagcaggtcgccggcattgcgatccatgaacattaggcaaacctcggtgagttcctctagattgtatagacgcgccgcatcaagaatcatgcagacattgtccaaggccagatactggcgtaaataattcgatatggccatctccagatcctggaaaccatactgattggccatgcccagcacatcgatggtggaatcctcgtccaatgtggacagcagcagtgtgcccgagtaaatgtagcgcagcagcaccttgaacgcttccagcggcacctcaagcggtatttggcgctgtgtggtctccgccatgccgccgtacagcagcgcccggaagtattcgctgcgtgccgcgagtatgacgcggtgggcgggtatgcgctcctcctcgacgatgaactccacgtccgcgtactgttcgttcatgcagaggcgcgccatgtccgctgagaagcgatcgcccagatcgaccacgtcggtgtagtcctgctccatggcgcccttcttgccgccgccggacatcttatggtgtccctggctgctcatccttctcttttttgtttttcttccgtgcgatgtgtatttatgtgtgtaagcagccagagggaacagttgacaattaacgtttcgtctcgcctgctgcgtcaatccatcgatgacagttagtgatatcgataatatcgatggcacaatagggattcttctattgcggcgaaaaactgttatatgtgcagtgtgaccgtaggtgtgtataccatttaacgcgtacaacaaccatatcgacagccgtctgctagcgagcacatgaaccacatggttgcatccgataacatttagcgaatacatgaaccaaatggtgtctgtctaatatgccaccactattagcgcgtttcgggttggtgtctctgcgcgctcactggtcacacacggtcagtctagccacagcagttagcgagtgcagtcaccacagtgcgagtgcttatcgataaaaccagcaagtcatcgatttttagaccgaagcgctctgtcaactgctgcgcacggtcactctacacaagtatttcgtaccgtttgtacgagaaaacagagaagagaaaaacacaagctcagcaacgcatcgatattcggcacagtcccaaaagcaaacgaagtgatagaagctgcgtttcttagccaattacctcttcattgcaatcatgaagttccaatacaaggaggagcacgccttcgagaagcgtcgcgccgagggcgacaagatccgtcgcaaatatccagaccgtgtgcccgtaagtactcaaaaatatatatataaatgcatataggtataaagagacgtgtgtgtgtgtgtatatatgcgtgcgagtgtgtgtgtatgtgcgagcttctgtgtatgcgtttgttttgcgtcgttttttttctcgctctttttttttgtgtttgcaccgaagaaaatcaatactgcgcatattgggtatttcgattgttattacaatattattgcactggcacatcaggtggctggggaaatttgtgcgatgggtattgcataaagtgcattttgcattactggtggggggaacaggcgacaagctctcaaaagaaattcaaacgaaaattctgccccctgcatacacacatacgcacgcatacacgcgcacacaggcacacagatgtcgacaggaaaaaacaaaagcaaaaaaagggagagaacaaagcagc

SEQ ID NO: 2471 - DNA, 2342 bp, DROSOPHILA
tttttcgccgcaatagaagaatccctattgtgccatcgatattatcgatatcactaactgtcatcgatggattgacgcagcaggcgagacgaaacgttaattgtcaactgttccctctggctgcttacacacataaatacacatcgcacggaagaaaaacaaaaaagagaaggatgagcagccagggacaccataagatgtccggcggcggcaagaagggcgccatggagcaggactacaccgacgtggtcgatctgggcgatcgcttctcagcggacatggcgcgcctctgcatgaacgaacagtacgcggacgtggagttcatcgtcgaggaggagcgcatacccgcccaccgcgtcatactcgcggcacgcagcgaatacttccgggcgctgctgtacggcggcatggcggagaccacacagcgccaaataccgcttgaggtgccgctggaagcgttcaaggtgctgctgcgctacatttactcgggcacactgctgctgtccacattggacgaggattccaccatcgatgtgctgggcatggccaatcagtatggtttccaggatctggagatggccatatcgaattatttacgccagtatctggccttggacaatgtctgcatgattcttgatgcggcgcgtctatacaatctagaggaactcaccgaggtttgcctaatgttcatggatcgcaatgccggcgacctgctgctgcacaacagcttcaatacgctatccaaggaatcgctggaggaggtactacggcgtgactgcttcttcgcccccgaggtgcagatctttttggccgtgtggaagtggagccgcttcaatagcaacgtggacttcaagtccgtggttagttatgtccgcctgccactgatgaacctcgagcatctgctgcaggtggtgcgtccctcgggcatcctggatcccgacaagattctcgacgccatcgacgagcgcagcacttcaaaggcgctgccctacagggcggcgctctggccggaggaaaacgtggccgcggagacgtttttgtcgcgctgcatccagggagagtgtcgcgacgcgctgctggatggagatgtgaccacctatgacatggagaacgggtatacgcgccactgcattacggacagcaaagatgcgggcattgtggtcgaattgggcacgttctgcatgatcaatcacattcgcatgctgctctgggacagagacagccgggcgtactcctactacgttgaggtgtccggcgaccagcagcattgggatcgcgtggtcgactacagcgactaccactgccgctcctggcaatacttatacttcgaagcacgacccgtcagattcattcgactggtgggcacccagaacactgtaaaccgggtattccatgttgtgggtctggaagccatgcacacggccaaggtgccgcgtttagttaaccattttgtggcgcccaagacgaacgtggccaccgtagagatgagcgccattgtgacggacggcgtgagtcgcacccgcaacgcgcttatcaacggcgattatgtgcgctacgactgggactcgggatatacttgccaccaattgggcagcggcgagatcgtcgtccgtttgggccaaccctactatttgggctcaatgaggctgttgctgtgggactgcgatgatcgcacctacagcttctacatcgaaatttcgacgaaccgcaaggaatggcaaatggtcgtggaccgccgcaacgacaggacccgctcctggcagaactttcactttactccgcgtccagtggtctatatccgcattgtgggcacacgcaacacagcgaatgagatcttccactgcgtccacctcgaatgtccgacccaggacaaaaactacttaaagaagatagccgacatggagaaggagcgcgagaagagggagaaggagaagaagacggccaagactgacgatgacaatattgcctctacctcgggatcctcgttggcttcaggccatgctgaaagtccctccacttcctccagcagcagccaaagcgttttaaggtccatccactggccgccacagacaagggaagtggccgttgccccactcactccgccagcactctccccgcccggcacgccagcacttccggctcctctgaccccggcaacctcgtcgccgcataacaaccatgaacaaaatcagccaagtaatatcagtgcagacgcaagccaccacaccagtccaagttcaaggagcaaccccagtcccagcctaagtaggagcagaagccagagtgcggagttggagccagtgccgccattggttgagcttgacaccagggagacgctctga

SEQ ID NO: 2472 - protein, 722 aa, DROSOPHILA
MSSQGHHKMSGGGKKGAMEQDYTDVVDLGDRFSADMARLCMNEQYADVEFIVEEERIPAHRVILAARSEYFRALLYGGMAETTQRQIPLEVPLEAFKVLLRYIYSGTLLLSTLDEDSTIDVLGMANQYGFQDLEMAISNYLRQYLALDNVCMILDAARLYNLEELTEVCLMFMDRNAGDLLLHNSFNTLSKESLEEVLRRDCFFAPEVQIFLAVWKWSRFNSNVDFKSVVSYVRLPLMNLEHLLQVVRPSGILDPDKILDAIDERSTSKALPYRAALWPEENVAAETFLSRCIQGECRDALLDGDVTTYDMENGYTRHCITDSKDAGIVVELGTFCMINHIRMLLWDRDSRAYSYYVEVSGDQQHWDRVVDYSDYHCRSWQYLYFEARPVRFIRLVGTQNTVNRVFHVVGLEAMHTAKVPRLVNHFVAPKTNVATVEMSAIVTDGVSRTRNALINGDYVRYDWDSGYTCHQLGSGEIVVRLGQPYYLGSMRLLLWDCDDRTYSFYIEISTNRKEWQMVVDRRNDRTRSWQNFHFTPRPVVYIRIVGTRNTANEIFHCVHLECPTQDKNYLKKIADMEKEREKREKEKKTAKTDDDNIASTSGSSLASGHAESPSTSSSSSQSVLRSIHWPPQTREVAVAPLTPPALSPPGTPALPAPLTPATSSPHNNHEQNQPSNISADASHHTSPSSRSNPSPSLSRSRSQSAELEPVPPLVELDTRETL

SEQ ID NO: 2473 - DNA, 4122 bp, DROSOPHILA
tgggccttctcttgaccacacaaatcgagactcggtaaactgaggctcctcttaaacagaaattgtagcggaaattggccgaaaataaaattctgtcgcaggccaagtgaaatcggaaatggaacacaacccattaccaaatatttctgttcgcctttcggaatcgtcaatcatcgcatgttgacaccaaatgggaatcctaattcaatcattcgaacgggagtttcaatgggaaattatttgataataggttcaaaagatcaaaatgatgcaaaatggagtttgagactccagggtcccgaaatatccatataaaactggaacactatgcattaactgaatccaaaatgaaacattcttatagaggtgcgattgaaaatatgggaaaaatgttaattttaaagccttatccttcggaaagatatgataaattttttccaggaggattttcagcgctgatttttgttaccttgctgacgattccaacctgaatccattgaatgtatttctttgacagtcaaagcccattttaaataaatccacttagatattcatagccatctttaaagcaggaaatgcacggattgtcgatggattccatttgaatgtcatattttctgggatttatgatgaaacatataatggctgatggctggccattctttctggccgcgtttctctcttcatttggccagaaaccacctggtcaattggctcagccccaaagtgattgcagctgactgattgaggctgcctgcaggttgtcagatgccagttgccattgctagttaattgaatttgccgtcaggtggcatttattgggggggcagctcccctgctccacaggaaattgcacagcttgtcagttcaattagacggaattcgatttgccccattcccggtacagtttcccatgcaagattcgtttagcaatgatgcattttaattattccatctcagcgagaggagttttacatgcgccaagaaaatcagccaaatcctaggcatagggcccgatacccgctgctctggccatcagcgccggaatattgctttgctcgtagttgccactgaagtactgggcatagggtcccgaggcatacaccgccacatcatctcctccgtgggtttctgcgtccaagggcgccagcgtgggatactgatagtctgagtccgcaaccaacttctcctttagaagggcacgtccctcagcgcgattgtagccggagtagtagccaggtccattggcataggacaaaatcgtatagggcagattatcatccgccagttgagccaatccggtgatctcctggtcacgatactgccggaattcagaaatcataagtcaaatacctatcgctgttagaaaggaaactttcaagtactcacaggataaccattgatggacataacatgagcatgatcagcggtcaccacgatcagtgtgtcatcctcggaggtaagttcgcgagccttctggacagccctcgcaaactcggcggtatcctcgagggatctcttggcgaaggtatcgtggtgggccatgtcgatacgagcaccctcgacgaagagaaagaatcccttgtcattgcggctcaacaccgtgatggcagcctccgtgagctcactcagcgaaggatccgccaactgactacgtttcctgtcccgatcaccgttgtacggcagatgatcattggcaaagagacccaataggtagtccgtattctcgagatccaccagactgagtcccttgcgactccacacgtatttggctgagacattggcctccttcttctgatccaaccaactgcggattaagtgacgaccgtcggtacgcttgccgggataaccctcctcatcatttaccgttgcgtcgatgaagttcttgcgaccgcctccaaggattaccttcagctgctgacccacaggctgctccacgagctgacgggcaatatcgatggtctgctcgggatcgcactccctgttggccacctcccagtcgttctcccaattgcgatccgcgatgtgggcataaacaccagctggggatgcatgagttacccgggctgtagtcaccagacctgcatccttgccagccgcctgtgcccaatgcgcgatgctgagcacccgatcctcctcgttggcggcgccatcacagctgtacctggacacattggcgttaacgccaatcgttccatagttcgccttcacaccgcccaaataggcggtggccgtgcaagcagaatcggccacctggcggtttacgcagtaggtcttggacaagccagtgtagggaaatccctcaaagtacacctgctccgcactgtcgcctagcagattcctggtggccgtgaccgtgtgaacggacattccatcgcccaggaacagaatcacgttcttcgccttgtttgtggtcgcggactcctgctcggccagcttcgataacagcttcgcctgggccttatccacccagtactgggtctgctgctcctctgcatacttgatcggatgcgattcggcatcaaaggaacgcccacgagggtggtctgaaaagaatggcaaaatagttcaataattactataacaataagaggtttccgataagccaatataactattagcattggtcaaaaaatagaaggatcataaataattttgggtttggattttctgttatatatcaatgggattatttgagtcttatctcctctacacatttttttcaagtaaacttggaagataagaagttattttaaagaacttaatctcaaagtacctcgtcctgcacgctgaatctcaagtcagcgccagtcaaaataacacatcctttgggaggacaaacataaaatctgacatgtttttatactcgtagttatctaaatagttaagctgcttgtaaaataaattccctgaactggcgtacaaaacaaaataaattcaaatacctaaacattttcgaactattctaaataaaaacacttttgaggtatcgctgagttctaaaatccagcttcagagcaccttacctctttgtccgctggcacttccgctcaggcagacagctaagacgagcaacagaatgaatctcctggccattttcagctaatcccaggcgtggtgtggaggtcagaccttggttaaagactaaaccgactgaccgaccaaggaactgggcgctgcctcggagctatcgctcagtatcagagtaaatctaatcaaaggaaactaatctagacggttcaatcaaatcatcatttatggctggccaagtttaagttgacagaagtcgtagaacagaccgaaaccgatgccaaaacacactcacgtgcctttcttatggctttgattctctgtccattaaccgattgcgtatactacgacctacgtaatcaatctgaagccggggcaatcctgtttgcctcaacttttaaacattgctaacttattgcactcaaatttattgaatcatgccagtagctttgttaaacgatgaagaataaatggtttcactgctactagaaaactttatggttcaaactttacggcaagccctttaatcccacatttgaacccttgaccccggcaattaattgacttcgagtctgcacaattgtatatgtattgtgtaaattgcatacttttgggctaggctgcaaccacaaactaatacaaaatagtagctattaaatttaagtacttggttattttttaattcaacactctttttcacagtatcgtcttagccagtgccacaatcgaacctgtaaacttgatgacctaaaaaagggtttcattagtggattgcactaagtgccatacagattataacccaccgatgtgaagactggtaacgatggtgcaaaaaagggcaccctcaccgtaatgggtcgttgagcacgcaggataatgagaaagacccgcctgcgggtctctcgatcccaagtataccaggcactgctgtaggctgcttctcccaaggaaaggctctagaaatgaaagaggtcaaaggttaatcaagagactcgacctgtcccacctcagttgacatttctgtgcctccgtagcaatagaggaagatggccgaggaaaccgtgaaggtgtacaccacgtaacggatgatgt

SEQ ID NO: 2474 - DNA, 1574 bp, DROSOPHILA
cacaccacgcctgggattagctgaaaatggccaggagattcattctgttgctcgtcttagctgtctgcctgagcggaagtgccagcggacaaagagaccaccctcgtgggcgttcctttgatgccgaatcgcatccgatcaagtatgcagaggagcagcagacccagtactgggtggataaggcccaggcgaagctgttatcgaagctggccgagcaggagtccgcgaccacaaacaaggcgaagaacgtgattctgttcctgggcgatggaatgtccgttcacacggtcacggccaccaggaatctgctaggcgacagtgcggagcaggtgtactttgagggatttccctacactggcttgtccaagacctactgcgtaaaccgccaggtggccgattctgcttgcacggccaccgcctatttgggcggtgtgaaggcgaactatggaacgattggcgttaacgccaatgtgtccaggtacagctgtgatggcgccgccaacgaggaggatcgggtgctcagcatcgcgcattgggcacaggcggctggcaaggatgcaggtctggtgactacagcccgggtaactcatgcatccccagctggtgtttatgcccacatcgcggatcgcaattgggagaacgactgggaggtggccaacagggagtgcgatcccgagcagaccatcgatattgcccgtcagctcgtggagcagcctgtgggtcagcagctgaaggtaatccttggaggcggtcgcaagaacttcatcgacgcaacggtaaatgatgaggagggttatcccggcaagcgtaccgacggtcgtcacttaatccgcagttggttggatcagaagaaggaggccaatgtctcagccaaatacgtgtggagtcgcaagggactcagtctggtggatctcgagaatacggactacctattgggtctctttgccaatgatcatctgccgtacaacggtgatcgggacaggaaacgtagtcagttggcggatccttcgctgagtgagctcacggaggctgccatcacggtgttgagccgcaatgacaagggattctttctcttcgtcgagggtgctcgtatcgacatggcccaccacgataccttcgccaagagatccctcgaggataccgccgagtttgcgagggctgtccagaaggctcgcgaacttacctccgaggatgacacactgatcgtggtgaccgctgatcatgctcatgttatgtccatcaatggttatccttatcgtgaccaggagatcaccggattggctcaactggcggatgataatctgccctatacgattttgtcctatgccaatggacctggctactactccggctacaatcgcgctgagggacgtgcccttctaaaggagaagttggttgcggactcagactatcagtatcccacgctggcgcccttggacgcagaaacccacggaggagatgatgtggcggtgtatgcctcgggaccctatgcccagtacttcagtggcaactacgagcaaagcaatattccggcgctgatggccagagcagcgggtatcgggccctatgcctag

SEQ ID NO: 2475 - protein, 515 aa, DROSOPHILA
MARRFILLLVLAVCLSGSASGQRDHPRGRSFDAESHPIKYAEEQQTQYWVDKAQAKLLSKLAEQESATTNKAKNVILFLGDGMSVHTVTATRNLLGDSAEQVYFEGFPYTGLSKTYCVNRQVADSACTATAYLGGVKANYGTIGVNANVSRYSCDGAANEEDRVLSIAHWAQAAGKDAGLVTTARVTHASPAGVYAHIADRNWENDWEVANRECDPEQTIDIARQLVEQPVGQQLKVILGGGRKNFIDATVNDEEGYPGKRTDGRHLIRSWLDQKKEANVSAKYVWSRKGLSLVDLENTDYLLGLFANDHLPYNGDRDRKRSQLADPSLSELTEAAITVLSRNDKGFFLFVEGARIDMAHHDTFAKRSLEDTAEFARAVQKARELTSEDDTLIVVTADHAHVMSINGYPYRDQEITGLAQLADDNLPYTILSYANGPGYYSGYNRAEGRALLKEKLVADSDYQYPTLAPLDAETHGGDDVAVYASGPYAQYFSGNYEQSNIPALMARAAGIGPYA

SEQ ID NO: 2476 - DNA, 65057 bp, DROSOPHILA
tcgcgttcgcgtagctatagccctaataggatactaccaggaggtgccctgccattttcaggtgctcagcacatcccgaaagcccttggattttgaggaatcccccgaggagtttgtagcatttaactagcattaccgcatcaggatgtcattctcttactgcaaggagtacggcaaggacaaggtgatttttgtgaccaaggaggaccatgccacgcccagcaccatcgagctgccgccgccggaaaagccggagggcgtgatcaccaaggacggcaagatcaactggagttgtccctgcctcggcggcatggccaccggtccctgtggcgtcgatttccgtgaggcattttcctgcttccagaacagcaccgccgatcccaagggatcggactgctacgatgccttcaccaagatgcgcgactgtttccagaagtaccccaccgtgtacaacaaatctggcggtgatgacgacgacgatgatggcttgagcgaggccttggacacggatgccggttcagttggtggccagaacgcggatccgctggcggatgtgggcaacaacggaggcggcgatgagctggtgtcccccaatagcagttcagtggtgcccaaggcttaggtgggagtacataagataagagctaggtgtgacttcgtacaaaataaataaaacttgtcattaacttcaatccatccccacactatcgatcgtgactgggaaacatttatcagccagatagtctggaattaacagagatattgttgaaacagcatagtgcttatttcagaaataaaagatactcgttttctcaattaaattctcgctttttttacaaatagcgaaatacacaaataaaaaaatgtaaatgtatcttgtattcactgtagccaataggccgttatttccatatgttgtgtatttctggtatatactcgaagcgctcccacctcgttggcagtatttttccaccctgctgccacactgtttacgaagcagcaatcaaagaaaacggaaaaataaaagcgtattaagatttcgtgtggaaaggaaaaatgctgtaggcgcagtgtaaaatgcatatattgcggataaatcgcgtttgtgagatgcttaaacgcgaattcaacatcaagtcggtgcagaacttcaaggtgcaataacaaaaatatccgaattatcgaaaaaagcaaagtgcaattggccagttgagactacaaccacaataacaacgacaacaacagcaacagcagtgaaataataatataaccttgtgttttgttttttgtggctcaaaaatcagatatacacaaagttaatcgaggtgaacggtgtaaaagtgattaaataataacggtttaacaggaaaacagagttatagtgtgtgcgagtgtgtgtgtgcgtagtgacaacaatacaaacgcagaaaccaatacaagcgcacaatagttttcatacataggaaaacaacgaaagtaacagcgataaataatagaaaacaacaacgaagagtctcaaaaagtgctggaaaaactcgcgataaggaaaacaggaacctccacatcggcagatcttttgaatgctgccgcactttgaaatccggagacacaatggtttcattaattgacacaatcgaagcggcggccgagaaacagaagcagtcccaagcggtggtcaccaacacctccgcctcctcctcctcctgttcctcttcgttctcgtcctccccaccatcttcgtccgttggctccccatctcctggcgccccaaaaaccaatctcacggccagcggcaaaccaaaggagaaaagaaggtgagtcacacgaatctgcaatccggataccgccgatctacaatcccatccgttggttggatctgcctagatcgcttgtttgcccattgcataagcgcctgctttctttttcgcccgctcttcgtcgcgatattattgctcgtcgcggctttcgttgccatccgccgcttctcgcgtttcttctcaatttcctagtgcgtatgcggtatttcgtttattttaacaatctggaatcagaatgttgatacatcaatggaatctagtgccaatcgggaatcccttacgtacaatgtttattcgtttattttcacaaactggacacctaacttacacatacatttcagtcttgacatttaatttatatttccactctattaattaattaattatcaacattgattgattttctttcgttgaggtcctcatgggtttcgtatgcaatcagtatcttatagatgagtcaaccttactgcctgattttgagccaaaaataagagcgcttttaacccttacgggagcgaattgcatttcacttaatgaatttcaattcccgcctggctggaatttgtgaacttccctcaatgggcgtcactaattgacgaaacaggcattgggatataatggaaagccaatcattaatcacgcgttcaactaatttttgcattcgcggcaattattatacgatcgatggcgacggcgaatccaatggccgagacccgcgaccttcaggctttcaaagacaaaagtcgagacgaaccgaaatcgttcagtttgcatatgcatggttggtttccgctgtggaatatgatatctagggggtatacgataggagaatgagtgcccattgcggcaagaagagaggcctgaaaacacttgttgctatcttgagaaggtttatccttaaagggctcacaaagacaagcccccccgttgaatgcgatttatttttagacgagtgcattgttctctttttccttacgcacttatgggttatttttaagtgaggcgaaaacccaaaacacaatgaggaaaacctgttcgattatgctgccccccctgctccaagatcaacccgttttttttcctcgtgtttcgttttgttggctttgttttattttcgtttttggtccacgcccctccgaatacttaaatttatttattttataagcccataaaccgataagtttatgtttcactcaagacatttacattggattgaaacaaagtttcgctttggcctacgtgactaccgtaaaactgcagtaaaataagtgtggaaaagccgaaaagcggttctataaccattttcaaaatgcgctctagcttcgattagacccattgaccgacaaatcgagtctttcccatttgttccaaactggttccaatgtattttgcagtgtgacacatgaaaacaattgacttaagtcgtctcaccatgtgaaatacgtcaatttagattgtcttattgcattttcccaaacattttgaacatcgatttttccgattgttcatcgctaaccttttgcctatcggtcgactctttcgattgcagcacacgcgatcttgaacagatcgtaactgcagctacggtgtgacctcaataaaagtgaattattacaagttgacttggttggcggaatttggaggaggaaagaatctgaatcaagatttttcatgtttgtttttctatttacgttatttctataagctgttaggcctgcgccaagaagctaatgaataaacttaaaaacaagtcggcaataaataaatttcaataccaacgcagagaaacgcacaaaagtaaaacacgcttacacacaagcatgtgtgtattgtaaaatatttaaatgatatgccctgctgttgttattgttgttgttgttgttgtttcatgtctggccacgacgacctactttttgcgcaatcgaactaaaaatgtgacgatccggggaggatggaaacgcccgagggggtgttatggtgctactacatatatattgtatatgtagggagaaagagaaagatggatggcattgtattcaagtattaggctcgtggagttattgttgatcttctccttcttctccttacatgcttacactcttgcttgctactggagcactgaaaaaaataactggtaatcaaatttcaaatagtaaaatccgaagttcagtcgctctcttagaaaaagataaattagtcttactgtaccatattcaatatatttgtctattaattttctttctctgtatgaaattgaacttgatgcagcgagagagacgtatataagcggagtgagggagacagcgtgaaggtagcgcagcttccgaatctttttcgtttgttcagttgcgtgtgaggtctatatgcatcgcattcggtgtaagttatgattcggcaattgctggcagggaaagtttaaatttatatttaaggcgataaattggaatcagtcgctgaaaattccccacaggttttgtgaaatgagcaaaaatttcggattaagattattgcgaaacctgtttggaagtcatttttttgctaacaacattaacaagaacaaaggaacttctttcttgggaatggataagatctttacgatgttctgttgtaaacagctattcctttggattaagtattaaccactggtcttgccacaactcaatgaacttcttacgacatctttcgaattaattggtcgtcgtcgggtgttactgtagcaacctaaaggattgacagaccttctataagatagtccttgaatgatgcaagatgagaccatagctaacgatcacaaggactcctggcaatctgcaaaaagagaagcccaagaagctcacaatgttaataactacttttactgtttttttatatgaaatacatttaaacatcgaaatagtttagtgatagacgggtgtagcataaacaggtaaacaaggggttatcgtagtgatttaagttgaccctgcctgttcctttgccttctccacgagctgattacattgcgatttgattacgtttgcttggtctggggaactagcttcccttatctcgtttcactttccgtgctgtttgccaaactaatccaaatatttaactcctatgttatagttcttatcggccgactagggaaatcatggataagtctgatagtatttagtcatccaagcagcttttctcgcacagtgaaaaagatcaattctctaatatttcttctcattttgtgtgtgcgaattttggttagttttcgaaatacctaaaaatggttcatcagttctgcggttaaatactcaaaattttggaatattatatcaaattttcacttcgaagtgagtggcactgttttctcggtgcagagattctaaaattataacatgactttgccgtgcactgcactttgtgagcgagggaaatgggcggaaaatgggtcctggacgtgcggaaattttccggcgtcgctgcaaagtagactatatggtccgagccaattatcgactgaagtggggcgcactgacataatttatatggctctaatttgaatccgccactcactcgattcgctgttatcgtcccattgggcagaaccgaagcgctggctccctgccacctgaatgcttctacgaggcgggcggaccggactttatcttatcactccggccggagcgcacttgtccggataggcaaacttgtctgatagcacacggaatatgacgttcacgtcggctctccgctcttttgcgattttttttggtgcggctgcccaggtataaatatgatggcttcgaggctatggaacctttcgctcatttagcgctcgaactcccgtacgtcgtgttctaccaaaatatccggagcagtgaagttgtggccaaatcaaaacactatcagctcttatcgcacgcgtgtgtgtgttcatcatcgatgggcttagccggattccagcgcactcaatgtttaattccttcgagagctgcgatttttcgtgtaccggcgacatttcgttctacggcgaagatgtgatccccggttctagtttctacgagtgcgattccaagccgcagcggcagcggcagctgagcagaaatggcccagcttttgggccaatgcccatcaatgaacccactgtgaactttggcaacgggtcattctacaatggccctgctcccggaagccaacccttcgtgggcgctatgctcggccccaatatgtcctccactgggatgcaaaggtaccatccgtaccatcagcagcagccccaggacgccttctatcgccagaggggatcgcttctgaacgtggccacgccctgtcgcgaaagccgcccctggagctacgcctactgctatggctacgcgcccacgaacactcaaccttgccagttctcccagtttgtcgacatcgaggatttcatgtgagtgacgaccaaagtggttggtcaatttgttgttttgggtaattctgtgattttgcgtttttcacgaagggtattccttaatctcattatcaaatagtattcaagtacgaatatttacacaattttgcttaataattgttgttacataactgtggagagctctagctcattcaagtaaacaaaacaaaaaccagttagaatcggtggccgaatgccgctagcgatttacattttcctggaggcacctgaacgagctgagctcctagaaaattggccgtgttccattgtaaaacccgagccgaaagcaaacggcgctgcacttatctatgcttatttgtgaatcgcttttataataatatttagatacgcagcaaaagatagggcgagggggacggaactatggcgcgagagaggtgtcgtatgagtcaaggttcggtgggttattcccaagagaggtaccgtttataagattgtgggctggaaaagactttttctctcacttcgattgttgcgtggaaatagtaaattgcttgtcagttgtgctgttgtgtaattgttatctgccgccgatgattttatgtggggtatttcccaaggagttatcgttaggggtctgctgaaggtttcacaatccatctggttgatgtatacgattatctggcgattgacgcagattacagcccctttccctggacttcacctccttgaaaactttgcatgcaacgtgcgcagcaagcaaatgttttcgtaatggtagtcggatttggtttatttacgttttgcacacgtttaagccaaattcggctggcccatctccatgctaatgagccgaaaccaaactgacgcaattgcaggacggcgctgcccgaagaactccacccacaatatggtgctcccaagaagagaccaaacatccctgacccgctgttgcgcctcgatttactgtcccatgaacttggcattagcacttcgagtcgtattttatgtgttttcgctgatatctcgcccggagatacggcgcacttggaggtagcttggccaacatttcgcaatgctcgcaattcaaactcaaacaacagcgggtcagtatcctaaggtgttgtcggataagccagcaggacttagatggccacgtgcggcgatcgtggtgtttgcatattcaaactcatttcatacacaaagtgcggaaaatggtatcttaagatcagcatactacatcattataatcatcatacggaagggtagtacacatattaaggtgtgctttcaatattatagcttaattttgttcagtgttttgagctgctttggagcggaaatacttagcaacaacaacagcagcagcaccagcggcaataacaaggcaattctgctggcgcaggcagaatatttaacatgccgtacttgcctctgttctaatgaacagacaatggggccgatcgaaaatatatatatgtatgtgcatacctcccaaaccaaaaccccacccccccggcgaatatcccaccatttaagcaggccattagcatgcaattcaaagtcactctccgccgctttctatgggccacgagctagcaactatcggatttgtgtttattaatgcatatataatatatatagaaatccacgggtctacgcctatattagtattcactttgctggcgaagtaatataatactatataataattatttgagcagccattcgagtttcgcttcaaactttggtttccatccatcagttggttgattgacaatgaaaagccctcttatctaaactggtttctgttttatttatttttgatttatttgaatgcattgtttcttcactttcacagagtttcctaatcaacgttttatctgggcgttcagaatactcttttaataatagaaattctttcgagtgcaaagtcaagtttagcatttgtttatgttaagatttcctctgtttacaatcgatcgattagtggggtcctatctcatatttaaatatgtcataatagaagattatgttcaacaactaagtagtttgcttcgatttattcaatttatttacttacagtaaaagaaaacgggaatactgtttttaatagatacttaagccattattagacaggcggcagactgacaatagatcatattgtactgtgactttgtcggctgatatgatggacttttgatgattgcgactcctccgttgacaggcggtacttagggtttgttaacaaaaaagtttgatattttcgcgttgttaccgggcagattttcccaagtgaaccacctgacgtgttcaggtcttttttcatcccagcggatcaataaagcagcgttggcaaattttgaacaaaatgccaggaaataaatgtacatacgtgctgaaatgggcgtcacccgtggattatacaagttcgcccactatatcgataataaagaaaatattaagagccacgagttatgttcttgcatgcggctactcaagagattttcttggcagactacagtttttccgcagtcccgcgggagggccatccgtcttttcttagaatttcccgcaatatactcgtattggcataaagatagtgtcagtcgtgtgtgtgaggtcagtgctctgtcgtcctacaagtgtgtacgatcgatttgcctgcttggttgccgattaaaacacgtcgccaatgtagacgagtcgatacccagggtttaaatgggacttactcatccagcgaagacaactaactctgcagagtcgctaattgccaaatcatcggtgttttgtcaatcccctggcgaaatattccaaaagaccaccaccacgaaaattggtgccaaggcaacttagccactttttatcagtggaacgtgtgactgccggctattctcggaatccgaaacagacgttataaactatctaagtccccgggctcttctgccagctcggaatgcacaggtatccatcccaagggaggtcgtctctgtatgtcaggatcctctaggcaatattggatttatttcgaatgttttttaagactctgtagatgaggaatgcgtagaaattccttatcagcatcgttgaaaagaaaaatacttttacaaagtcgcgacattgagattcttttcagatatgaggctttattagaattgaatataatttattgttctgcagtagtattttgattaccagcatttactttgatcttcatctttatttatttatttgttattagttagtgtttttcgaaaagacggctaggaatagctgccgagaactttggcgccgtgtcgatcgacttttgttttttcgctcgacctggcaacaaacgcgaaaattacaagcgttttgcttaattgaaaaattgcgagctctggccgcgtgaattgaatcagaagcaatcaaacgggtataaaagtgcagccatgcaaatgcacgcatatttcaggcagcctcccccgtgctagatccccccttttcccactgatcattggcgtacgtgctcgttttgagcttatgctaattttccatccgatcgatctttgcaggaacaatgaaaaacgcaaggaaaagtctcgcgatgcggctagatgtcgtcgctccaaggagacagagatattcatggaactctcggctgctttgccattgaaaaccgacgatgtcaaccaactggacaaggcctccgtgatgaggatcaccatcgctttcctcaagattcgcgaaatgctgcagttcggtgagtttcccttaggatgtgaaatctttgttagcaccatctaatatattacttatttcagtgcccagcttgcgcgactgcaatgatgacatcaagcaggacattgaaactgcagaggatcagcaggaagtcaagcccaagctggaagtgggcactgaggattggctcaacggagctgaggccagagagctcctcaaacagaccatggacggattcctgttggtcttgtcccacgagggagacatcacctacgtgtccgaaaacgtagtcgagtatctgggcatcaccaaggtaaatgtatccaaatacttcattgaagaagattctaacttgctctcaactttgcgcagattgacacacttggccaacagatctgggagtactcgcaccagtgcgatcacgccgagatcaaggaggctctcagcctaaagcgtgaacttgcccagaaggtcaaggatgagccgcagcagaactctggagtgagcacccatcaccgggatctgtttgtgcgcttgaagtgcaccttgaccagtcgtggacgaagcatcaacatcaagagcgcttcgtataaggtgagctaaatgagtttgagacaccatagcaccaactaacccatgccttattggggttttcaggtcattcacatcacgggacacttggtggtcaatgcaaagggcgaacgtctgctgatggccattggccgaccaattccgcatccttcgaacattgagattccgttgggaactagcaccttccttaccaaacactccctggatatgcgtttcacctatgtggatgacaagtgagatacatacagaattaaagacgcaaatcccattttaaaaaccataactgcttaggtttctttttgagggattgactaattgctctgccaaaagtggcacttaactatcatttacttactcataatgaacaagcacaaattaatagattacgtaaacatattaagcagcctagaaaagcatcaaaatgggaacccgtctagaggatagtaacattaattctcatttgttccctgctttgatttcaggatgcatgacttactgggatattcgcccaaggatctacttgacacctctttgttttcgtgccagcatggagcagattccgaacgcctgatggccaccttcaagagcggtaagtggcatcgtccaactccgaaaactcgcgactcattaaaacaaactacagctaactaatgctaaactaattactttaatgtgcaaattaaaacgcgttcgtcgttagttggtgggttgcaatggacgcggaggacaggaaggaagccggaagagtccggcacatcaaaacaaagttgtcactcgtccggcggcgttacctgtcctgtgctctgctccgcatcctgactcctagaatcccaagcagttcctgttcacgtccagcagttgccatagcttattgcatttaattagttgtagcaccttcctcttgtctgccccttttccacttttttgcaacacaaagaccattagtcgttggcttgacttggctctgctttaatttcactttagttgctaattagcttttgcgaaagtaaacgaattggtcaggcagcgagacagctgaaatctctgtatctatcgctatctgcactttcatatctcctctatctcttcatttcaacgagttttttgctgattcaattatgttagattttgtttttttgtttatttattcgccatttcatatcgtatgcctgagctagtaaatctgtataatccagctacgtcttattgcttcactatcagcaatgccacaagagaaatattcccacccatcttgcttagaaatggaagacgcgccaaagccaccagctcatttgcaatcaattttcataagccaaagtatcgttaccgcgtcgaaatatccaaacagatcgatagataaatggcctgaccatagagagcaaatattttttgtatcttcacttttctctatacaaaaaagaatttatatttatttgctaaggaattatgccagtggcacttaacaatacgaaaatagtgatatatattggctagataactagcaactttgaagtaagtttctttgtaatttctttgtaatttatgaatgtcatgcgagagagagagagaggagtcaattcgatattaaatgacctcttatttctttccgtgcaatgaagtcccacatcttcgattgcagagtgtgagtgggaaagtgtttgctgcaagcattttttcttaatttctccccagctcatcgggtgcggcttcttgttattgtttgcttatttgttgctcttaatggccgcgtcatgtcgtctacattggccaaataatgttgccactgccgatggagcggcgatggagctacgatggtgctccttggctggctgcacttaaaatgccaacgctgggcaataaaaagtcttctgctgaccattgttcggggtacaatgtacccaaaagtgcccaaaagagcgcatccttgcagccaaggaacagaaaattgtcactgcactacaattggaattattattggctgcgatgactttggcttcttggccggacattcgcccgctcctggttttcgtgtagacacgttctgcgcgaaatgactttcggttttatgatgcgacgtatccatttgaccaggacgctcgagtcctaggatgcagctggcgatcccgagttctgtgtgcatctcgcatatcgttagcaaaacttgccagcaagttgtaaaaatgtcttcgaaagtcgtaaaagtatttcatacatttttgtttttattaagttgctttcgccgctctgatggaagtttcctttttcccgcttttccaaaaagtttccgttcgcgaaagcttgcccgcaatattattgtttatgagtgctgtccgtttttatttccatttgattttcatcaagtttacatggctttgtaataagggggtcagctggtgcagtgcatccttaaaagcttcaaccatcctccccttttattcccttaaaattcgagcatgatgatggtgatggaaggtacagtggaattaccaaaggatggtctgctataaaatgcacttacgtatcaatcggaaaatgaatgtcaaataactgttgcatactcttagacacctttaggggaagtatcaagtaccttcgttacttttaggctcccttaagtttcatccgatttcaagttggaggagtacttctccccaatcctagccgattcctcccgctttcatgctgtgcatgtgggttgtgttcgcatgcagctggcgcagctcgcaaaatactaaacgtcatgtgacaaacagttcaataaagtacaaaatgtgcggaaaatcgcaaatgtcatgcgggaaaatctcgcatcgggcagtgtttgccgttcggatgtgtgtgtgtgtgtgtgtgtgtagtggaatggaaatggaaatgggaaattgcgctcgagcatttccatgctgcaaataaagacgacaatttggccgcgaggcgaaaaattatgaaacgagcgggtggaaagcgagggaaatgttcgaggaaagtggcagtggatcgaagggggcaaaagtaaacttaacgtgccagataaatatcctctgacagacagacagcgaagagataaagccagcatcgctttggatttttagggatgaaggtggagttggagatggagatggagatggaagtgcgggtgaagtatagcagctcctccagcgagtgttgcaataaattttggaaagcaacaaaaaacaataccgaaaagtggctttggcagatttggcgctgcgtgtgaaaagttccccttcggaaaatgcattttccactggcgctgcattctgggggcattgccgcggcatttgccagacattcaactttcaactcttgccacaagccagttgctagtttcccgctgtttgtttctgtttaagtttcctttttttagtttctgtttccttcccagcttttccgagagggcagctgacagttgtgctggcgcgagtgttgtgggttgaaagggcgtgtgatcctggccaggcacgtaccaatggggcgtggcaccaagtgttgcatacttttcggtgatggcctacgcgaggtgactttaaaccgctgcaaacgtgtagcccaagatacagaagaagaggaatcattaagactcaaagttctatagaccgttggctgaaaacgaagcaaggaattattgtattcaagttgagtgtaatacctttactcagacttgactgcgtggatttcaagtgcaagtcgggctagggaactttattttcatttgctcccacgcccgcacgagttgtgtaatcaacataacaagcaactgccagtttacgagtctgttaatgtctcacacactccggagactcccagccagacgagcttcctggccatgtcccgtagtcgtcggcgctatataaactatacgtctgagccccgcgaatgcttcctgccaaaagtgtcgatgatgctgacgcttagcgctgctgccaagtcgttgcactcatcagagcagccgaattctccgttttcggggggagtggaaaccatgccctgctccaaaacggtttcacacaaaagtttatttatcttgttggggctaacagtgcacagtggtctgggaaaatgttccatcggaatgggtctgtggggcatttgaactccaaattgttgcatactttaaaacacttttgtagataattttggaatcttatgaagccatttgaatatttgtattttatatgttttcgaaagcgtttatcccactgtggctcgaccgctttatgttaatgcacttaaatttggctcgcggcataagtgggcgtcggggcgtggctgggcacgggttgttgcagctgccgtcgaggcagccgcattttattacatgcataatttcgccaggggatcctcgctggtccgcctcggtccactcggcccctgggcgggggaaccacggaacttcgttccccactcctggataatccacatctattcccaacttcgtctccatcagcgtcccgctgctcgtctcttatttattcgtctgcatcgtctgggccatgaaagcgccaaactaatgccgtcgaaactaatggtccaattcgagtggctcgtcggcatcctcatttcggcagctacggcagcgactcatgctgccatgtcctgctctgtaatcctgcgtcgccttgcctcgcctcgcaaggattgtaaaattttccagttaattttagcgtcctcagcgcgtcgcttgcatttgacaaattaaaattgcatgagcggaaatgcggctttaagttgcgccggatgtggctgactgacttggctgcaacaggaactgactgcttcctgtgcgcgctgccaactaaattacttttccagctgaactttttccacttttcgtccatcaatttgccaacaggtgggtcacagctcagctcggaagtccatcatctctttattacataggcttaaggtcgcaacaaaggggctttaagactttccaagtgtaatcttagactttggtaataatttttgagtaaattcattccaaatacattccataattaatgtttggcaactgatgaaacctaaaaccattagcgtatttatatccaagcgtcggttaaatggcgctggttaaggttcctttctggccaaattatctgcccgggtccttggacccttatgcctcgactaatgttaatgaactgcgatggtggcgttgcctcccaggtggacgcacgctcctcttacctgttgatttatggcatcctccatcccgcgccgcttaatttgcgagagtttattaaatatgccggagctgcaactcctctacgtgagtgccgcgctgcatccagcgactgctgcggaatcctgcggagtcctgtgagtcctgcggaggatgccattagttttgggggggaagtgagaattcctgctctgcccgatcccgactcccggcggatgcactttgtgttgtgttgctggcttagctgaatggctctatttggggatgccgcccacacccattcaccgaaatatatcctggaccatccgggcacctctgcagatatttcatttcatttgtgtccgggcagtgacttatgatgatgaatgtaaatgctgcacttttcgtaccttcaggcagttttgcagtttagctggcgggatctcacgccttaaagttgcagatccttttgcacaattttccgctacgtgttggcgtccattgtcacgttacaatgctggggagttaacttcccctttttccgaacaattgaggcaacaattgaatggcagcaagcccctcgcatttataccctgccctcccctttcgcccggcatatcaaattagataactattccatcgaactgcactgctgctggtgcaacaaaagcgaatgcgttaataacatttaatgtgcctgcccgcgctaatgacatttggccaagttcatttcgattccttcaacgcttttatggccgccattcggagtccgggggctggctaattgagtttatagtcgcttcaatcgctttggcatcccgcccactcgcacatctttccccttcggccatgcacactggtgcaaatgatagagtttcaatatttgaatgcattccaaaatgattttgagttatgataaatcaagctaacttactatcgaaaatatcgatgtactatcgattgttttgctgtttcaattgttcgtttagtatattttcacttttaatataaaaatgtgaaatatactttgactgctgatggtgataaattcgtgtaacctccaggacattgtgcactgtatgtcctctttatcggcgactttgggttgcatacttttgtgctcttgggtgggtagcaaagttttgccgcctttgcaagattttcgcaagtcttgcagaaaattatacaaaaggcgaaggcaaagcttaagggttttgcgtaggtgggtggcatgcaaatatgcatttgattacacgctccaaacaaaggcaaaatgataaaagttgtgcgccagccgccgcagagtgtgcagcgacttttcgccatttcccgcccattttcctcgtttttcccacccagaaagctaagtaaatttgtgtgtttatttgccaaacctcagaggaaactttgcttgcacccaccacacgattttcgcgggcggaggtaaaagtaaaacgacaaagaacacaaaatgtcaatcgaccaagtggaaaattttcattaaattaagaaagcgcacaattttcccactgctggaaaattgtcgcagcagcaaaggagaactgaaaacaaaaaatctaaaggaaaaagtagcgaacccaatgaatgtgcaaagttttatgtttttggctgccgggcgcagattttccttttgccaattttcctcttcgttttttttttagttgcattgaggtttgcttgtgtgtgggtggggggggtgctgatgatagtcgttcccaattctctgcttcagcccctcggccttcattttcggaaaggttgtcagacaaaacgaataaatgtgcttaggcaagcgggaaaaaagcaagaaaaacagcgcagaaattgcatgcaaaattcttatcgataaagaagtgatgagcctgaaagtatgcaacgctttttggctgctggtacagtgggatctttaagaagaagaaagaacttaattggaaagtgcatttgacaaacatttgaatagtttatttcaaaagtatttattatatatgcccatttttaagggttactatttctaatatttacccacttgcgacccacttcatttgctgcctctgcaaatccccttacaaatcccctcacaatcgaaaacaaaatgtcaggcctttgcccaaactgcttaagaaacctttcacaatgccagccacaatttgcttaacaaaaaaccttttgacttgggcttttggactttgtctgcgtttctgttccccggggctctgcgcaatcaatcaaaaggcgcttgtgacttgggaaccccctttgatccgctgctgctaaataagtcgtgtaaactggcaaaatatttgcggtccttggcgaaggattccctgcccgtcgtgacctgggccttcttcactccatgatggctctaatgaagtgttgaacactgttcttggcccattgccatcggccattcgcagcgttgacaggtcagcatgttgaaattatgccaaagtccgcgtttgtttccatcaatatcaatttcatttcctgcttttctgggaatcctgaaggatgttgttacactttatatattcagactaaactaagcctatttatacctaaagttgtaaaaagaaaataaaagtttacatttataactttatttatattaatttatgctctactatatctataacttggatgcatttgtcaaactaatttggcatcattactgtgtgtcaatatttttccgacatcattttcccctcgcctaagtgaaaatgacgagctctattttcgtaaggagttttgacttttggcgtggaaatatttgacagattgatggtgactcgcacaccttgtgcccctcgttgatttctggcctgtcgctcgacacgagaatgattttaaatttgttgttcctggcgctggtcttttggtgcgctctgtcattgtcaattatttatatttgttggctggggcggatgagggaggccgcctcaggttttggtcatgctcctccgcgccttgagtccacctttccagagcccattccccccccccccctctgtattaagcattgcgtgtcagctacactgtgtgccttccttttttccgcgtcattttctgaaattggcatttagttggcgacgagcgggatttacacaaaactcacccgcgaacgcacacacagaaaaccaatctgaaatgcacacgtacactgcgaaaaactattaatatattcccacagtaatttccttttgagagcaagaccaagtgcgaaatatctctatccattaagaactttattatctgagtaccgggtatctgatagtcgcgacactcgacatcaggcgttctcacttgttttttcgaagtgtacccgcatatctgtgaaagttgtctgccttgcgctggttttatacaatgggtgcattcacctacgcgatgtcccgctgagaaatttccttcccgttcaatccagacccccttttccaacctcccttttctccgcctgtcgctcagcattcggttttttctccagtctgccgcatttcctttacatgtgtgtgtactctccctctccctctctctttcccttttacactccccgtctctctcactcttttcaatgtctgtgggaaaagtgttgccaatatctgttactgcatcgctgcgtttgtccgtctgtccgtccgtctctttctgcccccaccctgccgtctctttcgcacatccccgtctcacatttcgtttattaaatgacagcacgatatctgcaaatgaaattttccttcaacgcatttagcctctgccgacgtcgccgctgcaattgctgaaattgacagtcagacagatagattgacatttaagcaacactcgggtgctctgtccctttccgtgtggatcgttccgtctctctcgttcgctgacatttggatgcatcataaaattttgtgttctaaccgcgagtttttttatgggcctcagcactttacctcaagggtattgcatacttttcagctttctggcagttccctaccccgatatttgttatttataaagatacataaatataataaaggtatattaatttcgtcacaagtccagctaaagtcccaaactctgttcattgaccgaatgctgtttgaaaggatttgggacccttcattattgattggttgcctgcctgaccaatgccgaaagtaattccattatgaatgaaagccttttctctacctaaattattaataaagccaaacaaaatgaagtagagaagaagatttgagcaagaacgaaagaatagggggctttggcagccagcattctctcactgaattattagccgggaaaaaagcgttcaactgggagtgccggcaaatgaaaaaacttgccccaaatctctgtagaaatctttagcaagtccaattagacgtttggcaaatggacacagcagcagcgtgcccggaaaagtccagtcaaactaattgctcaacatgaagcggcaaaaaaaaacaaaaaggaagcttctcctacggaaaatattgcagccaaagtttcgtgagcttgttgtttgtgcaacaattgttgcaagtcagttggcggcgctaatgaaaaacgacaggatgcgagggggaaaaatagtttaagggggggcagagcacggcaaccgccattaaattttgcttaataaagttgcagctgctcctcagcgaggaaactgggaaaaaaattaccagccatcagcacttaattgtttgaacagtctaagggaaaatgagaaaaacggggtttccctccaaactcagttacggggtaccaaattcagagcacctggaggcagttcccaatcccagtttcttccttcctcttgatgtcttgatgatgactttccttccgctcaaattgagttaattaaatgagcggcatgaaggcggagatatgtattttcgctccgcgaatggaattaatgagcataatgggggtgattcactgggtagaggggcgggcggggggcggcgaaagttttcaattacccagcatttatttttgttaaattctaattaatgcaaaacaaagagaggtgctgcaaatcgcatagcccgctgcactctagtttccttctgcctcgtcagctttttagtcatttaaattttccgcacgcataaataaatattgacttgtggccaaagtcgaagtctgaggctgtgcgtcaaataaatatgtaaattctttgacttttgttttcaattacttttttcctccactttcgttgttgccttccccgcttttccggtctttttgtttccaccgcttttcatttgaacttgttttccttgacacacagaaaaaagaacagtttttttttttcgattgaaaaagattcttagcaattcaatgatttcttacttatttacaatttaccatttaaaatcgttaaataatattcttttctacgttgagcttactttccaagtaaattcattttatttgaagtaatcttgattttgtgctgtgcagactgacttgagttaaacacgaaacgatatttaaggtcggcaaattaagcaaatttgttacattttgtggtcgtcctttaccgcatcacccatgtggcttgcactcccgctgacattttgagtagtttttaatgggctccattgaacccgacaaacttgtcgatttcctcgctgcgggcggtcttccatagaatcgagagaatgtcctttccttggccaatatgtgaaatagttcgccccttcaaccacaaaacttggcctattctatgtgcacttcgtcttcctgcttctggttaacatggggttcctggaacactcattatcccatttattggcactgcaggcaactccaacttataatggccagctttaagtctataattcttggcagtaagtttacattacgcccgaaaccctttcaagtcgttggctactaactgggatttgcactccctgcctctcctgtttctccggtcctgtgtaatgtcctgtcttggctgccaaagaaaaggtggtaaaatgcaattttccacacgactggcgggttatgaagacgcaggaaagtcagaccacagctccttttcaataagctggagtaaaaaatatatagcaaaagaaatttgcatagattctcagcacatattgactttaagcccgcttgcttggtggattggggattatgtcacggcttaattcaattaggacagattacgcatacgccacgtggccgccctaagcgaaggccaaaaggtcaatgctacgtctaaatcgaagacgctccgagtcaactacctttgtgcctcggagtagtcgaaacaatccgcaaacaaatccttgatttatgcgcacatccttgggcagccaaagccaaacatttatttccttatccacttgtgccaatgtgatttcgacccatcctcgtcattcctggctctcaactcggcatcctggactctggtcagcaatcaggatgagcaaacgaatggggtacagtgaactctggagagtgtaggatgaaattactgaatactggaataattttaaatcgggaatattaaaagtgctaaccattattatgtataagattacatatgtcagcaaatgtttattaagtgttcaataaccaaaagctttttaatgaccaatcattcactatattcgggctattacatagtattacatttgatgtaatcctcgcagtgcacgcctgaaactgacccagccaaggattcaccttactaaggacctgctgcacctgctcctttggcaactctcggttcgtgcgctgcgttgatgatgatttactgttgtgttgctgccaggatttgcccgtgtactcgagcgtgtctgagcatgcattgtgcgcatcctgaatcccacattcacatcctatgcgtcctgcatcctgcatccttcgagttccgtgctcatcccgcttgatacataaccttgaatgcggttttgatgtttgtcttgcattcgactcgaatagagtctggttttatcccttttgccaacttctctgtttgattatttgtacaaatggccagcttctctccgcagtttctccactccactccgccagtctcgaagtcctggcaattccactgccatggccatggccattgccatgcgaaaagcggattgcattcgtgttcataaattgtggaaggcagcaatggcaatggctccaaatggcagccaaggaatgctgctaaaaaattgctgataaatgatctttgctgttgctgccgcgcgtagatattttaatattttccgtctcaagctcaagctcaaaatgccggcaggactctgggaaaagtccttggctaagggcaaatcaagttcactgctgcagctgctttcgcagcaactgcagttgcttttcccgctgctgctgctgctgctgcttttctgtctgctcactttgctaattccacataaacactgccaaatggcaatcgtctgagctctgaggcggtgctgcttggtttagctactttctggttagatatagttatcttggcagttagaaactgggctattccaaaaagatcttctttcaaaagatacattttttgaatttttaaagtgctacattttagctactttctatatgaaatagtagggcagcactgacgattctgttcgacacttttgtgtatttctggtccagccaaggactcaactggactagttgccacatatgtcctgttcgcatcaatctcactgagctgtcagcggacttcgggggctccaaggcggctccagtggctgggcctccttagatcttgtcttgttaatgaccccgcataattaccccaaccgtttccgcgctactttctactcatttttttttgttttgtttgggttgagttctaagccagaggagccaagagaagaaaaactaattttctgctgctgatttcgaattaactgaatgaataaataaaagcacgaatccgagtgggacgaagcatgtttagctagagatttatctcagaccgcatagtaagttcgtcctgatttcccaggatttaaagtcactcttattacgcatttttggtttaattgcagcaaaggtcgctcggcacttgcgaactttggtgattcaattagttcgtggtgttctttatgcaaatttatttttattgctgcgacttaaacaggatatgaccctgttttgcgcacctgtgtccttctgtgcactcaagctaatcccgatggtggctggactcgtgctacaaaagcatccatgaatttcaatcgcctggcccgaattcctatgaattttcatcatttatttaatgttcttgtcgctgccagtggcatccataaaaatttgattgaaatgatttcgaggcaaggagctgtcgcaaaaatacagataaaagctctacctacgcgtgtgtgcgcggttggtcccttatatatatttattttattcctgttattttgcgaggcgcttttaattaaaatcgggtttatgtggcgtcctcgttgggccaaattacttggcaacgtttttggtccactgaaaatgcctaagacccttatgccacgcccccccccccttcttttttaacgccccacacagcgagttgctattatttaatttttatgccccagcgcttttggcgccgtaatttgagacttgacaatttgccaaccagcagaaaacacggtaatgaaaaatgtctacttaatgagatatgtcactgttatttacactttattttgaatatcaaagatatattttaatatgtcaaacaatttaattacgaagtcttaagtgcgaaagcccaacttcaatgggtaattggatatttagaacaaatactttacagtgtagctaggctagtgaccatgattatatccttcctggctgcctaaatatccctaaaaatatccgcaatgtgccaaaattgtaaccgattcgggtttgtatctggttcaagagcttcgtggctcgattattatgacagattcaatgggcggagcggcagaccgcagaagattttgtttattgtttttttttgtggtggcgaatgtaatccgatttcgctgccaagagcagtgggcgaacttaaaccagaacttgaagcacatttaaaacaatctattacatccacttgccactactaattctatctaatcatctatctctgcgtatctgtatcttttagtgctgagcaagggacagggcgagacctcccgctacagatttctgggaaaatacggtggctactgctggattcttagccaggccacgatcgtctacgataagttaaagccgcagagcgtcgtttgcgttaactatgtcataaggtgagtcagtcagatttccaatatatatatatatatactaaccgtagaacaacaaacgggtcccaaagaataccgaattgagccatttcactgggcgggattttcaattggcgcggaacaatgccggatatatgctcattacatttttgggcaagttaattttatcatttaattaagccaccaaacaggaagtgaaattcttcgtattaatcctgccgtttttaatcgaccaaattcaaatttcccctctccatttcaaatatttgaacagccttgaatgggggggcggtaattgtgggtggtggtgggtcgatggtgcgtgtgctcggcatttgcataaagaattctgcgcctcagctggcgctttatgtaagttttccccacttttcgcaacgatttggttttctaatccgtcatttattgaattgtcaccggcgagtggcccagattttccatttgataacagtgccaaattagcatcccgcaatcgattttccttcccctcaatttccatattcataatcccattcgatattttcgatttgcttcgtgcgcacaacatcgtttcgtgccttttccatttgcgtttttccattcgcgttttccacataatatatattttattttaacggacgttgcgtgagtccacgtgcgggtcaacaatgaataataaattaacaatgtctctaatgaagaagctcctctgaccccccacctaccccccaaaaaaccaacagtttcccccattttttttcagctcgactggtaagtaccccgcaccaatttgtatttacttaatttaagcgtgtatgagcaaatatttgtgcattgtttcgcttcttccttttcgagattcacactcgcctgccccccaaaaataaaatatactcataaaaagagcagtatataagttcttaatttttttttattaaggtgcgtgtgtaccaaaagtacaaattcatttttaattgtgcaccttttttgtgggtttaaaaactcgtgtcgtttcccatacactttcgattatttcgtagcccaggggatttattatgattcaaattctagatgaaatagagaaaatagttaaaatggaatttaattactcactactcattgtattgtggtaaaagagacaatataaattttaaaattggcagtgatttctctcggtgtaacccttacccgcacatgatgacgaatgcagtgatgcggtgcaaatgaatgctgacaatttgctttaattcacacaacatgtgattagcctccacccccactgtcccccattttattcattttattcatttctctcgtgtctttattgttcttttttaactgcgtcaatcaagttgattcaattgttcaatccttgattaaacttcttacaaatcgattgtgtaactacgcagtgcgtgtgcgttccacaaaaaatgggggattggttttagaaagtagggaatgtgaaccaatcagtaggatacacataaattagtttctgaattatatattcgcattatattcgcattatacaacgaagatttttgtcttaaatattacttaccacttctattcatctttgatgtttagtgtgacagctattcgacccatttctattcatttgctatccgttttccactcgtgtgcatttgaatgacaacaaatatattggtttgcttgtaaatattagacctatttgtttttgtaaatgttgtttgcctaattgaataaaacaatattacacaagcaaaaagagagcgagtgagcctttgaaagactgccaacaaaaaaaaatctctttgaactgtttgtttaccttttgggttattctcactcattatatacgatatgcataattatatatgggatgttgtttggatttagatttactcggagcttggcttgatttattaactctgcgatagcagtttctcaaaacgcaacagacatgtgataggtggcacgataaaaaaatatcaaagatttcagtatgataacaagctaaaatgagcagtaaagtattatgaatgaataaatcaaagaaaggattagtacttgtaattcaatttcaattttctaacttcttcactctagtaatattttatatttaacaaattcacaagctttttcccagtgcagatcgagcgttgttccgtctctttcgctccgctctctcttaacgagctcgtcactcagttggcagctgactcaaggtcgcttatctttgggagcggtgcaatctgtttcagatgcgtaattgccgctgcatatttatagattcccacattttggcgaagccaagaaaagcggcgagtactcgcgattttcccacgccaatccaattaacattgattagttgattttgcgctcgctgtcctggaggaaatttgcatttttatagcttgtagccgtagtccttgcataattccagccacgcgttgcttttaattaccaaaagtctctctcactttgtcctgcagaggtttttgctctcctgcctctcttgatttatcgcacttgacgcagcgcagagccttcggctgaaatcacacaccctgtgttttgctttgctcgttgcctgaaactttttggcagagaactgcaagggtggcacttttttaccactcgactcacaccctacaattttgtgtgcgggtgctactcgccacgcacatcgcgggtacttacaaacacacagtataaatctgaacatgcagacaagacaccccgttgtgtgcgcacccgaatcaatacggtgttttgcgtcgcgggtgccgctcacacagtgcctaaaaagggatgagtgagaaaaacacttgtgggtataccgttaaacacatgggtgtttccaaaaatactcgggtgtttccaaaaatactcgagtggtctcgtaggtagtcgagtcaaatggcgccatacataatgattgttgagttcttgtgtctttggtccagtgtctcggctgttaattgccccttttttgttttttacgatgcaattactagcttgttaggattcagtattatttggaagccaaaggaaaaggtcacaataatggcagaagcggctgatttcgttaaaaataaaattaacaatggaacatactcagttgccaataaacataaaggaaaaagtgttatttggagcattttatgtgacattttaaaggaagatgaaactgttctggacggatggctgttctgcaggcaatgccagaatccagtgctcaaatttttacacaaaaacacctccaatttatcccgccataaatgttgtctaacattaagacgaccaacggaattaaaaattgtttcggaaaacgacaagaaagtagctattgaaaaatgcacccaatgggttgtccaagattgtcggccgttttctgcagtaaccggagccggatttaaaaatttgggtgaagtttttcctacaaatcggcgctatctatggggaacaggtagaccgtcgatgacttactacctgatccaacaacattaagtccttatatttaatagatactttttaagcccactatgtttttattatttagattgagacattaaaaaacgtaaaaatcaacaaatgccgtctttaattgcaattactttatgtgtttgaaatgggaggcacccattgagtccatcaaagagcaaagacatgagcacaaaaattttcttgggtattcccttttacccttcatttcttatacccgtcacgcttccacccatacaaattttaggcgtacaaaaaatgaccagagaactgcagcccgcatacaaaaaatgacctgcggccgatcgttgactgtgcgtccactcacccatacggctcttgcgcagcaggcctcgggtggtttttttactcgtaacaaaaacacaacgtcggtaaaacactcgagtattttgtgttgccgcaagtagggtgtcaaaaaaaacggggtgcctagagtaccgagtgtttatcgggtggacgtagagtgcgagtggcgggctgcagttctctgctttttggccctaatggaatttacacgagttcttaacactttcccccaaagtttcgaatggtttttttgggctcaggacgccattttgtggccgagcgactaaaaattaaaacaataaattaaggacatcgagcaggaggcccaaaaatgtgttgcatactttggggcaataaaagggggatttcattatgattgcccgaccttcccgataaaatgaactgaaagatggccagatggctttaaagagaattaaagactgcgattcctttgtactttgtaccattcattgcattattcatgctttcatgggcgaccttttcgcagagagaaattccatttgcagaccacagcataaatatttcatatacacatgctctaatcgggattattgacgggtttctcctcaacggcaaagggttctcaagttcctaagtttgtgttactacgcccaaaagagtttttctttccttttacttcccttttagggtttgatgtttgcgtggtcgtaattttgattttgatttcttccgagcgataacttcggtcacctggctaattgaaaaagttgaaggcagtcttggagtttttttccttcctttttcccgttgaccttaattgcctcggatcgatgttccactcaatccgcgcacctgcacatcctgactccggtgtctctttaatggaaatggaatggtatttggcagcaacagccggacaggcgctaaattgccccggagtcagtgcagtaagccaaaggagagatttatggccgcacaattaccaaaaggctgttacaatggcacatagatgtgagtggggaattgtgggagaactatccctggttgccaagaaaataaatacacagtgggaaaacgtacaaaaataaatccaacggatttcccgatgatattctgtttaactcatctctcataggtgtgattctagagcttagctattttgtttatacagatatctaccattcgagtcaattaatattttcggtgtacttcagaatgaagaataacgttgcttataaatttccccctacttttcccgcaccgataaggcaggcttagttatctggtcacgtagtcggcagcagttcgatcgtggaatccttgggcaagtccttattaaagccgcgttattaatgcggctgagcgatgaagttattcactcgctttcgataaaccattctggcccaatttattattctaattttgccctttttagcctgcaatccccaaagttgagcggaaatgtttgttgatttccgggcggactcaagtggccgctctgacgtcgggataattaactgtgaatggggtaacacttggaaacacagttggaaacactaggggtatgctcggaaaatccagctggtggcaagggagggcaaggaacatttcacacacgtgtaaactcaacaaaattggaacgtaaagcgatgggaattttcaaccacttgacgttgatgtgaagaatttttgtctctacttaaggaatttaatttgggaagtagaaacggaaaagccagtttgtggatgagtttttcgtatccttgggcaattgtttgcttatcgcacagccttgcagctgattctgttttgatgaagtcgctggctctttatctttatctctatctctatatttacatccgtcctgtgtgctgtgaccccatcaacgtcaacattgcgtatacgcaacgagtgccgcccattatttgtataaatattttcatcattcctgctgatgcggcaacaaaatgacaaattcatagtcacagctgagcccgctgaatcaacttgtttgcatatttattatttgtaccttgatggaaacggcgaggaaagcgtgggaatgccgggaaaagcagggggaaggcggatgcggatgaaaagcttgttacagctccacatgtgtgtcgttaaattatgtcctgtgtacgagtggaaattgcattttgattggcttgttgctgccgcagataggacagcatcttgagctcactcctcatttatttggatccccatttcgccggcgaagagttgggtttgattgcacatgaaaacgtttttatgctgcgcataaaatttccgttgccaaagccaagctctttcggacaaacggaacgtaaacgttgtaaatttgccagcatcaaaaatggatcttcaacgttatcgaattgcgaagcaatcgtttggctaatacactgaaaacactgaaggtacagaaaataatttgtaaaaaaatatattttgcacacttcattcaaaagagtatgctggtgcatagttctagccacctttatagattaaataatacgaatttaataggtatgatccgtgccttttagcaaaattatggcttacacgtttccaagtggaatctaactttcatctctattgtaagcccacattgatggcctttaggttccttttaggcagttcataatttgatgggaagccgctttaagagcaggctttaaaagttgatggagtgctcttgtttttggcctgttttgggttcggtagagggttaagaaggttaagagcgggaggaaaagtgccggattaccatattaacatatatctgcggcaaatgccaaggcaaggcctgtgtgatacgcacaataaaacccgataaatccgcccgaaatcacaaaatgttgccaacttgaagactttttcacacgcaaagaggtgacttttccggcggagtgcggggggacacacgcacacagggcttttcccgctttctactgcgctctcgctcccacttgagagctttttatacgccgtggaattattttcctgtgcttccttacttcttttcctaatgtcgagttttcgaggccgtgcgttgcatatttgaataaacgtcaatgtaattgacacttagcggagaaatgcgaatggcttgtgaaaggtggaagaaagtggagaaggcagcaggaacaaagatgagcgaaaaaagggtgggggcgttgcctcttttttttttttttgtttggttggccaatcttgtggggtttccgattttcccttccaagcggaagtcaacgaactgaacgcgtgtctcctaagtgtgtgtgtgtgtgtgtgtgcgtgtgcttacctgtttatttccgcttccacctgtctctgacaggccgttttgtcctccgtccttcggccagcaaattgtgtaatttagctcacgaaatgtattttcctttgccatcattttaaagttggccaagagtcgggcgagtcggcccataaacatcagcattattcatccgccccatttggtttttcaccgtagaccgtttgtagccgcataattctggtagatttaatactttgttttacgcatttttccttttacacggaaaacaaaagataaacaacttgatttcagaccatatatagggaatttttagtgaaaatattaatattaatattaattaatattaattaatattttcggatactatttttaggccctattcggggtcaaggaaatccctccaacacacagctataaatacacgtgccgtgcgatttgggcaatgatgttcctaaaggtcctccccctcactaaacacaccctcctcctcttccccccatcatgcaaacaacagcccctctatccatcgccaatgatgtgacaattacctagcatacttttttgggggccggccctgacatttgtcggacaataaaaagcatgagcaaaaggcaaatcaatttcaccttctcgccgcctattacaaaatttatttgtttgttcgctgagctttttttttatggcgcttcgatttaacaggaaaaacaagggggaaaatcggcaaaacaataagaacaacatcatcatatgttttgttgttcctgcaaatatttttgcgtcgcatttgtgtttgccttttattttttttctgtaccccaaacgttctcactttctacgcattctttcctctccccgtgtgagtgtgtgtgtgtgagtgtcgttgactggtgaaagtgaaagttctgctcattttccatgccattgcacgagcctaaacggtgctctctcttgtgttaatgctctcgctcgctctccccgggggattacataacgcggcaaaagcgaaagtgaaagccgagtgtttcaggaaaaagaaaattcgagttcaaggtccctcgtaggccgcatgctcaagagagatttgtgccgttaaagagagcatttcgctctctttctgagcctaaaagtaggccgcattggtgtgaactggagctagcgacgatttcccaaattccgcaccactcccccctcccaccatttaccactcactgctttcctctctcttcccagggcgtgggtaacaagttcctgcttgcaccagaaaatcagaaaacagctgagcggagaatgttggaggtgtgagattttgggggcgggggcggcacgtgtaccgttattctaaatgtgaagagcgattgcaggtaatacggctatctggtaaattgtctccaggtggtggcacctcctttttgtgccagacttttgctttgttgtttcaactgctgtgttcagcgataaaagaaagaagaatgattcagggaatgaggattttttcttgatttcggggtgttctttctttcaaactttacgttttcttttcgacgactaaaaaatacaatttccataagagtcttaaaagaaattcgttatcgataaatatcaatcgactcgataagcaatatcgatattacttaaatgtttatttccaaattttatttttgagttctcagagcagaaagtctttttgggaacgctaaaagaagatgataaaaaaagagataaaacagggaaggggaaggagagacaagcatcttatcgggctcaaacatttggcattgcataatttggggcgcaaacggctggcaaatattcaagttctctgagcccccaagacagaagtgtggtgagcagaaaagccggagggggtgggaaaagtttcccatcgtaattgcaaattacgcaagtggagaaccgagggaaacccggagacagagccgagttatcaaaatggaaatgtttttcggcagttgagggcgtcaaagcgtcggccccgaaaagcagacaaaagtcaatgggaagtgaggaaaacacgccaactacgcataaaactaaagaactttcggttccaaagttgacacaagccactgtcgaagaagaataaagaagacaaacagcggttcgataaatagagaaatgaaagagttctggggaaagtggggtcctaagaaaacaaggggatgaaaaatatttttacaattgttcgtaagatgtaagtcatatcttccagcttagcagatcaatctatgttgggttagttactttagatatatagatatattttcaaatcaagccataaaatattcaagaaaagttccattatgtttttctaatccttaatgacactgttgatttcaatttgttgttttattttgcgtacatttagacgcataattcaaaaaattcaaagacataactatgacgacacggatagcttgtgaaatatatatcctttccccttccgatggaaggtcagctcctcgcacctcccccccgccccttttgggcctacgtgagctggagcaatgccaaggcctgaaattgttgaaattaatgtgctaagatcttacagagaagctgggcgctagataaacaaattccggcgatctggctatttatattaatgataatttgccgtgctcgacatcgggcgacaaaccgcttgactataatcggatcaggggaacgcataaatcgttggcctcctcactttttttccattaattcttttatttattatttggctgttgctgctgcttcttgctccacttgcaacatgtgacccgatgggaggatggggatgccagtatcccacgcaattcgctttaaatctaatattattttaataatcgccagcctcttgttttttgtcaccatcccattccattttttccatcccattccgctctgcttctcttaattcaataaaaaactgtttacaaaaagcagcgggcaagtggaataggtatatggtgccctatattaccctgttcgaaaagaacatttttggattattgcaatattttgaaaagatttaagtgtgtttagagctaaataaatattggaaactacaaaaagaaaggggactttagctactttcgtcattaaacagaatctcaccaagtctgctctacatttctcatagatatcgagatgttctttttacagggtatcacagcagcgaataacaattagtgcgcgccaaatgcgagtcacatgaattttgtcgccgtgtctagattgattcgaatgcttcgcggtcttgtcgatgccgaaacccattttcattttcactttcgctttcatgcggtcagcgtgtgcacacacagagaaaaatttgtgatattaaaatatggaaaatgcatacacagctgctatatgtgtttgaaaaatatacaatacattccccatttaaatagctttgtcgaattttcacagtttctttttcctttgggataacgacacattcggaaaatttgttgccgtgcagcgcggaataggaatgaaaatagaagtgggaggcatcgaaaacagcgcgtggcatgagtatttccaaaatagccgaaataaaaaaaagcagaatataattctggtcacatgcagaacgatgaaaatgcccgcgggagtcgagggggaaaagcgaggcacgtgggtttattccatttcccagcgagcgaaaagccagagaaagagaaaccggaatccaaatgatggaagagcgcagggaagaggctggagcatccgatacacatgttcctgagtgacttttgatggatgccacgcctcggctgtatatcctacatcctgcaggaccctcttttatttgtttttccatccttctcggtttttatgctgcccattgtccctttttttaaaggccgttttcttcttatcaatttgcgagccagtttattaattttgccgacccaaactagatttatatttgtcccgcataacgacgtgcataaatcagttggacatctgcgggaagttttggttatgaggagtttttgaggagttatatatatatttttatagtttgacaattctttaagtttctcgtacctatgtataacagctgatcccaaccactcccaatccgattgtgtgcactttcgaccatcgcgtgccatttggtcattattagtgggctcttttattattttggccagacattgtttggacagtagaccaagtttaatattaattcgtgacccaacgcccccaaaaagtgcccgcccaccggaggggagcaatcaatggcccagtcttctggcccggactggctaactaaccgaatgaataaatgagtaagcgaatgaaaatgggcaaatggcttttcctttgatgacttcgttttggagccaatttcccgaccgccgtcgacattcaattgcggcgctcttggcctttttattagaatttcgctgtatggagagaagtactcatcatcatcatcatcatcatcatcattaccatcatctccggcatgccagccatcaatcatgccacgccaaattgtttagaataaatgttgttttaacttattattattgttttgttgttacttgcgtgtcggctgtctggaatcattctcgctttttgttgcggtggcttgttattttaattaagcgtttcattatgtcgctaatttgttgaaattaaagctgggggtaaaaaaaaaaaaaaacgctaaaccaaaaacacatgacaaagattcggcagcagaaaacgtgacacacaatttgtaatctacacaattattcgatggcgataccatcttgatcgtcatccatacaatatttggtcatcgaaattcgagagagaaataaaattgcacagataagtagtgaatattgtggcattttccatttgcaaaggtattaaatatttctttctgtgtacccaagcccatactaaccttttgttaaagtgttgccacttttttttttcaacaacagatgataattgtttatatgtgttcccccaaacatccatcattatcgtcgtatctgtatctcgactataactcatccgctttcctgttggcgcgtcggtgaatctccccgctcacttttgcaccatctctcttagcggtggcttttgtaccttttgttggcttcatttcgcggcgcttagataaacatatacagatacagctaccgaggaaccagatacatttatggggcagcaggacgtggaggccttttcggcctctgttggtcgagagcacacaaaaagtgtgatatataatagccagctgcctccttccattccacgcagttttttctccgacagttgtcaacacttgagtggcgtgttgtgctgtccttcgtcctgcgaaaaacataaaatccatgggctgtcacaaaaggataaatcaatattggtctaccactaagatttggcctttgattcgctgttgatacggttgctcgtaaatcgcgtattatccaatggcctcccccacggcgagactttccgatcgatttgcgtcagctttgataatcttatctgtgccaccaatccgcaattagcttctggtcaacttatggcccatttataatgcattcagcaagccattaacggaagttcaatgtgcactgggcaaaatgattccatttaataatagcaaacacacgtacatagtgataaatgcatatcattcctgagtttaaaggcagctttcttttaagactacaatggaattataaaccagttttatctgagtgtctttctgcctatccactccgcaagccattcaaacacacctgtttgcccaaacattttgaacaaatctgtttgattgatcgtgtatcttcgggtcggatattccgcatcatcgattgaagcggaacccggcacacagtagctgtttaagtaggtagaaaaagggaggatatcggaagagaacccccgaattatctggagaactcccccccccccttaccgctcccattcctcatctctgttttttttgtgtgactgcctcgtcgttggccattgttttttactcttgcaatcagaaaaaacttgatctgatgttcggtttggtttctcgtttacctccacaccactccccatgaacgtgtccgtgtctgtgtctgtgcattgccaaatctttcgccgactttttgttttcattattttcgcaaagtgctgggagagccgcccgtggaaagaagaaaccagttccaccagatgccggccggcacacaaacggcgaaacacagacggcggcacacattcgcctcggcctgttcactttttgcactttttcgagcggtagcatggttaaccccccgtgaagcacataccctccgatcccgactctcgatcgccggaacacacgacggctcttcgactcactcgctccgcattgagtgggctttcgagccgttcatggtgcccggctcggcacgtatgccagttttgaaaagtccatacataccagaccgggcccagaccaagacccccagacctctgctgggggcatttccacggaattccaaaacaacgtctgcacctgctgccccataagtgactagccggaccaccacacctgtggttaattgaatagggccacaagccggaaaccaaccaactaccaactagcaatgagcagttcgctttatggatgcagtatcttgaagatattgattctgctcggaattgaaatacttgtatgctactatgttgacccctgctgtgcctatctatttgtctgcaaatccagtagaagcgacgtgagtgaaacggcgtcgcccctttcgatttcacgaattcgtcgtctattgagctcgtttcgcaaattgttggcagaattacgtggcagctgagcgagacagcaacaacattgggctgcaaccaccggcggaacttatgaaataattctccagatgccaagcatatacaagttggggcatcaggggatttgggggttagctgatatgcacatatgtgtgtatgtctgtatgcatctgaccgatttgcaactgcgcatatgatttactgcactcactcgagtctagacccagtgctctcgatatggtcatgggtttcgatgtcgatctggctagaatccatgtgggcagatgtgcaatagctatctgcgcacataagtcaatttgctttatgtttgattgccggatgccagcaaacttttagtagggtattactttctgaaattattgcgactaatgaatgtacttcgttcactgcgggtttgcaaaagatggtgataaaaccaatttgtttagaagataaatcaagagctcgatttctcacctggcaaccaaattttggattcacaatttctaattgcaacagctttgatcgaactgcgtgtattatgtgttcaatagaagtattatgtaaacgctttcctctataaattcgcatataaatccagccaggttcgtcagctccgatttgaagtaaacatttgaaacatttgtttttgcggtcgaattcgtggagataagaaaccttatcccccccctaaaccgattttgaccaatccctgtgtcatggtcttgagtcatcatgggactatattgcttacgactaacttccagccgaatggacttctgggggcttgtcattccgaaaggcgactgagcatgatgcagcactttgcgatctgacagtcggattgcatttggcggggtgagtggatgtatatggagtatacaatccatggagtatatacatagtgttcagaccggtttatctggacgactgatttatttgggtcatatattccggagttcctgggtgcatgcttttaatgtgattgaagtccgacggttgatttgtattgtggccaagtgaattgcagaacgcttcagcttgtctgcggcggcatccagtcccatttcctcccctttccgtccaaaagtcccgcagacgccaatgcagcatccgaaaataaactcgaaaggggtgaaaattcctttccagccagccaaaaaaaatgtctttttcgtccggcttttacttgctcgccttccttctggctcgttttgtttggttttggcacactttgagtttatttttaaaacaatttccactgttcgttcatggcttgcgaaaaattcccatcaaagatgcggaaaatgtagccactgacaaggtgataactgctcgatcttgtccagtcaacaagataaataataatcgattcattaaaggggtcgataatggattgaatgggaatggttatcgcaggcagcaagccagaatcgagttcactatggtaatatactgtctataagacgcaaagggggtggttgccttaagaacttaaagagcataacaattttaagaatttaaataacatttcaaagtttgatatttcaattgatattatatttataagaaggttaatttgtcgagatttagattgaacaacatttgcaatggacagtagtatgttgccaaatgtatctttgtctgattttttctgcctccaattatttatggttcgccttggtggagaaaatgtttggcccgaatttaatttgaatttatttctgtcctcctcagcagcaaaaactgcataaacatttcgaatttatttgccttcattccgactttaatatggtgtttgccatgttcttttctgctctcctgcggatgtgtttgctctggtttgggaaacacatttctggtgatattctgacattttcgaggggcgtgtgggagtggaaatcacctttccaccgcccacattcgttcacctttcctctgtcaagaatttccatttaagtgagcttttaacgaagaggctcacgagatttcatcagcgagttgtgtaaatttgatgcactcgagaagtgagaagacaaataccactaaaggcgatataccctcacacacacgcacacacacactgacgcacacttacgcactcacctacacacttaaacgctttatttcgttttcaaggcaaatcgtaaaatttctgcaaatactttgctcgtgcctcgtctctttcagacgagtgtctgctctctctttcacttcgtgtttcgtcctggcaggcctattatttatccttctctctctctgaatgtgtgtgtgtttgtgtgggcttgtgtgtccttttttatgcctatcacgcaatggctttagttttatggcgaaattagcgaatgtcgacttgggcaatgccagctcatatttgtgaaatattggattatgaccaagctatacagagaaaaagaactagttggcacataaagtttatctttgatgtagcaggatctttaactaaagatgccttaatgacaccacatttttaattgcatggtcacactgctgaatagggaatatcactcatccgccatcttcgttgtattcgatcgcttctaacaattttctttacaaatttgttctctatttaaagacaatcctttcgtgtggcagctgctttcgagttgttactgtacgggaaattgaaaaagcaataagttcttgtttccaactgataaacatgaatatttgtggggtctgtttacgacttttcgttctgtggagtgggagggcgattcctttggcccacgcatcgatttccgctttgcccatttaggacttttttccctgcattaccgctgtcatacttttaggcgcctgtaaggccatgaataaatacaatacaaaatacctggacactggtaatacgaacacgttttggcgttatcatcactatcagctgatattgcgggttcaacgtttaatgcttaatttttgtagacagaatattctgctctttaatttttggagaaagggagatttttgagtgacagaggtttcgtttgcggtgctcagctgatttgtttggcataaaaacaataataaatcgctggtgaatatgagagaaatatttcagcttcctgctttccactcaaaattcagtcacagaacgagtgcttctgggtggaaagcactcaaaattcagtgcgccggcgttgcgctctcttcactcagaacgcgctgctctcttggggagccgctctctatttttggcgtcgcttcgctggcgctttgaaaaaagccatcgctttcggacttccactcattcgtctctcaaatttcgcagcgctcacttcactttttccgtgcactgctccccgaaaaatataaaaaattataacttgaaccgaaaaaaacagagaggcgcactagtgacaaaaaaaaaaaaaaaaaaaaaaaacacaaaacaaattaactaaactctgccgccgccgccgttgctatctcgctcgcacctctccgatcgccgcgccgtgcttaaaaacaatcgccgattgacgttttgttttacttcgccagctgccgtcgagtcgagtcgaagtgcaaaaagttaaataaaatgcttaaaatccacgcaaaggaaaatactaactaaacacgcccgatcggaactgtaaatatttaataacaaaataaccactcaaaagccaaataaaagcggtgaacaactaagttcaaaaggtaaaagatcaacagaagcgaaattaataaattacataaaaagcctgcagtttttttatacacctgtgaacctcgtgaaaaaataataaaaagtcagcctgaagaaaataaaacaaagctaaaaaaaaaaaatacaaaagttgacaaaaataaacttaatcacacacacacgcgggggcctatatgcaaattataaaaaacatataattgctattttaatcagccgctgcctgtgtgtgtgagcgattatcaaaatctgaaacggtccagagcaaaaataaaaaacgtccaaataaccaaaacccattggaagctcattagaaaagtgtgcaaatgtttgttacacgcggaatgcagaaaagcgctcaaaaaattaataaacgatcgtataaaaatacggaatatgaaaagtaaatgcaataaaacagacaaagttttacacaacactcgttcctaacctgtaaaatgctcagctgcagcgcagcagctgcgacgccgactgcaacaaattgcattctgcgtgcattgtccaaaaaaaaaaaaaaaagaattcctctctttgctctctttcttcgccttgctgttcgccacattgcagttgcaaatttgcattacataaattcgctgagcattggcatttgtttattaaatcttaatggtgtgttttacgaccaagagtgcgtgtaattaaacaaatttatatattttttgctgctgcaatcgattacacaactctccgtaaactcaaaacacaattctcaattctccactcttttgatctcgttttactgtcttttcgttcattcaatttactgcacacacacacactcacaagcgcgcacaattactgctattttaggggggctgttcaagcaaaggaagaagcagaagagggggcgcggcagggggacacccgttattgccctgcaattgaaagagggaaaaagaataagaggagcaaaaaggaaaggagagcgaatttacagcctctcgcttttcagacaatttgtgtttgttgtcgtccgcttgttttgttcctctctttttatggttgccgatttttcgtatctccacctctgtgttttccgttcttcgacgcaatttgttacacaataagaaaatgtgtttgatgcgacatcaaagctcgcaaaaaggacttccaagcgatagaacactgtagcagcagatgcatcgttggctttcagctccaaaccttttcaataacacacttgcaaaatgaaggatgtatagtataggtttcaataactgtcaattggtttttgatttactttaaaatttcgacatattccgaacggaatccggttaaatagttatctctgccactgtttcgatttattcgcttcaccttttgctcaactgcagcttgtctggttgcgctgtatagtttatttgtgcatctgcgaaaatcgtgtggaaaaggggcgcggcaaaagaacatcaggcgatcgagctgcgctgctgacttcgcacttcgaaagtctcgcacttgaaaagtcatcagagcactcgaagattcgccatccgcgctacacgttcaacgttccacaattagtacaacttccactcgagttgcacagttcaagagttgagaggaaagatcgcgggtgcactttctatctgtatctcttatcagcggtcgttctcgaacatttcatcaacccatcggcacttcaaatagcctggagtgttttttgcagtgcttattacaatcacagcagagggcgtaacgaaagcacactgtcaaaagttagtaatcagtgaaaaatctaatgaagtaataattttttgacatattcgccatgtgactatttcttcattattacgatgtattggaataactgaaatagtattcatttttgtgttgataggtgtttaattcgctgcaatttgatttgcgcaattaaaaaatcattctatttcctcaactatggcatgagtaatctggtgtaacaatactaattgagacagtgacgagggcagtgatatatcattgtatcgtaacaataataaatttgtaatccgaagactcatttgctaaatacttgtaaacaatttgagctcaaaagcgcaaatcgaatgtattaaattcaagttttcattcaagcgcattccttttaataaaaaaaaaaatgtgttataagattccattgattgtcagtggacaacgtagtcattgttatttagcactccagattagctaatatattgaaaaaaaaaatccaaaaatagccccttttgcaactggtttataatgacctttcgacaattcgagttgcgcattattggtgctatcatttcaaccgtagctgtacgtatttacttgcgcattttcggaggccttcaattaataatgtgatgtaagcctcctccgccacgaaaaggggcagacccaccggtaccgatcgtcggttctaactggttgggactggcccgtgtcaggcgacgggccccaaacaattgtcgagctcaacaatgaagatgaagcaattatttaagtgtatcagcagcccagatccaactacgtccgtccatatctataggttgtgactgttattgtccactcaatgccttccggcataatattggttgggtgggtgtgttctctgggcgtatgtcacccaatcccactaatcaatcgattcttgtcgaattgcgcaactccctgcaagtcgtgtgacattgagcctccttttccgcccagaaagtgggttggtcaccctcgaggaaatcgcagatcttcgattgccccgtggacagaagacaaaagacccttcacttcaatgtcgagctgcccctataaccacttctcgaacgacgtattttgtactatttcaccagagggacgagcccccaaaaagtttaactgcctgtgttgctgttgttgcgcccgctaccactggaaattataaataatactgttcggctgtttgttttggcgttggtgttggtgttagtattccgcctcatcaagtccagcactcgacgagactcatatagtatagttatcgtgcgatggcgcctttatcgccagatcagtcgcagcacgcattccacgggggcttcacgggggccccacgggggcttcacgggggccccacgggggcttcacgcgctcagcgcttgactctcaggcactccgtgcatgcacagttttacggccgtttaacgtaggcactccggacggagacgtcgtcgcccgtccgccgtactacggatcaggatgagtctgccgatcgcgcgaatgctcgtatcttatcgcaagagaggtggaatcaaagttcctgagacatcacggcagttgccgggttctctacggattttggttctggttgcggttccatcggattactgattacaccctgtagcagctcggagctgcttatcaatctgggtctggtctcgctgttgttcttgggacacacccacctagtggcattgctatctatcacgactgaaaggaatagaaaaaaaaaacaatatgaacgatggccagccgattctgatttcgcttggataattgataatgttaaaaaatcggtctggcattggggaaacgtgacttatcggcgggcgaaaattttccgatggcagttgtgaaacctaggaaaccgcccataagtcgctaattctgaataggaatggtcggtgatcacgtttgacccaacgctacacggacttttacctgcaataaaggtgcactaaaattagttctttgggaattttcaactgatgatgatgatttggaattctcaattggtgaacagtgttatcaaaacagcgtttgataagtgatattaacctttgcaaagaatgatattgtatttctttccatgttctcaaacgaaggggttcgttttactatagaaatatcggctcaattcggctcgttaggggacacgtagagttaattagtctagttaattggtatttactaacccagaacgagtggcaagcagctgtgtcagctgattgcttgaaaagagcgccgtatactcttttgagatactgagacgcattgcattgttcagatactttcgaacgaatcccgcgaatcgcttttctcgccgtggtgtaacaaacgagtgcaacgcgaataagttaccgaaaacaagcatttcaattaaacccaattcgaatcgcgtttgtgcctcttcatcttgcagtaatcttgagaataaacatgagatatactcacttgctcaacaaacggcggcaagtgagcaaaaggaacaacaccaccaagcagctgaaaccgagaaggagcccgaaaaagcagccgatcccgaaataatcgctcaggaaaccaaggaaacagtaaacacacctattcacacctcagagctgcaagctaagccattgcaacttgagagcgagaaagcagagaaaaccatcgaggaaaccaaaacaattgcaacaatcccaccagtaactgcaacctcaacggctgaccagataaagcagctgcccgagagcaatccgtacaagcagatcctccaggcggagttgctcatcaagcgggagaaccactcgccaggaccgcgcaccatcactgcccagctgctcagcggcagtagcagcggactgcgtcccgaggagaagcgtcccaagtcggtgaccgcttcggtcctccgcccgagtccagctccacccctaacaccaccgcccacagcggtgctctgcaagaagactccgctcggcgtggagcccaatctgccgccaaccaccaccgctacggcagccataatctcctcgagcaatcagcagctgcagatcgcacagcaaacccaactgcagaatccccagcaaccagctcaagatatgagtaaaggattctgttcgctatttgccgacgatggacgaggtctgacaagtaagtaccaccctccttcttctttctttctagaaacacaaggaaatgttacggagatctctatcttttacctttcacaaactctcaagaattcacgtactatgcatttgagcactctacggttttcatttcctaattaaagagctgctaagttagatactgtataaatagttatggcaacgtaatcatttatgagtatgctcttatcaagctacactatatcttatattagtaagtcagtagttaaacgatagagatttctgtaacacaccttgcgctacataactaaattcggttgttagggaaggtgtggttgaatcagctgataagtgttgaaaatactacaaaacaggaaagattcgcaaaccgcttttgagtagtttttcgctcgcctgataagtgcacacagcaaggtatataatggtgcggtgtatatatggagggctatatactaggaggggtggattccgattcccattcccatccgtacttaaccgcaagccggttgacgatgcaattgcccggctcttatgtcacaatttgccggcattacgcatacgcagtgttgtgtgtatgtggaaccgtgggggatcgtttattgcaagattagagtttgctggtgttggttttgtttttaagagtgaagatcgccgccatggaatgggtcaatatatggcactgtaaagtgggttaacttaggtaatcaattcgaatgttctgaatggtgggttattgtgtatacgtcgcgtgttacatcaaagcatatttttgatttcaatgtataataggccttattaaaattctacccttgccgttagtactttactttcgttatgggcgtatttagttaatggtttaatttgttcttaaaatagcaggctacaaaccgttctcgatcgtaaacacatttctataatatttcccactagaaatcatatgattaaattattcagaaaaaacgtcaccgattgttttgcccactcttttcatttctctattcgaatatttgtgtatttcgaatgtttttttgtgcccatcgagtgaatttttccactcttttattttcttttttttttttttttttcgctggcagcttctgccgcctggtgacaaaaaacagaaatatgaatattaacttgagccaattaatatgctaagcgatgtgcctgtcatcggggggaaggcgggggtcctctaaaaaagagtgaaaaccaggggcagtggagagctgaatttttggcgcgtgtgccaaggtccgtcgatggatcaagcgctgctgtgtcgcatgttgtgttgcctgggtagcccgagttcccctttccagatccattggccccccgaaatgttgggtgtatattcgacactttcaagtggacctgcagcctctaatcgcgctcgctttcgtttgtgttgacattttgctgggcctgcagactcggatgtagtctactttgctttactttcttctaacgcgtcggctatatttatttttgtttcgtggaacgtaaataaacaggggaaatgcctcgaatcagattgccttaaggggatcatgatgatgagtagccggtgtttttatgtaatttttgtcaccgcgtttgtttggttgtttggtatttttccaaacacctcaaatattccgttcgtcagtctaatcagttgtaacactcgatcgcctcgattgccggtcgtcagatacttgcgttttcaaggcacagataatcgggagggaattcttctcgctgcccaaacaaaagtaactcgttgccaaacaaaaacaaagtgcctggccagtgtaattaccttatgctcttatccactcccaatctacaaaagcaaatatttgtaacgatagcacacggctgggagcaccaccttggccataaatatcaattggccgatacaggccagttatgctatgcgagtaggaggaggaggcggttggaaattggggcttgggatcgaaggggaatatggacaacgcacttctatcgtgattagcacgcgtgataagcgcgcccatcacgaccagaagcacaaatggggaataaaaataacagacggtcgaatggttggattggattctctgctgctaatcacccgggttcaagttcacagctgatatgatgtgtccgagcctgatttcaggtctgtggcggctgctgtgtaagctgtcagtattttcgggctcttacataaagctacaataaatagccgaagctcaagctttccagcatcacatcacgccctgcctgtccccatttggtggtggctctcttctgatctctgcgggttagttcttaagtgcccgtgtccgttgtttacatattccgattttgatttggaactacgtcacgtcacgagtcgccgtcttcaattgcagatgatgacataaatttatttaaattgaagacgttttgctcccggcctctgggttctgtgttctgggttctctccaattgtcccgaagattcctcgcagtcacgcgttgagcatacaccgacggtatgaattttttgtgagtgctaatgcggcaacctgttccctcgaaaaccttcgaatacagcacacacgcctcaagtgcaccgaatgtggctcaagtgcagagatgcctttcacaagtttctcacgaccgacctctcatcggttgcacataaagaaatgctgtgttctttgaatgactgatcaaaaaggcgattaaaagactttaaataacataaattaatctccgacaaatgagtttatatatcttttaagcaaaatgcctttcaatagattcctttcgacagttgtacgcagtccttggccaagaaacagtcgcagctgctccgtcctctttagccttgcgtgtaggcgcagttagccagatagccgctaaatgccattcccggccttgcaccttcacgaaaaacaacacattcgattagctgtaatatatagaagcactttgcaaatatctcataaaatgcactcctcgattccgataaagatacagatagacatagacccccgatgggctgtgttttcggttctgttcagttctgtgtgtgccgtattatcgtgcgccataatttctgttgttttttccgcaaaaagctttgccaacgttgagtagcactcgagtgccataattacaagtcacactgccgggttgggggctccataaagaaggggctggggcatgcggggcgtcagacctttgggcctgcattgttaattaatttgtttgtgtcgaatgcaacgaccgcaagagcaagcagatgccagctacaagctgtgcaaatccctaacacaccgctaatcagatctttattgccgctttcctaaaaatggcattggaatatgttctgcacgtagagaaaatgatgcatagactagatttttagagggaccatatcgctgtgtcgtgcaatagataacatggtgtgaccatgcattcaaatatcaaccataaattaggttgttttactagaagttttgagtaacggaactatatttaaaaagcattatttctctgcatgtgaaatgcattgactaagccgcttgtgggctggtgaggaggcgcgagcccattccaggcaatctgcttactatattctggcttatatggctgcctggtggcagttgccgcagttgggatttatccgtattatatatggctctttgatagaagtaagcggctgagccaaaggcaaacaatgcactcgcacttatattcacgaacttgggcttgcatttgaaattctatttggcctgcggtctctccgtcgttttagttagtttttcatttccattttgcaacttaatagtcggcacacacaggcggttgggaccagttttattagcataccgtctagtatagcaaaccccatgacgggcatatgggatagggatggggctggtgatcgtgatcgggatgggttgatagctgagacacggcttagatgcttaagaacctataagtatgagaggatctacgtaggtgacgcacaggccaatctagcggcaagatcgcccctggttcaagaccccatactgataagggaacttgcacctgatctggggcgatgcacccgatagttactcaattccgtaaaaataacctgaaatccagcgatcttatcgttgttgagttcctgtttcaggagcgtttgttttcgcaccgcttcgcttgcatttattccgcgtacgtcaataggcccgaaatgctgattaatgagtcgtccggccataaaaatcatggctctgcttcgattccaccgcgaaggcaattggagcgactaattcatgaggggagcgcatttgccttcaattagattcaattgagagctgtcaattaggggcgactctggcgagcgataattgaaatttcggcagcacacaagccacaattaacagtagaccgaaaaccgaattgagatgtagcaccccagcgcaaactaggtgaaaccgccactaactgaatgcttttcttttcgattttagtgcttaaggaagaacctgacgatttgtcccaccacctggcctccaccaattgcattcagctggacgagatgactcccttcagtgacatgttggttggcctcatgggcacctgcctgctgcccgaggatatcaattccctggactcgaccacctgctccacgacggccagcggccagcactaccagagccccagcagcagcagcacctctgcacccagcaataccagtagcagcaataatagctatgccaacagtccgctcagcccgcttacacccaattccacggcaaccgctagcaatcccagtcatcagcagcaacagcaacatcacaaccagcagcagcagcagcaacaacagcagcagcatcatccccagcaccacgacaacagcaacagcagcagcaacatcgatccgctgttcaactatcgcgaggagtcgaatgacacaagctgctcgcaacatctgcattcgcctagcatcacatcaaaggtgagttacctagactttcaagcattgattatccttactgatcgatatgtcccatctattgcaacagagtcccgaggacagcagcctcccatcgttgtgcagtcccaattcactaacacaggaggatgacttctctttcgaggcctttgccatgcgtgcgccctacatcccgatcgatgatgatatgcccctgctaacggagacggatctcatgtggtgcccaccagaggatctgcagaccatggtgcccaaggagatcgacgccatacagcagcagttgcaacagttgcagcagcaacatcaccagcaatacgccggcaacactggctaccagcagcagcagcagcagccgcaactccagcagcagcatttctccaactccctgtgctcctcgccagcttcaacggtctcgtcattgtcgccatcgcccgtgcaacagcatcatcagcagcaacaggcagcggtcttcaccagcgattccagcgaactggcggcattgctgtgcggatccggaaatggaacactttcgatcctggcaggtagtggtgttacggttgcggaggagtgcaacgagcggctgcagcaacatcagcagcagcaacagcagacgagtggcaacgagttcaggactttccagcagctgcagcaggagttgcagttgcaggaggaacagcagcagcgtcagcagcagcaacaacagcagcaacagcagcagcagcaacagcagttactcagcctaaatatcgagtgcaaaaaagagaaatacgatgtgcaaatgggaggcagtttatgtcatcccatggaggatgcatttgagaatgactacagcaaggattgtaagtatcttgggtggcagttttgagcagacatgaaatgaagtattttattaagaagtgtcagattatgtagaagaacggtagaatggactggcaattggggggtaattatggggtgaacattttacgacaatttttgtcttttaatagaatgtggcatttgatagatttaataaagctgaatagattgatttacggccccttgggaccactctctctctcattcggctttgaaaatattccacaatttcgcctcctgcatttggagaggcctaattttatggcagttccgcggctaaaaatacccgtggaaacttgctttattttttatgatatgttgccaacgcacacgcacgcactccaacgcctacatgtaaaaatagaggaggcaaacataaagaaaaattcagaatttcagttgcgtgtcgcggaagatgtcacttgtgttagttgtgggttgggttcattttccgtctgcgggaaccgcgggagagctaattgatgtgggtctgctcgccactccagtggtttgaatcgatttgcgtaatattcacacactgctctcttacctttgacacatgtcacggtgcgaggactgtgtgtgattgatgcctaggagctgacggaatcacatagccttgtcaactgtattgactgcaagtgctgggtcttatgacagggtatatcggggtatattgacagatgcctgtaggcctctatgaattttccactagctaatcgtggctgatttatgtcgcacacagcaggcgcgagaaaacgaaacagactggggatatgggctacttgttgtatatgtagagttgtagatacaaagatactgagtcaaaggcagaacgacatatatattgtgtagaatgtgcccacttatttatgtgcaaaatgtttgagacagccaaatattattgttttaaattagcaccaatgtcatgggcaaaggaattaatttttggctggcattcgattcaataaatttggggattagacggcatatttctaataaagattcttcgcttcttattaacttgaattgcttctattttagccgccaatctggactgctgggacctgattcaaatgcaggtggtggacacggaacccgtgagtcccaatgccgcatctcccactccctgcaaggtgtctgccatccagttgctccagcaacagcagcaactgcagcagcagcagcagcagcagcagaacattatcttgaatgcagtgccattgattaccatacagaataacaaggaattgatgcaacagcagcagcagcagcagcaacagcaacagcaggagcagctgcagcagccggctataaaactgctgaatggagccagcattgcgccggtgaacaccaaggccaccatccgcctggtggagagcaagccgcccaccacgacgcagtctcgaatggcgaaggtgaacctcgtgccgcagcagcagcagcatggaaacaagcgccacctgaacagcgcgacaggagcgggcaatcccgtggagtccaagcgtctgaagagcggaaccctctgcctggacgtgcagtcccctcagctcctgcagcagctaattggcaaggatcctgcccagcagcaaacccaagcagccaagcgagcaggcagtgagcgctggcaattgtcggcggagagtaaacagcagaagcagcaacaacagcagtcgaactcggtactaaagaacctgctggtcagcggacgcgatgtaagtgccggttactgcattgtgcccatgcggcccaagaagcagctggccaaggtctagaatccatcgatacgagacctttaccacccgcctctcaattagctaatggaagcacccacagccgccggctatgaataaaacaaaaaccaaggattgttaggctaagcgcatggacaagcccatttctacaatttgtctttgtaaatggatcgattttatattgctaactagaacctacgactaccactgcatcagctaaattgtaaactgtaaaatgtaaccaacaagtaacctcctcccgctgcgagaggatggcgggcctagttgtagtccgtttttgtagtccctagaccttagtccttagatatacatatacatatatttatcggatagatctagtctagatgtgtaagagagctgcagttgcagctgcagcgtggactttaaaattataaatttgtagactatttaaaatagtgctagccgatccgaaccgatccgatccaatccagtccgatgcgagccagaagtcgagattgttgatcggtcgataatcctgagttgtagcttggcgcgatttgttgatttctttttaagttacctacctaagacctaatcaagttgttaaaaatcttctgttctgttgagcaattctgttgtacatacgacgaggagcggtagcattatactaatcgagtagttttagcgagtgatcaccgtgccgtagcagagaaccatcacagcggatcgcagacgcacactccggacgtagttgtttagagatgtagagaagatgagagaggaatgcgaatcagagaatcagattgcaataaaattgtaaactatataaattcaaatacggcaactttaagttttttactgtgatagcatttgcttttgttgtttgagttaccggcatccatcaggtttatgttctagaccttatccctatgatttctgttaacttattcgagcaatttgttagatgtgtaagctttgactgagcaaaatgaaagtagcatcagtgcaggaatgcggatataaacgatatgatatatgattgaaagacagaacgcgtttgatttcgagttcatttttggcctttttgttgatgagtattgaagcaccacgcagcagcaaatgcggaacatatgtaaattgtcaaaatttgtgaacgaaaagtagcaaaattgaaaactcaaattcgagcgctgaaggtacaaaaaaaaaaaagaaaaaagaaaaaaactcaagaaaaggatatccctagagaaaggttaagagaagaattcactttaagctagacaaatatgcctactaatctagttaaaagtcaaaactaaataacaaaacacaacacatatacatagagcaactactagcaattaaataacaatcctcgtgctgtcggcgttttcaatcgcgcagcacacacatcttatagatatagagatatacctagagttagctgtaaagatatagtgcgtatatagaacaaacctcgggtcgccactgaagctttaacctggcagcagctttcgtttcatattagttgtcattttaatttagtttgtagttcctttgttttgtttttattagctttaaatacatataaacgaacgagaagagtcattttccaaaacgaagaaaagccaaaaaacattatccaaagctgtgtttcttttgatttccctatgatttttctttacattttggggtccttgaataattaaaaaccctaaaaaagcctattgattttccaccgcgtactgacctacatacatgcatatacgtatcacaaccaatttctcattgtgtcgcctggtagcttaattaactttctgagactttctctatggcgtgactgacgcacatcaaccgaaatcataaatatccagctggcaaatacacagcgtaccatacatacatatgtataaagctatgaaaggcaaacaaatttacacgcaactagctccgaatttaaaatgccaaggtttccactattgacactgctttagtcggcccatcgagtggggatttggagtcctttggcgcaggatacccacatcctttggcatacggaggcagcgcgtgtcgcattctagcttgagcttgggcttttcccattcgtattgattttgcacctccaactcgctgggtggtctacccaaccatccgggtctatcctttgcctatatccttgtttcactttcctttccgctgcgcacagctgacgctcttctgccactttcactctcactcagactttcactttctccgcttcaggttcttgctctctttttcccggactcgccgctcttttgttgcgcggcacgtgtctcttatgtactgaaaaagcaaacccccgggtttgggctcactacccggctgcttttatggcctacacgagcttcccactctggggcgaacctcctgcgtcacggctggcacttttccgtagtccctgcattaatgaatcgcccgcctccgactccggcgctttggtaattggctgcagcttctccggaagcggagaagtggactcaatttgcattatgctcgggcgacacatgtgtgtacgtggccaaatatttgcccctacttagacctttccttcctatcctcgtttagcctttatttgccttatttgctttgttacttgtgttttgtgtttgtccaggaaaagagcttctccggctaaatagaacaattcataggagaaatcgccagatagatcagatcgtaaccgcatctacctcgtgtggcaaatcgaacaactgaaactgaaaccgaaactacctccggatcagccatcaaaatagtaaaaaatagcaaactagcagagaagctaaatagcaaaataccatatagcaacctcaatggaacgaaggccaaaatcgaaaagcacacgaaaggcgccctattaggaaattttactgttagcaaattgacaagcaatcctcgagatattaactagacaaataccagagaacttagcatatattcctcttgataatcatttagacagagctccgaactggggacttgagaatatacttgagtaaaataattatagcccgaaaagactgcgagccgaaaactctgaaaaattatatacacatagcgcggaacttatatattagcatctaagccggaatgtacataggaacatggaacggagcaaacaccagaagctaacaagctagtaagaaagtaagctattaagataggagaactctcaaattaattcgatgtggctttaactaaacttaactataggtcgccgagcatggggagcagcctagcctagccagtaagctgcctaataacatttagctacgatatcgagatagtattacttactaagcccgcgcaagtcaaattcagatcgactaacgataacaataccaatacgactttgtagtagaagatcacggatcccaatcatcacatttagttgcaattttacgcgttacgtatgacagacgagagatatggataggaaatcggatggaaacgagatgggaagttggatagatgggtagatgggtagctttatcgcgacggagtgcaaattcaagaacgagaatcgaacagagagtacatacaataccacaaatataccacatatacctcagtacatgcataagtacgatcgtgtaggtcgttcggggtcaatccattggcctcggatcggcgcttacttacatacctcgtgtatacatataacattaactaaaatatacatacatacatatacctatcctaaacatatgcctattccgacttttgatagttcaatacaccctagtgaatgttgtgcgaccctttgataacgagcgttttttactacctccaattcttgttgtgtgtgtgtcgcatttatagcaaagaattaactagagagccccaaagctaaacccaactaaatctaaactaactaaattaaaactagcacaagtctagagcaagtaacttaaagtaaactaactaaatgttgtgtaatttttatagcctacctatgtgcgtcgaatacctcgaagaaaagcttcagtcaagtaacgaaagtaaagtacatttagtgaaattttgtgagtcacctcagcaaacaacacacagtccctcccccctcctcataagatacagatttattgtgcaactttattagctgtaatttcgggctagcaaataatactatacactctgacatatccgtttaccgaatgagtagctcccgttttggccaactcatcataactcaaaatgaagaagtcgaggtgacaagcactttgtgtgctttgcaattgatttggcggctgactgaatttgattaatgctcccggttgggattgcggctatccaggcagtcaatttgaagttcccactctcatttggctctgattaattgggctggcgttatgcaaaattgtattatgactgccggaatcaacaggtcacaaagttctatctacaagtgtaacctttgttccaggactcatttgtcagagtggcgacaacaaatgacgagtcgttttcacggggcatttgcctctgtttgccatgccacatgccaacaaattgcttcagactaagctctttgagtgaaggccaagatccaaatccttatcccatataacaaacaccctatcccacacgaataccacacaaatgacaccgagaatacctccagttccacaagatgttagcgtaatttgaaaactagccttgaattagactcgtgtaaggaaggcaaactagtgtgtaaacgccgcaaagtatgcaatattatacatatatacacctatatacataaatatatatatattatatatatacaagatgtcaagcaacttatacatatacaagcgaatgtagtacgatacgatatggcatatgatatgatatctggattataaagtattttaataaacttttaataaatattttagtaaatccaataaacaataaagccgaacctccagcaaatcaaccgatgcagcagataaggggaaattacctcgaagtgtgttttttgcttttgctttggaaaagttaagataaggaatgggcgatgtcgatgcttacaacttttcccttcgatttatgtgcatacattggccctcgagcatatttgtattgacaggccggcctgggaattgattaatctccattcagcattgtgtgcttgccagtcgccccactgactggcaatttattaaaatcttttgattggaataaatgatgctgccagctaatcaagttggcctaaacttgcgccgtctctggaattgaattccttattgtcttgtctccacgagtcaaaacgcttgagcatgccgagcacatctaaacacacggataactttctgccccttatctcgtgattttcgttttactctctggccaaatttaaatctttcgcttcgttggcccctaagtaaatgacgaattttcgtcacacacgagcgctgtgccaaattaaattctaaaggaaagctcaccttggcgccagttttgaaaatatgcctggcgacaattgcattacgtatacgccacgttgtcatctccccgaacgagatggctgcatgagctattcaagtttattgcttattgatttcgggcccagttttcaatttcaatttcacctcgttaaataagtgggcaatcctttcgagcgtattcccaggagttttccattgcgttgcgttacgcaataagagtcgagttgttgaaaatgttacagtagtcctttagtacttttgctgccttcttttccctttttattgtgcggtgacagcagatttttctgcagaaacttggcagcaacacgcggccaaagtgaaagcaaagtttcgctttaattgcttttgtttttctattggactttcgtgtgccgccgagtgggcgtggcacgtacgcaacgaggcgtcgatgaaatgcgatgccataaaaaagagaatccaattagacggctttaaaggcgcagagtcctgccaagccagctcagcagaacattggggaaatggtgaaatccgccataaagtcggcccaaagctgctgtctaagacatcaaagtgatggagcggcggaggaatggcaattatcgtaatgccctggcctttccggaaacctttaccaacgcaatgccaggacaatgccgtctttatcaaatagttttcgcctctttcgtgagcaccaattgactttaataatttattagagcgtattagaccaatggccgagttctggcaggcatgccacaccatatatcaaacaataggcctattacacggctcctaaactcgccaccgacgatctcctggggggcagtgtgcgcgtgccactggagtttctcatcatttcgttacgcatacgccctatcggccgtgggcggagaaaatgttattgggtgttcccccagcgcattcgatgatgtgcccccgggagcgggtttctgctggcacagatgtcgtggcaccgactttcactttctttgtcccctatattgtttacccatcgctcaacttacaggacttttgctttcagtccgtaattgctgcaattagcactagctgcaatcgaagactagcaatacgcgatgaaagcttggcaaacaaagggcaggggtgcggttcaatggactgcatgtgaacccttgtcgactggacatcatcacacccgtccgggtaatttttggcaactttatcttcgtcaaggctgatgtcaaagtgtgcacagagaaaaagagaaaattatgagtggttttcgaattgatttcgttagataagaaactcttttttgaagttatggttacatgctttaaatgaataaatttcaaactttacatcaacatttattaatgtacttcagaatgcgatgttgatatgttactttctctgtatgagaaatgcaggcggcagcttggcagcggtcgaaattgatatattccccacttcctgtcagtcagactggcgggaatggaaatgggtacggactggtggctcttaaagcgaaagtgggggcgttctttgtgtcaatctgaaatccagagcataataatgtcccgccgctggattctgtttcatcgcgaggagcagcaggacccattcccaaacatcattaaaatatgatttattgcgggttccacggcccacggagtgggatggactttgcggcctggcttttcactgcctgagagcttcctgctgttgcccgctttcccgtggcttttccacagggatttctggggggcctgagcttctttaaacgagtgactttgagcatcttcatggctccgacttagctctgtttttacgctcgattttcgctttactgtcaaggtatcaaaatttctctgcagttctcatcgagttaataggctgacatttgcataggaattgccacgaaaaacacagtcgaaagttgcgttctccagggattcagttgatgagggaattgggaagtaacttagctgcaaatcggttaatttaaattaatttaagcccagattgtggtacttaaggtataattgtaatttcaattgtaagctattagttatgaataccaataagtaaggataaagtaggacaattaagaaaatcgatccattaaccaaagcaaatgtataataatccttgtgtacttaaagaaaattggagtgcttcctgtacaaaaatatattttaatttttgctttaacatttgacaacgttatctcaaaactgggctaattttgaatttttcttttttttcctccttttctgccccaaaaaaacaggatgacgattccgaagcaatgataatcgatgaggacaactccctggtgcagccaattccactgggcaaatatggcttgcccctgcactgtcatacctccacgtcttcggtgctgcgggactatcataacaacccgctgatcagtggcaccaacttccagctgtctccagtcttcggaggctccgattccagtggaggtgacggcgagactgggtcagtggtttccctagatgactcggtgccacccggcttgacagcctgcgacacggatgcctccagcgacagtggcatcgatgagaacagcctgatggatggggcatcggggtcaccgcgtaagaggttgtcctcaacttccaatagcactaatcaggctgagtcggcaccaccggctttggacgtggagactccagtgacccagaagtcggtagaagaggagttcgagggaggcggaagcggcagtaacgcccccagcaggaagacttccatttccttcctggacagcagcaatcccctgctgcacacgccggcgatgatggacctggtcaacgacgactacatcatgggcgagggtggcttcgagtttagcgacaaccagttggagcaagtcctgggttggccagaaatcgcctagattaccagtaccttagcatgcactgcatttgatatgaggcatttgttggcggaggacgagagaaaacattgaaattaaactgagcatcgagaaggaagctaaccaaaagattgattttgagccttgcgtgaaagtaggaccccgcacaaccaacttgacaacttgacaggacccatccccaccaaccatttccccctgacgatgatccaacacttgacccctgaccccgaccctgaccctggccccgaccccatgctaaccgacacatttacaaacaggaagggttaatcacacttgaatagttttgtagccatgttaactgcctagaacagaagaatatacacgtatgtaatttagtcttaatgtttttctatatgcaaaccgttttcacaacagatggatgaggagcaaaatagcagaggagagtggaaaaccagtcgaaacataatgataaacctatagattacaatgagaaaataccgatgaaaaatgttcatagttttttgctggaaggctcaaacaagttttttggtgatggttgtattctggtttataactttcaagcaaaaatgctgtgacgagaaaaaaagtttttgaacatgttttaaaataaatattaacaaaaaaaaacaagaaaacaacaaaaaaatatatagtaatgtaaaattaggtttaaggttttaatttcaatgttttcaagagctacaatgaataattgtagttattataatatttttaacattaattaattgaactaagtgaaaattggacccgattcagttgatctaaacttcaaatactttgagcatttctataaaattactttctgtcaatcattttttaaaaacacttgtcgatttcttattcctgattaacagttctttatgtaaattagttataattctgtttaaggcgcatcatacaaaacaaactgtttgcttgcttaaatccaaattcaatcaatgttcagtgtttcttaacttgttttaacattaattggcaaaataaatatagaattcatttcgatgaaagttgcatgcataaatctctaatccttttatgaacttgggaggaacttggattgctttttccagaattttaggggttgaacacgaatttacaatcaaattcgccgtggatgtttaattcgccccgccgcttatcggagacacaaaccatggacagtgtgtataagctgtagaatgtatgtataatgtagaaatatttgtagatatacaaacataataaagaataaatatattgtagttaattggtgcaattaataaaataacacgctatttgaactgtacattgttatgcaacaactccatgatctgctcttctggagctacccatttgcattccggatatttgatggcgcagtgatggggcacatttgactttcctgcttcgatggcgtctcgaaaagcggactgatccaaccaggccagtagccaggaccacttggtggctccatccagcaggtgctcgaagtccgaagcctgacccttgcttactttttcacctgcattgtgggtcaaagtacatatagatttcagcagacagacggtcagatccacgtcgtttttgagaaaggtgcgctcaat

SEQ ID NO: 2477 - DNA, 5742 bp, DROSOPHILA
caatcaaagaaaacggaaaaataaaagcgtattaagatttcgtgtggaaaggaaaaatgctgtaggcgcagtgtaaaatgcatatattgcggataaatcgcgtttgtgagatgcttaaacgcgaattcaacatcaagtcggtgcagaacttcaaggtgcaataacaaaaatatccgaattatcgaaaaaagcaaagtgcaattggccagttgagactacaaccacaataacaacgacaacaacagcaacagcagtgaaataataatataaccttgtgttttgttttttgtggctcaaaaatcagatatacacaaagttaatcgaggtgaacggtgtaaaagtgattaaataataacggtttaacaggaaaacagagttatagtgtgtgcgagtgtgtgtgtgcgtagtgacaacaatacaaacgcagaaaccaatacaagcgcacaatagttttcatacataggaaaacaacgaaagtaacagcgataaataatagaaaacaacaacgaagagtctcaaaaagtgctggaaaaactcgcgataaggaaaacaggaacctccacatcggcagatcttttgaatgctgccgcactttgaaatccggagacacaatggtttcattaattgacacaatcgaagcggcggccgagaaacagaagcagtcccaagcggtggtcaccaacacctccgcctcctcctcctcctgttcctcttcgttctcgtcctccccaccatcttcgtccgttggctccccatctcctggcgccccaaaaaccaatctcacggccagcggcaaaccaaaggagaaaagaaggaacaatgaaaaacgcaaggaaaagtctcgcgatgcggctagatgtcgtcgctccaaggagacagagatattcatggaactctcggctgctttgccattgaaaaccgacgatgtcaaccaactggacaaggcctccgtgatgaggatcaccatcgctttcctcaagattcgcgaaatgctgcagttcgtgcccagcttgcgcgactgcaatgatgacatcaagcaggacattgaaactgcagaggatcagcaggaagtcaagcccaagctggaagtgggcactgaggattggctcaacggagctgaggccagagagctcctcaaacagaccatggacggattcctgttggtcttgtcccacgagggagacatcacctacgtgtccgaaaacgtagtcgagtatctgggcatcaccaagattgacacacttggccaacagatctgggagtactcgcaccagtgcgatcacgccgagatcaaggaggctctcagcctaaagcgtgaacttgcccagaaggtcaaggatgagccgcagcagaactctggagtgagcacccatcaccgggatctgtttgtgcgcttgaagtgcaccttgaccagtcgtggacgaagcatcaacatcaagagcgcttcgtataaggtcattcacatcacgggacacttggtggtcaatgcaaagggcgaacgtctgctgatggccattggccgaccaattccgcatccttcgaacattgagattccgttgggaactagcaccttccttaccaaacactccctggatatgcgtttcacctatgtggatgacaagatgcatgacttactgggatattcgcccaaggatctacttgacacctctttgttttcgtgccagcatggagcagattccgaacgcctgatggccaccttcaagagcgtgctgagcaagggacagggcgagacctcccgctacagatttctgggaaaatacggtggctactgctggattcttagccaggccacgatcgtctacgataagttaaagccgcagagcgtcgtttgcgttaactatgtcataagtaatcttgagaataaacatgagatatactcacttgctcaacaaacggcggcaagtgagcaaaaggaacaacaccaccaagcagctgaaaccgagaaggagcccgaaaaagcagccgatcccgaaataatcgctcaggaaaccaaggaaacagtaaacacacctattcacacctcagagctgcaagctaagccattgcaacttgagagcgagaaagcagagaaaaccatcgaggaaaccaaaacaattgcaacaatcccaccagtaactgcaacctcaacggctgaccagataaagcagctgcccgagagcaatccgtacaagcagatcctccaggcggagttgctcatcaagcgggagaaccactcgccaggaccgcgcaccatcactgcccagctgctcagcggcagtagcagcggactgcgtcccgaggagaagcgtcccaagtcggtgaccgcttcggtcctccgcccgagtccagctccacccctaacaccaccgcccacagcggtgctctgcaagaagactccgctcggcgtggagcccaatctgccgccaaccaccaccgctacggcagccataatctcctcgagcaatcagcagctgcagatcgcacagcaaacccaactgcagaatccccagcaaccagctcaagatatgagtaaaggattctgttcgctatttgccgacgatggacgaggtctgacaatgcttaaggaagaacctgacgatttgtcccaccacctggcctccaccaattgcattcagctggacgagatgactcccttcagtgacatgttggttggcctcatgggcacctgcctgctgcccgaggatatcaattccctggactcgaccacctgctccacgacggccagcggccagcactaccagagccccagcagcagcagcacctctgcacccagcaataccagtagcagcaataatagctatgccaacagtccgctcagcccgcttacacccaattccacggcaaccgctagcaatcccagtcatcagcagcaacagcaacatcacaaccagcagcagcagcagcaacaacagcagcagcatcatccccagcaccacgacaacagcaacagcagcagcaacatcgatccgctgttcaactatcgcgaggagtcgaatgacacaagctgctcgcaacatctgcattcgcctagcatcacatcaaagagtcccgaggacagcagcctcccatcgttgtgcagtcccaattcactaacacaggaggatgacttctctttcgaggcctttgccatgcgtgcgccctacatcccgatcgatgatgatatgcccctgctaacggagacggatctcatgtggtgcccaccagaggatctgcagaccatggtgcccaaggagatcgacgccatacagcagcagttgcaacagttgcagcagcaacatcaccagcaatacgccggcaacactggctaccagcagcagcagcagcagccgcaactccagcagcagcatttctccaactccctgtgctcctcgccagcttcaacggtctcgtcattgtcgccatcgcccgtgcaacagcatcatcagcagcaacaggcagcggtcttcaccagcgattccagcgaactggcggcattgctgtgcggatccggaaatggaacactttcgatcctggcaggtagtggtgttacggttgcggaggagtgcaacgagcggctgcagcaacatcagcagcagcaacagcagacgagtggcaacgagttcaggactttccagcagctgcagcaggagttgcagttgcaggaggaacagcagcagcgtcagcagcagcaacaacagcagcaacagcagcagcagcaacagcagttactcagcctaaatatcgagtgcaaaaaagagaaatacgatgtgcaaatgggaggcagtttatgtcatcccatggaggatgcatttgagaatgactacagcaaggattccgccaatctggactgctgggacctgattcaaatgcaggtggtggacacggaacccgtgagtcccaatgccgcatctcccactccctgcaaggtgtctgccatccagttgctccagcaacagcagcaactgcagcagcagcagcagcagcagcagaacattatcttgaatgcagtgccattgattaccatacagaataacaaggaattgatgcaacagcagcagcagcagcagcaacagcaacagcaggagcagctgcagcagccggctataaaactgctgaatggagccagcattgcgccggtgaacaccaaggccaccatccgcctggtggagagcaagccgcccaccacgacgcagtctcgaatggcgaaggtgaacctcgtgccgcagcagcagcagcatggaaacaagcgccacctgaacagcgcgacaggagcgggcaatcccgtggagtccaagcgtctgaagagcggaaccctctgcctggacgtgcagtcccctcagctcctgcagcagctaattggcaaggatcctgcccagcagcaaacccaagcagccaagcgagcaggcagtgagcgctggcaattgtcggcggagagtaaacagcagaagcagcaacaacagcagtcgaactcggtactaaagaacctgctggtcagcggacgcgatgatgacgattccgaagcaatgataatcgatgaggacaactccctggtgcagccaattccactgggcaaatatggcttgcccctgcactgtcatacctccacgtcttcggtgctgcgggactatcataacaacccgctgatcagtggcaccaacttccagctgtctccagtcttcggaggctccgattccagtggaggtgacggcgagactgggtcagtggtttccctagatgactcggtgccacccggcttgacagcctgcgacacggatgcctccagcgacagtggcatcgatgagaacagcctgatggatggggcatcggggtcaccgcgtaagaggttgtcctcaacttccaatagcactaatcaggctgagtcggcaccaccggctttggacgtggagactccagtgacccagaagtcggtagaagaggagttcgagggaggcggaagcggcagtaacgcccccagcaggaagacttccatttccttcctggacagcagcaatcccctgctgcacacgccggcgatgatggacctggtcaacgacgactacatcatgggcgagggtggcttcgagtttagcgacaaccagttggagcaagtcctgggttggccagaaatcgcctagattaccagtaccttagcatgcactgcatttgatatgaggcatttgttggcggaggacgagagaaaacattgaaattaaactgagcatcgagaaggaagctaaccaaaagattgattttgagccttgcgtgaaagtaggaccccgcacaaccaacttgacaacttgacaggacccatccccaccaaccatttccccctgacgatgatccaacacttgacccctgaccccgaccctgaccctggccccgaccccatgctaaccgacacatttacaaacaggaagggttaatcacacttgaatagttttgtagccatgttaactgcctagaacagaagaatatacacgtatgtaatttagtcttaatgtttttctatatgcaaaccgttttcacaacagatggatgaggagcaaaatagcagaggagagtggaaaaccagtcgaaacataatgataaacctatagattacaatgagaaaataccgatgaaaaatgttcatagttttttgctggaaggctcaaacaagttttttggtgatggttgtattctggtttataactttcaagcaaaaatgctgtgacgagaaaaaaagtttttgaacatgtttta

SEQ ID NO: 2478 - protein, 1507 aa, DROSOPHILA
MVSLIDTIEAAAEKQKQSQAVVTNTSASSSSCSSSFSSSPPSSSVGSPSPGAPKTNLTASGKPKEKRRNNEKRKEKSRDAARCRRSKETEIFMELSAALPLKTDDVNQLDKASVMRITIAFLKIREMLQFVPSLRDCNDDIKQDIETAEDQQEVKPKLEVGTEDWLNGAEARELLKQTMDGFLLVLSHEGDITYVSENVVEYLGITKIDTLGQQIWEYSHQCDHAEIKEALSLKRELAQKVKDEPQQNSGVSTHHRDLFVRLKCTLTSRGRSINIKSASYKVIHITGHLVVNAKGERLLMAIGRPIPHPSNIEIPLGTSTFLTKHSLDMRFTYVDDKMHDLLGYSPKDLLDTSLFSCQHGADSERLMATFKSVLSKGQGETSRYRFLGKYGGYCWILSQATIVYDKLKPQSVVCVNYVISNLENKHEIYSLAQQTAASEQKEQHHQAAETEKEPEKAADPEIIAQETKETVNTPIHTSELQAKPLQLESEKAEKTIEETKTIATIPPVTATSTADQIKQLPESNPYKQILQAELLIKRENHSPGPRTITAQLLSGSSSGLRPEEKRPKSVTASVLRPSPAPPLTPPPTAVLCKKTPLGVEPNLPPTTTATAAIISSSNQQLQIAQQTQLQNPQQPAQDMSKGFCSLFADDGRGLTMLKEEPDDLSHHLASTNCIQLDEMTPFSDMLVGLMGTCLLPEDINSLDSTTCSTTASGQHYQSPSSSSTSAPSNTSSSNNSYANSPLSPLTPNSTATASNPSHQQQQQHHNQQQQQQQQQQHHPQHHDNSNSSSNIDPLFNYREESNDTSCSQHLHSPSITSKSPEDSSLPSLCSPNSLTQEDDFSFEAFAMRAPYIPIDDDMPLLTETDLMWCPPEDLQTMVPKEIDAIQQQLQQLQQQHHQQYAGNTGYQQQQQQPQLQQQHFSNSLCSSPASTVSSLSPSPVQQHHQQQQAAVFTSDSSELAALLCGSGNGTLSILAGSGVTVAEECNERLQQHQQQQQQTSGNEFRTFQQLQQELQLQEEQQQRQQQQQQQQQQQQQQQLLSLNIECKKEKYDVQMGGSLCHPMEDAFENDYSKDSANLDCWDLIQMQVVDTEPVSPNAASPTPCKVSAIQLLQQQQQLQQQQQQQQNIILNAVPLITIQNNKELMQQQQQQQQQQQQEQLQQPAIKLLNGASIAPVNTKATIRLVESKPPTTTQSRMAKVNLVPQQQQHGNKRHLNSATGAGNPVESKRLKSGTLCLDVQSPQLLQQLIGKDPAQQQTQAAKRAGSERWQLSAESKQQKQQQQQSNSVLKNLLVSGRDDDDSEAMIIDEDNSLVQPIPLGKYGLPLHCHTSTSSVLRDYHNNPLISGTNFQLSPVFGGSDSSGGDGETGSVVSLDDSVPPGLTACDTDASSDSGIDENSLMDGASGSPRKRLSSTSNSTNQAESAPPALDVETPVTQKSVEEEFEGGGSGSNAPSRKTSISFLDSSNPLLHTPAMMDLVNDDYIMGEGGFEFSDNQLEQVLGWPEIA

SEQ ID NO: 2479 - DNA, 4127 bp, DROSOPHILA
ttcgatggatgttccgtggtgaactacgctgcaaaggacattctagaaggcgaagagatcttcaattgctatacaatggattacagaaacagtttaaagctacaacgatctcatccgctcaaggccatctacaaatttgagtgcacatgcgctaagtgcacacgaactgatcccgaccagaactatgtacgttttcaaaccaagcaaagccatttgtaaatgtctttcccaatcttccagctttcttttcatcgttatcgctgcgaaaagcccaactgccgacaagaatttctgccagacgccaaagttcagcagaataatcttcgctggtggctgagatgcaatgcagagaaaccgattacttgcacggtgtgccacgagcttcaacatttcgcctggtacaatgagttccttggactcatcggcagcagtgccgattcgtcaaaaaggcaggcgctgttcaaggcattcgatgatctagacaagtggcttgtggatcaccacagcttaaaaagaattatggccgaggaactggtaacagcctgtttttatgagatagatggtaggctacggctggattttgttacgtcgtaatttataaacctctacttaaacaggaggcacttcattggatgagtttgagtatgaagatctggcgaggattatccgcaaacagctggaaggcattgctgcgcagtgtggcgataactcaacggaatacattgctcgcatgacctatttgtgggatatcatagcccagaagaaatgccgcaccgatagaaaggaactgctagagatgaaaggtaaggtggattatctggctagcgagcatcgcgaggttttcttgaactattacaacgattttattgagcaataatgtaaataacgatatacacgcattaaattcgctagtttcgagctacaagcattaaacactggcacttcttgttacctacaactaatctgagcttcctaacgggcattcgtccccacaaattctctagataaagtgggaggcatattcgtggggcattacaccccgtcggggataaaaggtgtgggtggtggagaacttgagcaggttggttatgtcgctggtgtagatgtcggcaaagcggaagaggcgtcttgagaagtaagtggggttgtggtaggtgcggaaaacgctgccaaactgctcgttgaacacgttcttcgttttgttgctgtcgaagattggattcggatttagagatattatcgtaagccactagataaatgtatattttcttaccgcaactgatcccgctcctccatccactcctttaggcagatctgcgctgcctcgctatcatcgtcctgggtgtcctcgatgagctgcgtcagcatttgcagccagttggcgctcatcttgaagtccttacgattgagggttttaatttcgtgctgcaatacgaaaatacccttagaggcaatacgataattgcttgatataaaacacccacagccagttcgctaataatggctcctgtcctccagctgtgcttcagagtaacatctgctaggtcgctgtacggatgatctccgaaatagagcacagagtgaccacgccagcccttcagctcttgaagctgtctcaccgaaccctgtgaagaacatcagacaacagggttgattactaaccaagtgggaatgggaaacccttacctcgtagtagatttttcccttctccagcttgaatacccgatcccataggtgtgactgcgttcgctcgtcgaatagccttattggtcgagattcatccgtaaagaactttggtttgcgggcctgcacgatgaccacatcgaagaaatcacgccagttggcgccgaccagaaaggacatgccacagtttctacaaatgcagacataacgatttcgtaaattttaattgtggtaaaataaaagatgtcacattcccttacacaaacgagtacgggctattggtgactagaaagagattcttgcccgcctgctgcagcttctcgaagaacttgaccagcttcgggtttcgttctatgtacttctcagtgttccgcatcaccttgccgtgcataatgggatggcaggagcccatggcggtcctggtgtcatggaaaacaatctctggattgtagtcgattcgattgcgttcaaaatattcgattacattgcacagcaggcacatttcaggtacagaaaacaggtcggccaattgcaccattttggagttggtgttatgctgtgcgaaaggagatcgtaaatcactgattgctaaacacaaaacccaagcgtaagccgccaggtgataagatatcgatacgaaccctgtagctattgttcggcccctccacgtaggcaataggcagcaggcggttgtggtagagcttcagcacctcatccgcctccactttggtacgtcccctgtataccgagcccagctgtagctgcaggaaactgtccagtttcaccagcagccccttttccacgtcgtagtgcaggccgcgtaccgcaaagttcggttcgtactccagctggaggatgtcctccgggtagcggaacctcttcaccagcatctcgcgagccagattgtacagcaggtcctccaggatgggcttatagcaggccagcgtgtagtcgtaatcgaatccgtacacctgcacctcgctgagatcgagctcgttgcaggcgaagaccgcatctggatgcacatcggagggcagcttcttggctgaaaatgtcaagtggtgcgaaacgggagggtatgttactaatgggaccactttgcggctgggtatttatagatcgtgcacatactacgcatatatgcatatgcctgcgactggttgaggcttacattggaacttctttttggtggcttcgtgaagcttttggaaatcactcactgtttttgggtgcgagatctgggcggttgcagctggagcggaagctccagcgtccgacgcgaaagcgcgcgcctcgaaactatagtttggtttgcacggcgagggggacaggctggaggagatggggtcccagctccggaggacaccaccagctcgcaggagcacattctgccgaaggagagcactgacgatgggactgcctgccgcgcacatttaactgactgcttgctaaattgccaattaagcccgtttgttatgtacactatgtgggggcggagtgggctgcatgtggatggggcggggtgtgaccggacggagggcccccaaaaaataccgactcgcggttggaactactgtggccatatgcatattcaaattattgaacccaacatttaaaaaattgtaaatattatataataggttaataataaattacctttgcggaaacatctttacgataaacattaaaataagaagttaaaattgcttgacgctacaagattaagcaattgtgttattcttatttattattgatatttatttattaaggcgtaatttatgtattagcatttgaatttattgtatatttattactagtttaaatttaacggaaaaacatcggctatttatccgttactaatcggcaagatttgccgccgtttttggtaattcaaaagagtattacagcttttctggtataagttccacatggcgttatggatttctatattttaatcacaaacccgtgatttgtaacactattcgttgtgagtgccaagcagtagtgactgaactatcggttgctgaacacgcttcccagggaatgcaaaattttcatttcggcaataattaaaaaatccacgagtgcaaacaaatttgaagtaattttcctagcatacatatacaaacgagcccaaaagctaaacttgaaacaccaaagcaaccggaaggaagtggaaaaggaggtcgacgacgatcagccatatattctgcctcaattgcccgtgtgtgcgtgcgtgtgtgtggtagtagtagtattttttcatttctgttttcgctgtacgtgcggattgattcatattgtttcattacgtgagctattgcaatattgtacacactgggccgaggacatagccaatcggatttttctcatgaaaccattaaaccgagtttaatgtttatttgatttacgcgtaaatagatgccgcctgcaatgtagagctg

SEQ ID NO: 2480 - DNA, 1609 bp, DROSOPHILA
cagtcagttaaatgtgcgcggcaggcagtcccatcgtcagtgctctccttcggcagaatgtgctcctgcgagctggtggtgtcctccggagctgggaccccatctcctccagcctgtccccctcgccgtgcaaaccaaactatagtttcgaggcgcgcgctttcgcgtcggacgctggagcttccgctccagctgcaaccgcccagatctcgcacccaaaaacaccaagaagctgccctccgatgtgcatccagatgcggtcttcgcctgcaacgagctcgatctcagcgaggtgcaggtgtacggattcgattacgactacacgctggcctgctataagcccatcctggaggacctgctgtacaatctggctcgcgagatgctggtgaagaggttccgctacccggaggacatcctccagctggagtacgaaccgaactttgcggtacgcggcctgcactacgacgtggaaaaggggctgctggtgaaactggacagtttcctgcagctacagctgggctcggtatacaggggacgtaccaaagtggaggcggatgaggtgctgaagctctaccacaaccgcctgctgcctattgcctacgtggaggggccgaacaatagctacaggcataacaccaactccaaaatggtgcaattggccgacctgttttctgtacctgaaatgtgcctgctgtgcaatgtaatcgaatattttgaacgcaatcgaatcgactacaatccagagattgttttccatgacaccaggaccgccatgggctcctgccatcccattatgcacggcaaggtgatgcggaacactgagaagtacatagaacgaaacccgaagctggtcaagttcttcgagaagctgcagcaggcgggcaagaatctctttctagtcaccaatagcccgtactcgtttgtaaactgtggcatgtcctttctggtcggcgccaactggcgtgatttcttcgatgtggtcatcgtgcaggcccgcaaaccaaagttctttacggatgaatctcgaccaataaggctattcgacgagcgaacgcagtcacacctatgggatcgggtattcaagctggagaagggaaaaatctactacgagggttcggtgagacagcttcaagagctgaagggctggcgtggtcactctgtgctctatttcggagatcatccgtacagcgacctagcagatgttactctgaagcacagctggaggacaggagccattattagcgaactggctcacgaaattaaaaccctcaatcgtaaggacttcaagatgagcgccaactggctgcaaatgctgacgcagctcatcgaggacacccaggacgatgatagcgaggcagcgcagatctgcctaaaggagtggatggaggagcgggatcagttgcgcaacaaaacgaagaacgtgttcaacgagcagtttggcagcgttttccgcacctaccacaaccccacttacttctcaagacgcctcttccgctttgccgacatctacaccagcgacataaccaacctgctcaagttctccaccacccacaccttttatccccgacggggtgtaatgccccacgaatatgcctcccactttatctag

SEQ ID NO: 2481 - protein, 409 aa, DROSOPHILA
MLVKRFRYPEDILQLEYEPNFAVRGLHYDVEKGLLVKLDSFLQLQLGSVYRGRTKVEADEVLKLYHNRLLPIAYVEGPNNSYRHNTNSKMVQLADLFSVPEMCLLCNVIEYFERNRIDYNPEIVFHDTRTAMGSCHPIMHGKVMRNTEKYIERNPKLVKFFEKLQQAGKNLFLVTNSPYSFVNCGMSFLVGANWRDFFDVVIVQARKPKFFTDESRPIRLFDERTQSHLWDRVFKLEKGKIYYEGSVRQLQELKGWRGHSVLYFGDHPYSDLADVTLKHSWRTGAIISELAHEIKTLNRKDFKMSANWLQMLTQLIEDTQDDDSEAAQICLKEWMEERDQLRNKTKNVFNEQFGSVFRTYHNPTYFSRRLFRFADIYTSDITNLLKFSTTHTFYPRRGVMPHEYASHFI

SEQ ID NO: 2482 - DNA, 9989 bp, DROSOPHILA
taatgggattcataacttgtttacctgccagcagggctatatccagtcgagaagtggtgccggagaatgtccagggtccagagcgctggtctcgttggcgcagccttttaattttaattaaactcctcgaattgccgtagaagatttttcgtgaagctgcccaatgatttatggaactttcaaggttattcgctccattataaattcatgtaaatgcttttgcatttctggtcattatttggctcattattttgcaaagccaaattagagcagatcatcgcataaaaccgaacttaattacctgaaattatgatgcatgacccagtcccaccatgtggctgatttacttttatggcctagtgctttccaatctaatccctgactagtagtaaattttacggccctcgtggccgtatattaaatgtaatcctttatttaaactcatttaatttttgcattgattaattcatgattaatgttctgaatttattgggcatttaaagggcaaaatgtaagcggtaagccattagccttgttgtttggattctgtcactgtgtgtattattggaagtccttaagtaatctttgtctgctcatgaatttcgaaaacataataatgcgataacacccaatatgatggtatatacatattgaaaactttatgaactcatcaaactttacttttgaaaagcaaagtttccctcgaccaatattgccaactagttcgcttagcgagtattcgccccagccagcgttgccaactgtgcccgtgagtattgaaaggggcaccattaatttagttcttcattgtaaaaatttagcttgcctagtaatgcagattcaaaattcaaatgaattcgattcgttgataatgacttaaatatttaaaacgcgcgccaatgcacaatcgaaagtggtcgttctgaatcagctcatctatcaatgtatcgaaaacccttattcgattaatcttcctacaacgatagctcgatagccatcgggactgttgtcatctggcagcactgttacttcgggaaaaaataaaatacaacaaaaccattaattaaactaggaaggcgctgcgttacatcaattgagggcgccgatcgtcggacaatcgccgtacgtagaaggctcgaaaaccggcgtttggagacagcgatctgaaaggcgtccagtcaaatctgcgattttcgcacacagccctgagaaattggtaagagccaggcagaaggaaacgctttccgcgtatcactcttccccctccccttctaacttccgcaccagcaaacctggtcatgcagcacaacacactgaaaacactaaattcatcgtggacacatttcttgcagatgcgacagaggaatctcgcccagaaacagatcggaccgaaataaatcgctcagttatggttcccactttcaaatcaccaggggagagtggtaacagtgaggcttcctaacgtgaacatcgcaggtgcgtaaaatttgcgaagcgaacacagatgcaaataagtaggaagcgcggagcacacgccgcaagcactcgctgaagttgcgctggtgacgcaaaaaagaacggcaaacacaacacgcacgattccgtgacactttgcatttacacattcccatttggcgaattcgtcacactcggcacacttcggcgagtcgggctgatacggtttagcatatcgtatttgcggtttccaagtctctgattttattgctaaaatatgtacttgttaacgaaattgaaggtcttataccatactgtgtgccctcacctccacactgcaatttctattactcgaagagtaagagcaaacacttcatccattcacaagtgtgttacatgtagaagagagggtggtccgaaagcaactagatttgtgtattcgttatgacaggatcactagtcgaattgattcgatccgcctgcgcgtaaaacgagaggtatcttgcatctaagtatagaattgtggttttgctcgactgtgatgtcctctctagcttattactcaaaattaaatttgttgtgtcggaggacatgagggggattcgttgacattatagctaataaagagtttcaagtgttctgtttgattgtaatattaaaaacccaatattgtacatatggattcctaaaatttatttatagagcagcattatcaattaaatagctatagtcaacctcacgaatattgaaagaaaaaaactaaaaataagttaagaggcaaaacatcaaacaattatttagatttctcaattgccagactgttccataaatgtatcattttcagtctttcgcacagagcatggaaagcacggacagcagcgacagcagtggggatagcttaaaatccattccccggccggactttgaggccctctccgccatcggcagcccacagccgcagttgcagagctcctcgctggatggccacgtcgagatggagccggtcatcatgcccagcaagcgtcaaaagtatattgtcagtgctccgcctgggtcggccaactgcagcagtaactcatccagttcgagtccctcgaacatcaacgtgggctcctcgcttaccatgaagttgacgaaggtgcagccacaacagcatcaggctaagtcctccacgccaaacaacaaaggcaaagtagccaaggaaatggttgctctgcagcgctcacacatcgaatccgaggtcctcagcaactttgtgactggggtgtccaagctgaagagtcgaaagtcgcgatatgtgcccgggaatctcgccactcaggcagtaggtggagagctgtcccgcagcttaaatacctcctccgaaaacgaaaacaaatctctaaaggttgcccttaagcggagcagcagcattccagcccccatcctcgactcagatgacgactggcaggacgaggacatcgcctggggcgtaacgacctgcaggccgagaggacgatcgatggcctttgaagatggcgagcggctggcaaatctaaatgcggaggacagaaacatcgttcccgcatactcaatggccacccgctgtcggtcacgaagcaaaactctatccttgagcaacagttggagcaatgatgataagggtccccgacgcagcaacctacgcagcgagaacgaggaattcgcgaagaagcataatgcttttcttgatcgcataatccacgatgaccgggaatcggaactggcgttgaacacatccggcgaaggcgaaagctcgctcttctcggatgccagtgacacaaagacgaccacggccaaaaccccagaggaggaggcggccgagcggctggctctcatatatgaggagccacctacggtgagtggtgactaaagtttgtagaaattattttgagaattatgcttaagaaaatcgagaaatccagtctttgcggagagataaaaaattaatgatttcctacaatcctctcctgcagcccggctgggacccgttctgctggaagtgccgagggtgcggcaagctaatgccgtgctccaagtgcctgcgatcctttcactcttactgcgtccgacctgccaccaccaagttcgactcctcctggaagtgccccgagtgtcaggttatagaggcggcccccaagaggtgactgtttggcatttctttataaatgaaacctatttatatattggtcatttgcgtttctagactgcggcgcaatggagtttcggtggatctactaagccagctgctttccttcgccctggaccgtatgaagcatgtgcgcggggtgagtaaatgtgctgaattcgaattttatattccatcggctccgtatgtattgtaatttgttccttgtcgagatttcattatcattccacgccgttctgtatgtatcaaaagtcacgcgaaaatattgtgcctcaacagatacatatacatgtgtacatgtataccatatgtgtggttttcagctccaatacttgctgataactcattggttacttctatgtttaaaccttaaaatcaagtcaaagatttccaaccaagctaaagatattcatcgatattgcattttaggggtgacattaattgtgctattattgcgcccgcagctactaataatatgggctataggtgatgtgatatttgcgctctctgccgcctccactcgcttccactgttgaagacccagtttttctcttgttcagtggacgagcagatagacacctgaaagtctcgctggtctgccggggtattgtgttcttgggctacaagttactttgtgctcccttgacccttgaagctaaagccccacatatgcacatccggcatggctccattccaaccgcagatgtgggcatttgtcggggctgtttaacgactcacgtggttctctgcgctcacttatctgccagtcgattccaatggccaaaggcctgttggtgtggctaatggatggctgtgattgtgttcgtgagggcctcatgtacacgataatgcggtttaatggtctgagctacgcaaatagactgttcaattctatcttactatgccaggcccaacaaatgagccgagggggaaactagtgaaccaaaggagcgatattatgcgtataatatgttagtcaagtggaatagtcatattatttttgtgtatgccgtgttgctactacattgagcccatctgtacacagtagtttatctttggccgccatttaagaccttggccgcgtacatatactccagtggcatgaagacgtgcaaggaacagcagatagcagcaatatatatatttgctcagctcaccgttccctcttttaccgcaagacccatgtacccatccccgccttgacatggatatacatatacatatacttatacatacaatcggcgtatctgggtagaagcgaaaacttgttctcaaacgacagaagctcgttgaacaaacgatctcttcgccgcacgacgaattcagatccgccgcttatgcaccctttccacatccatctcaatctgcaggcacataagctacggtcgccgctagaggtttttccgttgacgtacaaaaagttttttgtgaacccggtgagcttcgagagcctggcgcagtgcatccgcaatggggcctaccaaagcacagacgagtttctgagcgaagtgaaatggatacagcataacgctctcatcctggatgccggcggtgagtgcaattcgattgaaaacctccctgacaattcttaattgcttcgaatgaattttatcttgtagatgccaaagtggaacaggcctcaaaggctgtggtgaaggtatgtcgacaggaggccaacgaaatcgacacctgtcccgaatgctatctaaatgccaattccagcgacgagtggttcgtgaaggtgtgccggcatccgcatctccttctctgggcgaaactaaaaggatttccctattggcccgcgaaagccatgggttcatcaaactcaactctggtgaatgtgcgattcttcggcaaacacgaccgagctttcgtgcccgtaaaggactgctttctttattcggctcaaaatccaaacacgcaaaccagccggagatcggcaagggatttggcggaatgcataagggaggttgagattcacatcgaccacatcaagcgcaagattggcgctttcaattatgctccctatcgcaccccttacgatcctctggaagagcaacaacaactggagcagatgatgccaggcgtgtatgcggctatcgaccgggaactggagccggctaataagacaccgctgcagtttcttatacgcaagaccgcggacgataagctctccatcgtcaagaaaacaaaggcgacagaatcgggaaacgaatcggatcaatcgccaagtcctacaaaaaaactttcggaggttgatgttgtttctgtaacagggtccggatgcagcgatcactcaaatgtgaagagcaacaactatgaggttatatccagatctggggaatccttgaccgactctcgttgcaaggtgttgctcaaaaggaaatcattagctgccaaaatagttgcagaatccgttgaaacttcagaagcggtggctccgaaacgcaagcactctctaagtgatgccagtttcaccagcgaatccagcgaacacaaacgaaagtcaaagcatgctaggaaacaacacgataatcaggataatcaaattgaagaggcagaaaaaactggccaagagcccccaaaatctcctacaatctcaaaacagaatgaaaatttacgagatgaagagaatgtcatagaaaatgctgccaatgatacttcctcggcatccccggtatctgcgtctgtggtttctgtggtggaattggtcagacgacgccagggagtgaccatcacaaagataccacgcgagcaacagcagacagcagaggacacagctgctgttcccattcctcttccaacagctccacctcccaaacagaatatcccaaaagggaatgaagcagcaaacccaaaacaatctgatgtcgagagacaacaagaacagctcatcaaaaaagttattccgtttatagaaattaaaacagaggtgatgtcggagccagatgacgaaggaatagaggaagcgtcaccggctaatcaacctcaaactgatcaagttcccttgcaacaggagacaattacagcacagccggaatctcaaatgccagctgccgcgccggctccccaacccaagccagtggataatgcaccttttgaagaagtcagaatcaaggaagagattctcagcgaagatgaaatggaaacggaacagtctattgtgagtcggaggttgaaatctgtgccacctatgccattgcctatgcccccgcctcctcctttaccgccaagagaggaatcacccgcgacagctgattcggttcgatttgtgggcgacaccacgatccaaagggtaagccagaaacagggaggcaagtccacggatacgggcggaaaacgtaaaggtgttcaacaagttcccatagcaggtataccccaggcaccctctccaactcactcgccccttctgtcaaccgcaccttcaccttcggcatcaccaaagccaactagcacgcttgctgttagcaagccaccgcctccgccaccgcccaagggaaagtctgcgtcacaccttcaatttcgaggaaaaaacgatcgtatcccaacctccccaccggcgactgctccaccagccacaaacacgtcttctttgctccgatccaacatggtagtgattccagtggagcaaggcggcagctgcaatgcacacagcccgatgactatcccggttccaccattaagggccgtttcaaagaacacactgcagaatacctcaacgggatcaacttcctcttgcgttcccagctcagtctcgatgcccccacctttagccggattgagtattcctccagtggccactcccacatcacaagaagaatcaattactaacagtggacaacctgtgggtctactggctagcgctttgaacggaacggcaaacgacgtcttgtccagtgattccattcctaatgatcccataactccgggcttggccacggcattgagtgaaatgctcctgcacaccggtgtgccaaagttgatagctcgtccacgcggggctctccgatcggatggttcacaaatctatccctcgcaagccggaccggtctcgcaaaaattgaaggagaacgcacacaaggtatgtttgttctaaaattgaattcgtgcatacttgtagcatcgatttttagtcaattttcttgtatttgttaagatttgttgtatacaaagtcatccactgaagctgtcttgcattatcgctaatttcgcagataaccgactacttcatctccgtcatcgaggacacgcttagcgacatggctacaggggaccaaagtgtcctgcaagcccggattgccggcctgtcgctggagaacgagcgtctgaagcagcactatgaccgtcaaataaacgacttacatcgcacgagcgagctaatgatttccgaaatgcgaaagactttggagcaagagcacaaacgcgtgatctccgaactgcgacagcagaacgccatcgagctgatgcgggcggtcgaggaggcaaagcggaagcagtggtgtgcgaattgcatgcgtgaggcgcagttgtactgctgttggaacacatcctactgtgactatccctgccagcagcttcactggcctggacattctgccacttgtggtcagtctgtgccacctacaattccagttccaccttcagttccgactccgattatagaacctggacgtgccaaagctaaagtggccacgccaacggcaactccgtcaattacaaacccaagccccagttcgcagataatgcgaacagtagccgcctgtccatctgcaccacctagtgccaacgcttccagttccaaaaagtggccgcctatgatgacgttaatgaatcaatccaatcaggaggccatgctcaagctgcccgccactacataccttcggccagtggtcagcacgacgatgacagctcccgtgactgctccgcaaccagcaaacaacaacagcacgaacgtaataatggcacccacaccaccgccaggaaataatctggccactataatctccgcacagcggaatccccccaactacaacgccaagcaccccaatccagcgatgcccgtgcaacgctttaatattcctgtaagttaacagcatcctgatgagcacacatttcttgagactcacttatttttgaaacgtgtttcagttgcccatcaccgtaaattcgaatgcaccctttatgatggcagagcagcatcagaagcaagtaccaaaagctactggtcgctcaggtaaaaacaatagccgaatgcgccaaacttacagcaacaatatcaacaacagcaacccgcagggtatgcgctgcaacaacaacccgcaggctatccgccagaatcaaatgaatcaacaggtattccagccataaatcatacatacgacaagtaaaattcgcgataatttttcacctggaaagaagactacctgtaattcagataataatttctttgatattccggagaaactcattaagagatcgatttacttggccgatcccacaaacggtcatcgcatatatataaatcgatatatatatatatatatatatttatcatttccccgagcgcagctaatgactatggttttcttatagattaagtttaaatacgaaagtgtaaaataatattaccgttcaataattacttttaagatttcgataaaccttgatctagtattgctggttttactgtaacttaaccgcgtagtaagtaagactcattgtgaagccatcagatggacttggcctaatcatagcaactagtagtctgtaagggcatctcaatttcattttaattttgataacgctgtaaatcgcattctcatcttttttttacatacattgtatgtatatttaaagctaagctgcaaaataaataaaggacaattaattttttgggtattgccatgtagtttataattagactcgaaaatgaacagataagttttccagattccaaagcgaaacagtgtcaactaaaacagcaactaaaggcagctccagcccgaaagcatgctatgcaaaatataaacgtaagtcagccgcgagtaaatagcaaaatttgcgaatccggtccgctttaattatgtcatcaaacaccagtaaaagaaaacaattttctaaaataatgtagagcccttgccctaatcgatatccaacttcttgaagtttccctcaatcccgaataagtcggatgcattcttggccttgccgggtcgcaatttctcgttcacctggtggcgagtctcaaactcgatcatttcctttcgattgtccagcaacttcttatagtaaatctctgcgaacaattgcttaagtaattttctcatatttagatggacaccgacctttcgccacgtttgcctcctcc

SEQ ID NO: 2483 - DNA, 5350 bp, DROSOPHILA
ggactgttgtcatctggcagcactgttacttcgggaaaaaataaaatacaacaaaaccattaattaaactaggaaggcgctgcgttacatcaattgagggcgccgatcgtcggacaatcgccgtacgtagaaggctcgaaaaccggcgtttggagacagcgatctgaaaggcgtccagtcaaatctgcgattttcgcacacagccctgagaaattgatgcgacagaggaatctcgcccagaaacagatcggaccgaaataaatcgctcagttatggttcccactttcaaatcaccaggggagagtggtaacagtgaggcttcctaacgtgaacatcgcagtctttcgcacagagcatggaaagcacggacagcagcgacagcagtggggatagcttaaaatccattccccggccggactttgaggccctctccgccatcggcagcccacagccgcagttgcagagctcctcgctggatggccacgtcgagatggagccggtcatcatgcccagcaagcgtcaaaagtatattgtcagtgctccgcctgggtcggccaactgcagcagtaactcatccagttcgagtccctcgaacatcaacgtgggctcctcgcttaccatgaagttgacgaaggtgcagccacaacagcatcaggctaagtcctccacgccaaacaacaaaggcaaagtagccaaggaaatggttgctctgcagcgctcacacatcgaatccgaggtcctcagcaactttgtgactggggtgtccaagctgaagagtcgaaagtcgcgatatgtgcccgggaatctcgccactcaggcagtaggtggagagctgtcccgcagcttaaatacctcctccgaaaacgaaaacaaatctctaaaggttgcccttaagcggagcagcagcattccagcccccatcctcgactcagatgacgactggcaggacgaggacatcgcctggggcgtaacgacctgcaggccgagaggacgatcgatggcctttgaagatggcgagcggctggcaaatctaaatgcggaggacagaaacatcgttcccgcatactcaatggccacccgctgtcggtcacgaagcaaaactctatccttgagcaacagttggagcaatgatgataagggtccccgacgcagcaacctacgcagcgagaacgaggaattcgcgaagaagcataatgcttttcttgatcgcataatccacgatgaccgggaatcggaactggcgttgaacacatccggcgaaggcgaaagctcgctcttctcggatgccagtgacacaaagacgaccacggccaaaaccccagaggaggaggcggccgagcggctggctctcatatatgaggagccacctacgcccggctgggacccgttctgctggaagtgccgagggtgcggcaagctaatgccgtgctccaagtgcctgcgatcctttcactcttactgcgtccgacctgccaccaccaagttcgactcctcctggaagtgccccgagtgtcaggttatagaggcggcccccaagagactgcggcgcaatggagtttcggtggatctactaagccagctgctttccttcgccctggaccgtatgaagcatgtgcgcggggcacataagctacggtcgccgctagaggtttttccgttgacgtacaaaaagttttttgtgaacccggtgagcttcgagagcctggcgcagtgcatccgcaatggggcctaccaaagcacagacgagtttctgagcgaagtgaaatggatacagcataacgctctcatcctggatgccggcgatgccaaagtggaacaggcctcaaaggctgtggtgaaggtatgtcgacaggaggccaacgaaatcgacacctgtcccgaatgctatctaaatgccaattccagcgacgagtggttcgtgaaggtgtgccggcatccgcatctccttctctgggcgaaactaaaaggatttccctattggcccgcgaaagccatgggttcatcaaactcaactctggtgaatgtgcgattcttcggcaaacacgaccgagctttcgtgcccgtaaaggactgctttctttattcggctcaaaatccaaacacgcaaaccagccggagatcggcaagggatttggcggaatgcataagggaggttgagattcacatcgaccacatcaagcgcaagattggcgctttcaattatgctccctatcgcaccccttacgatcctctggaagagcaacaacaactggagcagatgatgccaggcgtgtatgcggctatcgaccgggaactggagccggctaataagacaccgctgcagtttcttatacgcaagaccgcggacgataagctctccatcgtcaagaaaacaaaggcgacagaatcgggaaacgaatcggatcaatcgccaagtcctacaaaaaaactttcggaggttgatgttgtttctgtaacagggtccggatgcagcgatcactcaaatgtgaagagcaacaactatgaggttatatccagatctggggaatccttgaccgactctcgttgcaaggtgttgctcaaaaggaaatcattagctgccaaaatagttgcagaatccgttgaaacttcagaagcggtggctccgaaacgcaagcactctctaagtgatgccagtttcaccagcgaatccagcgaacacaaacgaaagtcaaagcatgctaggaaacaacacgataatcaggataatcaaattgaagaggcagaaaaaactggccaagagcccccaaaatctcctacaatctcaaaacagaatgaaaatttacgagatgaagagaatgtcatagaaaatgctgccaatgatacttcctcggcatccccggtatctgcgtctgtggtttctgtggtggaattggtcagacgacgccagggagtgaccatcacaaagataccacgcgagcaacagcagacagcagaggacacagctgctgttcccattcctcttccaacagctccacctcccaaacagaatatcccaaaagggaatgaagcagcaaacccaaaacaatctgatgtcgagagacaacaagaacagctcatcaaaaaagttattccgtttatagaaattaaaacagaggtgatgtcggagccagatgacgaaggaatagaggaagcgtcaccggctaatcaacctcaaactgatcaagttcccttgcaacaggagacaattacagcacagccggaatctcaaatgccagctgccgcgccggctccccaacccaagccagtggataatgcaccttttgaagaagtcagaatcaaggaagagattctcagcgaagatgaaatggaaacggaacagtctattgtgagtcggaggttgaaatctgtgccacctatgccattgcctatgcccccgcctcctcctttaccgccaagagaggaatcacccgcgacagctgattcggttcgatttgtgggcgacaccacgatccaaagggtaagccagaaacagggaggcaagtccacggatacgggcggaaaacgtaaaggtgttcaacaagttcccatagcaggtataccccaggcaccctctccaactcactcgccccttctgtcaaccgcaccttcaccttcggcatcaccaaagccaactagcacgcttgctgttagcaagccaccgcctccgccaccgcccaagggaaagtctgcgtcacaccttcaatttcgaggaaaaaacgatcgtatcccaacctccccaccggcgactgctccaccagccacaaacacgtcttctttgctccgatccaacatggtagtgattccagtggagcaaggcggcagctgcaatgcacacagcccgatgactatcccggttccaccattaagggccgtttcaaagaacacactgcagaatacctcaacgggatcaacttcctcttgcgttcccagctcagtctcgatgcccccacctttagccggattgagtattcctccagtggccactcccacatcacaagaagaatcaattactaacagtggacaacctgtgggtctactggctagcgctttgaacggaacggcaaacgacgtcttgtccagtgattccattcctaatgatcccataactccgggcttggccacggcattgagtgaaatgctcctgcacaccggtgtgccaaagttgatagctcgtccacgcggggctctccgatcggatggttcacaaatctatccctcgcaagccggaccggtctcgcaaaaattgaaggagaacgcacacaagataaccgactacttcatctccgtcatcgaggacacgcttagcgacatggctacaggggaccaaagtgtcctgcaagcccggattgccggcctgtcgctggagaacgagcgtctgaagcagcactatgaccgtcaaataaacgacttacatcgcacgagcgagctaatgatttccgaaatgcgaaagactttggagcaagagcacaaacgcgtgatctccgaactgcgacagcagaacgccatcgagctgatgcgggcggtcgaggaggcaaagcggaagcagtggtgtgcgaattgcatgcgtgaggcgcagttgtactgctgttggaacacatcctactgtgactatccctgccagcagcttcactggcctggacattctgccacttgtggtcagtctgtgccacctacaattccagttccaccttcagttccgactccgattatagaacctggacgtgccaaagctaaagtggccacgccaacggcaactccgtcaattacaaacccaagccccagttcgcagataatgcgaacagtagccgcctgtccatctgcaccacctagtgccaacgcttccagttccaaaaagtggccgcctatgatgacgttaatgaatcaatccaatcaggaggccatgctcaagctgcccgccactacataccttcggccagtggtcagcacgacgatgacagctcccgtgactgctccgcaaccagcaaacaacaacagcacgaacgtaataatggcacccacaccaccgccaggaaataatctggccactataatctccgcacagcggaatccccccaactacaacgccaagcaccccaatccagcgatgcccgtgcaacgctttaatattcctttgcccatcaccgtaaattcgaatgcaccctttatgatggcagagcagcatcagaagcaagtaccaaaagctactggtcgctcaggtaaaaacaatagccgaatgcgccaaacttacagcaacaatatcaacaacagcaacccgcagggtatgcgctgcaacaacaacccgcaggctatccgccagaatcaaatgaatcaacaggtattccagccataa

SEQ ID NO: 2484 - protein, 1664 aa, DROSOPHILA
MESTDSSDSSGDSLKSIPRPDFEALSAIGSPQPQLQSSSLDGHVEMEPVIMPSKRQKYIVSAPPGSANCSSNSSSSSPSNINVGSSLTMKLTKVQPQQHQAKSSTPNNKGKVAKEMVALQRSHIESEVLSNFVTGVSKLKSRKSRYVPGNLATQAVGGELSRSLNTSSENENKSLKVALKRSSSIPAPILDSDDDWQDEDIAWGVTTCRPRGRSMAFEDGERLANLNAEDRNIVPAYSMATRCRSRSKTLSLSNSWSNDDKGPRRSNLRSENEEFAKKHNAFLDRIIHDDRESELALNTSGEGESSLFSDASDTKTTTAKTPEEEAAERLALIYEEPPTPGWDPFCWKCRGCGKLMPCSKCLRSFHSYCVRPATTKFDSSWKCPECQVIEAAPKRLRRNGVSVDLLSQLLSFALDRMKHVRGAHKLRSPLEVFPLTYKKFFVNPVSFESLAQCIRNGAYQSTDEFLSEVKWIQHNALILDAGDAKVEQASKAVVKVCRQEANEIDTCPECYLNANSSDEWFVKVCRHPHLLLWAKLKGFPYWPAKAMGSSNSTLVNVRFFGKHDRAFVPVKDCFLYSAQNPNTQTSRRSARDLAECIREVEIHIDHIKRKIGAFNYAPYRTPYDPLEEQQQLEQMMPGVYAAIDRELEPANKTPLQFLIRKTADDKLSIVKKTKATESGNESDQSPSPTKKLSEVDVVSVTGSGCSDHSNVKSNNYEVISRSGESLTDSRCKVLLKRKSLAAKIVAESVETSEAVAPKRKHSLSDASFTSESSEHKRKSKHARKQHDNQDNQIEEAEKTGQEPPKSPTISKQNENLRDEENVIENAANDTSSASPVSASVVSVVELVRRRQGVTITKIPREQQQTAEDTAAVPIPLPTAPPPKQNIPKGNEAANPKQSDVERQQEQLIKKVIPFIEIKTEVMSEPDDEGIEEASPANQPQTDQVPLQQETITAQPESQMPAAAPAPQPKPVDNAPFEEVRIKEEILSEDEMETEQSIVSRRLKSVPPMPLPMPPPPPLPPREESPATADSVRFVGDTTIQRVSQKQGGKSTDTGGKRKGVQQVPIAGIPQAPSPTHSPLLSTAPSPSASPKPTSTLAVSKPPPPPPPKGKSASHLQFRGKNDRIPTSPPATAPPATNTSSLLRSNMVVIPVEQGGSCNAHSPMTIPVPPLRAVSKNTLQNTSTGSTSSCVPSSVSMPPPLAGLSIPPVATPTSQEESITNSGQPVGLLASALNGTANDVLSSDSIPNDPITPGLATALSEMLLHTGVPKLIARPRGALRSDGSQIYPSQAGPVSQKLKENAHKITDYFISVIEDTLSDMATGDQSVLQARIAGLSLENERLKQHYDRQINDLHRTSELMISEMRKTLEQEHKRVISELRQQNAIELMRAVEEAKRKQWCANCMREAQLYCCWNTSYCDYPCQQLHWPGHSATCGQSVPPTIPVPPSVPTPIIEPGRAKAKVATPTATPSITNPSPSSQIMRTVAACPSAPPSANASSSKKWPPMMTLMNQSNQEAMLKLPATTYLRPVVSTTMTAPVTAPQPANNNSTNVIMAPTPPPGNNLATIISAQRNPPNYNAKHPNPAMPVQRFNIPLPITVNSNAPFMMAEQHQKQVPKATGRSGKNNSRMRQTYSNNINNSNPQGMRCNNNPQAIRQNQMNQQVFQP

SEQ ID NO: 2485 - DNA, 7818 bp, DROSOPHILA
ttctcgccgagtatctaccgccgttcccgccgcgcggcgttggttaccaacgcatggtctttgtgctctacaaacagcaggcgcgccttgatctcggctcttatcagttggctgctgccgactacggtaatctggagaagcgcaccttcagcaccctggacttctatcgtcagcaccaggagcaactgacgccggctggcctggccttctatcagaccaactgggacgagtcattgacgcagttctaccacgatgtcttgagtaagtagaaacgtacatagttctaccagcaatccgtagctcatactaatgctggtcatctgtcgcgcagagatcaaagagcccgtttatgagtacgacttccccaagccgtacctgaccgaccagaagttcttcccgctgaagcagcccttcaatttgtacatggacaagcaccgcgatcagaagcaggtgaacaaggagtatctggagcgcaagctggccaaaacgcatccattcgaggggccaaagaagccgctgcgctaccccaatgcccatcccatacgcgatgtgccctcgtggctgcgcactgagattcggaaggagcgtctgggcactggtcgcgtgcaggactactagaactactcaatggggtgctgttaagttttgtgtgtaatagtggttaacaagttttgtttttttattcactggaagtacatgagttgctaaagtacacggttgcctcatctgcaaactataactacgcggaatatagcctaaatataaatatgggaagtttagggaagaggacgtattacatatgatccatgctacggaatcgaaattggaatcgtgtgatgcgttaacaattgtcgccggaaaatgacgctccatctcaatgtgctaatttaattagttacctattcgtattaacttattcgttatgcgcgctctgcttgccaagcgctaaattggttaaattgtttttggatttttggcacagttttatacgttatcctttgctacgctgatatatctaaatcggtatctccaccaatggaacactcggcaacggatatccccagtggcgttcttaagtctgcgccttgccgtaactaccaactggcggcctgtacatggccggcagaaaagagacctgagttcgattgaaggcatactttcgcttcccgatgttcttgagcacgttgtccatgcgcgtgccctcgctgaaaacaagtagcatcgattgcaatcaccaaatcatacacatatttcaaaatccgaactcaccttcgcatggtgctgagcgcgtagggcacatgctttgccggcagctgaaactcgcgcaccaggacacgacactgctccagcgtgaccgccatgccagtgcgatccttggcgctcttgcacgaggtgaatcgcagaccgtccatcaaacggcacgcatcctcggccagatgcagaatctttacgtttttggacacattggcacgcagctgctgctccatgaagccgagcagagattgcagcgattcgccagtgtcgacggaaccgagtcccagcttccggtaacgtccaaagtactggctcagccgcaagtagttgtcccagttggaccgatgctgctccttggtctgacccagcgtctcggcgaagctggccttctcgttgatgccgatgttgaagaagacgggcgtaatcttgaacgaaatggaattgccattgcccggcagcgagtgctccggcacaggcagttgcacctccagcgcttgtcgcgatccagtaatccgtggcgtgggcgtctgggcgacctcaccctgtgcccgcaccagctgaaagctaacggcggacagatcctcaatggcgatgcacatgtcgctccacatgtccgcctcgttgccgtaaagcgttagcaggccctcgaagtaggccaatggacccaggtcgcgcagcatcaccagatagcccatgtccaactcactgccccagagacgcagcatcaaggagctgaccagagcagttagctgataggaaagcgatcatttttagaaaacttcacgtgaatatctaagacattatgcttaccgcctgggagaagcagacgtccctgcggtacatgatgctcgcctggaggcgattgcagcgcatgtcctgctgcagccgctgcaccgagtgcatcagtcgtgcggtcttcaggaggcgatccatggcgtggcgcaattttcgcatgctgggacgcagttccgccgcccagtccgtggtcatcgagagatccaggccgtcggtgaacttgttgcccttctttacggccacagagccggttgtggtgattccatcactatccacggactgcggcttgagatccagcgcgagattgggtgcctgcttgccgctggctgccgaggccgctatcacgtccggcgcctgttgtggcgccacagcgaatccctcccgcttgatgggcgccttcggatgacgcagccggatcgccggactgtcgcagcgtccgcagaagaacttcagcttgctgaccaggcacataacgctcgcctcgatattcagctgggtgagatccagtggctccggctcctccgtgggccgataatagttggccgacggcgaggagctcatcaacttggtgtccagaaagccagccggtggctgatggtgccgctgtcgctgcgcctgccgtccgatctcgtccagatcgattagctgcagcacagataaatcagctgggttatccgatggcggaatctgcgtgcctgcgctgacctccgattgcgtttgccatgcaacaggcagcgactgatatgtggcctcctcctgctcctcatcatcggcctggcgacctggttgcctgccctgctccaggctgcgcaagtgatcgttgtagcatttaaccacatgctgcagcgaatcgatggcccgaatgtccagcgagctggacggcgagctattgctcggatgccaactgttcgaacgcatcagcggcggctgaccgcgtggccagagatccggtggcgctaccaccggcgtggcaaagtcctccagctccggtgactttagttccagcgcggtcagttgttgggttatcttgcggaacggcgacatcggctccataagcacgttctccggctcctcgatgatgcgatggcgctcgataaaggccaccgcctcctcgacgatgctcggctcccagagattcagcagcgtgcgtgtgcgtgccaccatttggttgcatagcggcatcatgtccatggaactgcgtcgactggccaactgcaacagctgtgacatcagctcgacgatctccttgcgcagctgcttggtggcctggacggcatcgttggccgcctgcaccttgcacgcgttgctctgctccagtttccacgatttgctctcctgcagcagtctggccaaagtaaaagaatttagaagtcttggctccaaaatgttgatatattgtgcatcttacttgatgagaccaccacacttgcgtcccttgggatcgtgacgcgtgaaggcgcccacggtgaccacgtccaggaggccacgtcgctgcagcgtgtcattctgcgcccacatccgctgcacgtgcagattgaccggcagaaactccagcgactcgtccgccttcgcggatgagcgcttgaaggagacaccatcgcgtgcaagctgctggatattctgcttggcctgcgagtagtccttgagcaggcgtagatgctcctccagcaaattcatctgtcgccaacgccactcgccgctcagctcgcccatgccggagatctcctgcagcagctccttctcgcgctgtatccaaatggagagcagctgctggggcagctggcagcagaggcgcgactccagcagcgtctcctgcacactgatgtccgcacccagcgacgagtgcagtcggtatgtgcgcaggcggggattggagcacacccgttgcaggccacactgttgcggcacaaagaggcggacgcccagcttcggtggcagcgactgggtgcgacgatgggctgtggatggaggaagaatatggtagtcactaggctagaggcatccaagagataccaacttgtaacgccaaatactttggtcatgaaatatttgatgaaatatctatcagtacttctcagatacacagtacatattttcaagctctacagatacaagatacaatttaaatgaaagagagattttgaagcttacagatacaagatacattaagttttaggaacttttatcgagccaaaaccaatgaatgctttatctggaaactggaaaacctaaatacgatcgcaaagtgccactttgtatacttttccttgtcgttttcgaagtgatactccaagaaacccgaatcctaagcacctatttcaatggaaccctgctatgcacaaggtctataagtgccccaaatctcacctcgtctgctgctcgttgtggctccaccggcgccagccgatccatcgaacagctgggtgctggaacgcggcggaccatttcccgactggccgggctccacggcagcgtcgggtgaccaggaggccagcgtaatgaagccgcactcgccgcgcggcgatgtcagtggcaggcgcagccggctggtgtcctgaatgacgcccagggccacctcggcatggcccagcggcacggcggtgagcgtcatccgttcgcggacatcgaagacgctgaaacgcagccgtgtgctggccgacaatccggcgctgcgctgaaagcgcatcgtgcacaggaactggggtgtacgtgtgcgctcctgcagctcggtgcgcgcgtgctcccgccacacgcaatcctctccagctgtcggcagcagcgagcacaccacctgcggattgggcggtcgccccagcgtgtccaggggcagggtatcacaggagagcgccgtctcgcaaatgggcagctccgagagatcgagttctgtaagtaagagcagaccaggtcagattgcaggcgggggaatgcaatggttacagaacggcaggtggcacagctaaagcaggaggggattgaataacaaacaactggttaatttcgtttaaattcattagcaaaacaaagtttattccaagaataaattcataatcacatggaacgcaatgcaacaccagctcccgatgggattacacataagtttacaacatataaattcgaaaatggagtaatggaaatcatgggtttagtgcgttcaatcgatttcgattggatgcaaccgatgcaacaaacgaaaaatgaaatattagttcgatagccgaatgtttgcgattgaaacgtctttggttggacgcgttggaatcgaatgaactcaaaccggatgtggttgcatggaagtgagcgagaggtatgtggtgcagtgggtggaacagtgacatggccaaatatttggttaacaaaactaaaaaaacaacaacgaccgccgcgcgttttccgattgtttgcgtttcattttggattttcttatttggttttttgggttagaactgtataagatcaccttcaaacggcgccaccacctccgtgggcacgggcacggacaactcctccgccggctggccgtgcagctgtagctgctcctgcatttgctgctccagcggcatgccgaggtcaatgtgattgcccatggaggatgacgccccgctgctgggctggcggctctggctaacaatctgttcctttagctggcgtatgagcgcgtttagcttctcgctggatgcgtgctcgatgcactgcacccaggccaggcgttcggccgacgaacgtgtaatgaaacgttccgatgggctgtccttgaagtctgcaacacataggcatttagtagtagtaatcatagcatagcatcattgtgcattgttgcctacctaaatcgaatacgtagccctcggaatcacgctcctcattctgaatgcgcgcacgacagttctccagcaccaggaggccggccaccgctgacttggggtccttatccttgaggtagaacagtaaatttccacgcagtttacaccaacgttcaactctgactgtgggcggtagaattaggtgcataagccaagtgcctggacaggattggatgttgtgtgtgggtgggtgggtggttggttttgttcggttgtgtgtgtgtttgctaatgcatgtgcatggatgcgagtgatcagatggtagtggtgcaatcaataccttcgctagagcgccacaggaagccctcctggcgatcggtgatgatgagcaggccctccttgtcgaatcgcgttgctggattgctggccagggagttcagttccggcttgttaaagcgcatggctgcttatcgctggatctaatggatatacacaaatgccacacaattggtggccggaccactcgtttagcaactccatagatggacgggcacgcccgcaaagcgtcgaatgctcgggccacatcaataattcacggcaattacacgatgtgtacgtgctgctagggggcgtggccggtggaggaggcggctccctaactgggtacacacacacacacacacatacataccttctgctcctccccctctcctccttctccacctttattttttttggtcctgcgacctcgttactttgttgttattgttgttgttgctgctgctgctgcacagctggctgccaaacgccccgcactccgctggcactcacaatcgggctactcctggccaggagctgggtcatccgtcgctccgagtgaatccccttgcccacgattgcaattaatacaagcaactaattgaatttaacagctaattttgataagcgcactgcgctactgtttctgattggaaaataagttggagatgacagctggaggtggcaaaatcggtcgtgagtatcgaatggaagttcttgatttccaatgttacgatgaaatgcaaatttagtaatgcaacctatataatatttcatttaaatatatatatatttatttatttcatatttgatggcatctttataacaaaaattattctaattggaaaattagcgctgagcaatgcaagagtgtggtcacactgttggcagaatttaccgatagtatcgatgtatacttataatcaaaataagaaattgtaattcttgcttaaaatgttaatgcaagcaaatgaaattaataaatatccatatagattaaaacaaaccaattttcatcaataaacaagtgcatttatacgcaacttttgtattataattctctaattcttagcattagttcaagtgattaaaaaatcgcccagcttaatatcaaatgtttcatattcataacagcatatatatatataacattttactataaatgaagagggagaatgtcacatacaaatatgtgggatctaaaagtacacttagcattgtactaggcataattagtgtagctacaaggactggattgtcccatttccggtttcaattacgccatttccgtttccggttcagtgacgtcgactgctcttgatgtccactttaaattgtcgcgaccattccgccagcaaatcgaactgagtaacaaatggaattagctaaggaatagaaggtgcaattccatcgaacatctactcacatcccgatccatgatgttgtcacagaaactcaagtccagcaactgcagcttgggacagttgaccagaatgctgaaatcgaatcgaattgaatgcttaatgatcttaaagtgattaaaaaggaagagagacgtactcataaacacgctcatgcgttatgttcagaatgcccatgaggtcaagctgctccagattcttgcccagcgcggcaatatgcatgagatcgcgtt

SEQ ID NO: 2486 - DNA, 4214 bp, DROSOPHILA
ccaatcagaaacagtagcgcagtgcgcttatcaaaattagctgttaaattcaattagttgcttgtattaattgcaatcgtgggcaaggggattcactcggagcgacggatgacccagctcctggccaggagtagcccgattgtgagtgccagcggagtgcggggcgtttggcagccagctgtgcagcagcagcagcaacaacaacaataacaacaaagtaacgaggtcgcaggaccaaaaaaaataaaggtggagaaggaggagagggggaggagcagaagatccagcgataagcagccatgcgctttaacaagccggaactgaactccctggccagcaatccagcaacgcgattcgacaaggagggcctgctcatcatcaccgatcgccaggagggcttcctgtggcgctctagcgaagtcagagttgaacgttggtgtaaactgcgtggaaatttactgttctacctcaaggataaggaccccaagtcagcggtggccggcctcctggtgctggagaactgtcgtgcgcgcattcagaatgaggagcgtgattccgagggctacgtattcgatttagacttcaaggacagcccatcggaacgtttcattacacgttcgtcggccgaacgcctggcctgggtgcagtgcatcgagcacgcatccagcgagaagctaaacgcgctcatacgccagctaaaggaacagattgttagccagagccgccagcccagcagcggggcgtcatcctccatgggcaatcacattgacctcggcatgccgctggagcagcaaatgcaggagcagctacagctgcacggccagccggcggaggagttgtccgtgcccgtgcccacggaggtggtggcgccgtttgaagaactcgatctctcggagctgcccatttgcgagacggcgctctcctgtgataccctgcccctggacacgctggggcgaccgcccaatccgcaggtggtgtgctcgctgctgccgacagctggagaggattgcgtgtggcgggagcacgcgcgcaccgagctgcaggagcgcacacgtacaccccagttcctgtgcacgatgcgctttcagcgcagcgccggattgtcggccagcacacggctgcgtttcagcgtcttcgatgtccgcgaacggatgacgctcaccgccgtgccgctgggccatgccgaggtggccctgggcgtcattcaggacaccagccggctgcgcctgccactgacatcgccgcgcggcgagtgcggcttcattacgctggcctcctggtcacccgacgctgccgtggagcccggccagtcgggaaatggtccgccgcgttccagcacccagctgttcgatggatcggctggcgccggtggagccacaacgagcagcagacgagcccatcgtcgcacccagtcgctgccaccgaagctgggcgtccgcctctttgtgccgcaacagtgtggcctgcaacgggtgtgctccaatccccgcctgcgcacataccgactgcactcgtcgctgggtgcggacatcagtgtgcaggagacgctgctggagtcgcgcctctgctgccagctgccccagcagctgctctccatttggatacagcgcgagaaggagctgctgcaggagatctccggcatgggcgagctgagcggcgagtggcgttggcgacagatgaatttgctggaggagcatctacgcctgctcaaggactactcgcaggccaagcagaatatccagcagcttgcacgcgatggtgtctccttcaagcgctcatccgcgaaggcggacgagtcgctggagtttctgccggtcaatctgcacgtgcagcggatgtgggcgcagaatgacacgctgcagcgacgtggcctcctggacgtggtcaccgtgggcgccttcacgcgtcacgatcccaagggacgcaagtgtggtggtctcatcaaactgctgcaggagagcaaatcgtggaaactggagcagagcaacgcgtgcaaggtgcaggcggccaacgatgccgtccaggccaccaagcagctgcgcaaggagatcgtcgagctgatgtcacagctgttgcagttggccagtcgacgcagttccatggacatgatgccgctatgcaaccaaatggtggcacgcacacgcacgctgctgaatctctgggagccgagcatcgtcgaggaggcggtggcctttatcgagcgccatcgcatcatcgaggagccggagaacgtgcttatggagccgatgtcgccgttccgcaagataacccaacaactgaccgcgctggaactaaagtcaccggagctggaggactttgccacgccggtggtagcgccaccggatctctggccacgcggtcagccgccgctgatgcgttcgaacagttggcatccgagcaatagctcgccgtccagctcgctggacattcgggccatcgattcgctgcagcatgtggttaaatgctacaacgatcacttgcgcagcctggagcagggcaggcaaccaggtcgccaggccgatgatgaggagcaggaggaggccacatatcagtcgctgcctgttgcatggcaaacgcaatcggaggtcagcgcaggcacgcagattccgccatcggataacccagctgatttatctgtgctgcagctaatcgatctggacgagatcggacggcaggcgcagcgacagcggcaccatcagccaccggctggctttctggacaccaagttgatgagctcctcgccgtcggccaactattatcggcccacggaggagccggagccactggatctcacccagctgaatatcgaggcgagcgttatgtgcctggtcagcaagctgaagttcttctgcggacgctgcgacagtccggcgatccggctgcgtcatccgaaggcgcccatcaagcgggagggattcgctgtggcgccacaacaggcgccggacgtgatagcggcctcggcagccagcggcaagcaggcacccaatctcgcgctggatctcaagccgcagtccgtggatagtgatggaatcaccacaaccggctctgtggccgtaaagaagggcaacaagttcaccgacggcctggatctctcgatgaccacggactgggcggcggaactgcgtcccagcatgcgaaaattgcgccacgccatggatcgcctcctgaagaccgcacgactgatgcactcggtgcagcggctgcagcaggacatgcgctgcaatcgcctccaggcgagcatcatgtaccgcagggacgtctgcttctcccaggcgctaactgctctggtcagctccttgatgctgcgtctctggggcagtgagttggacatgggctatctggtgatgctgcgcgacctgggtccattggcctacttcgagggcctgctaacgctttacggcaacgaggcggacatgtggagcgacatgtgcatcgccattgaggatctgtccgccgttagctttcagctggtgcgggcacagggtgaggtcgcccagacgcccacgccacggattactggatcgcgacaagcgctggaggtgcaactgcctgtgccggagcactcgctgccgggcaatggcaattccatttcgttcaagattacgcccgtcttcttcaacatcggcatcaacgagaaggccagcttcgccgagacgctgggtcagaccaaggagcagcatcggtccaactgggacaactacttgcggctgagccagtactttggacgttaccggaagctgggactcggttccgtcgacactggcgaatcgctgcaatctctgctcggcttcatggagcagcagctgcgtgccaatgtgtccaaaaacgtaaagattctgcatctggccgaggatgcgtgccgtttgatggacggtctgcgattcacctcgtgcaagagcgccaaggatcgcactggcatggcggtcacgctggagcagtgtcgtgtcctggtgcgcgagtttcagctgccggcaaagcatgtgccctacgcgctcagcaccatgcgaagcgagggcacgcgcatggacaacgtgctcaagaacatcgggaagcgaaagtatgccttcaatcgaactcaggtctcttttctgccggccatgtacaggccgccagttggtagttacggcaaggcgcagacttaagaacgccactggggatatccgttgccgagtgttccattggtggagataccgatttagatatatcagcgtagc

SEQ ID NO: 2487 - protein, 1280 aa, DROSOPHILA
MRFNKPELNSLASNPATRFDKEGLLIITDRQEGFLWRSSEVRVERWCKLRGNLLFYLKDKDPKSAVAGLLVLENCRARIQNEERDSEGYVFDLDFKDSPSERFITRSSAERLAWVQCIEHASSEKLNALIRQLKEQIVSQSRQPSSGASSSMGNHIDLGMPLEQQMQEQLQLHGQPAEELSVPVPTEVVAPFEELDLSELPICETALSCDTLPLDTLGRPPNPQVVCSLLPTAGEDCVWREHARTELQERTRTPQFLCTMRFQRSAGLSASTRLRFSVFDVRERMTLTAVPLGHAEVALGVIQDTSRLRLPLTSPRGECGFITLASWSPDAAVEPGQSGNGPPRSSTQLFDGSAGAGGATTSSRRAHRRTQSLPPKLGVRLFVPQQCGLQRVCSNPRLRTYRLHSSLGADISVQETLLESRLCCQLPQQLLSIWIQREKELLQEISGMGELSGEWRWRQMNLLEEHLRLLKDYSQAKQNIQQLARDGVSFKRSSAKADESLEFLPVNLHVQRMWAQNDTLQRRGLLDVVTVGAFTRHDPKGRKCGGLIKLLQESKSWKLEQSNACKVQAANDAVQATKQLRKEIVELMSQLLQLASRRSSMDMMPLCNQMVARTRTLLNLWEPSIVEEAVAFIERHRIIEEPENVLMEPMSPFRKITQQLTALELKSPELEDFATPVVAPPDLWPRGQPPLMRSNSWHPSNSSPSSSLDIRAIDSLQHVVKCYNDHLRSLEQGRQPGRQADDEEQEEATYQSLPVAWQTQSEVSAGTQIPPSDNPADLSVLQLIDLDEIGRQAQRQRHHQPPAGFLDTKLMSSSPSANYYRPTEEPEPLDLTQLNIEASVMCLVSKLKFFCGRCDSPAIRLRHPKAPIKREGFAVAPQQAPDVIAASAASGKQAPNLALDLKPQSVDSDGITTTGSVAVKKGNKFTDGLDLSMTTDWAAELRPSMRKLRHAMDRLLKTARLMHSVQRLQQDMRCNRLQASIMYRRDVCFSQALTALVSSLMLRLWGSELDMGYLVMLRDLGPLAYFEGLLTLYGNEADMWSDMCIAIEDLSAVSFQLVRAQGEVAQTPTPRITGSRQALEVQLPVPEHSLPGNGNSISFKITPVFFNIGINEKASFAETLGQTKEQHRSNWDNYLRLSQYFGRYRKLGLGSVDTGESLQSLLGFMEQQLRANVSKNVKILHLAEDACRLMDGLRFTSCKSAKDRTGMAVTLEQCRVLVREFQLPAKHVPYALSTMRSEGTRMDNVLKNIGKRKYAFNRTQVSFLPAMYRPPVGSYGKAQT

SEQ ID NO: 2488 - DNA, 7918 bp, DROSOPHILA
tcaacgctcctcgcctcgccgcccttcgcggtattttgccacaacgttgcatgtcatctgtttggggctcggtcgctgtagctgtggacagaagctgcggcttcgactgggagccacctgcccaaaagttgactttgaacgtttttgtttacatttggcggaaaggtgaagtggcgcagcgcaaagctgccacggcaacgaatggaatggagtcagcatcagagccagagtcacagtcacatccagaatcagaatcagaatccgaaacggatccagaactcaactgaggaagctggtagcaagtttcgagtgggtatcacagatcaacgatctgcagatcgaacagaaagacctccgacgggaacctccaaagggttcaatgttccgcagagaactccgaagggaagcgatgacctgaaagaggtgctccaatcgttatgttcaacttgaactcaagtggggaaaaccagagcaatatttaaacttaatccaatgtttatttttgcatcattcggaaaactgaagctggcattcgtaatacagacaaaccataatttagttcaacttatacttaaggagcaccagaaatgcacttgctatcgaaggagccacatcaaaacagctgaaagacatctcctcgatcggtttgaatgaatctgaatcgggaatgccgatgcaggatggaccacctaacaaacgaagcatagtcttatcgaggcgacgagtgctgctccttaatgtgtcgagactttgaccctgagtagcaattatcccttctgtttcgatcggtttgatcaccctgcccggcatgactcttcccagtttccatcgacaacggcagttttgcggctcaattaggcggcggagttgcatctacctgatttgacgagtcctttcgggctacccaagtagcagcatgctggggcgctaattgatggcgacggagcaaaggtcagatgggaagaccaatgcgaaaccgatcagaagcactggaaactttctaaacctcgttcaaggacgagtcgatgaaatcgtgaagcattagcttcaaatgaaaggcatccatgccatttaagtagtagcgcaaaaaacgacgttcccgtataaatcccaaactttggtagagcgccaatgcaggtttgttgctcagctccgtttccaggacaatcatggctgcgtcccttatcgccatggcatctatggccatttccgagagagcccttccaattccccgcttcctgtactccgcatccactgccagcatggcgatatagccctgcaaatatccatctcttttcgcctccaacttgcacactatcacgcccacatagcgatctccatctagggcgaagaagcatagatctggccaattgtagacaaagtagcgataggtgtaaatggagtacggttcggaaagctccttgtcgatcaggcccatgagcaccttgagctgtgattcgtcgtggaagacacaaaaatgtattccttctgacttggctgctgtatcgttctctggaagaacaatcttctccgcgaagagtggaagattcttcgttacaagatccattttctcttgcgagtctttgtcagagagttccttttgaataagaacggcttccggtagagcatcccccattgtatacgttttcgtttagttttatataaaaaactaaccgaatttgtaggaaaagctaactgtaaactcataaatcatatcacatagcctactcggtagcatattttctgaaccgaaagcaaaagattgagattgcaaacaaaagcggccgcaaaagagtgaaaatgtcgtgaaaattcctgacgcgaccttggtggcaaggcgctcgcacaaatcccagcaggtgacagtcagcgtggcaggctctaaatagcattacccagtctcctgtctcctcggttcccactttgcccagctccattcagggcaattaagaggcacgcctgggacagaaaagggggaaactcgctgagcatgtgaaaattatgaaaatgtctgccacgactttgacagttggcctcgaagaagtgggctcctttgttgtctgtgccaggctgacgaggaggacgatgtcgacgaagaatacggaattgccagcaagcacgcacaggtgtccaccgggtggatggtggtggatcccgatccctgggagcttccacgcgggtggtggtgacagctctgagcccaaccttgccacggctttgcatatatgaaaactaatttcgtgtattaggttcgtgttgattgtgtttcctcccggtcgccttgcctggcattcccgcttcctattttacatccgaatgaggaagtgcttcccagcaatgacctcatgtgaccaatggttaattggaggagggaatgcaacagaagcaattaacctaaaaggcccataaagcacacacacacacacacatacacacacacttggtgggaggacacattttggtggtaactcaatacgggctttaagtcactttcttgccgtaaatcagattagcccggctataactataacattgcttgctcacttaccccgcattttgatttgaggccagttttgtttgatttgtgtccgggtttttcgttgtttgcaaggtgtccaagatggcctttgtaaatccttcagtcgttagcttaattaatattggctctgcgtcacgaacatattgatcgagaaaagccgataactttgattaacacttgtttgtgccacattcactggagttaactacacattttttctacgtacagtagaatcaggttgcgaatttatatttatatgcattcgtgaggcttatctctacagcagctcctttcataatatttttttctcgtattatcattgctatttatggagtttcttactttgcattcttagccgcaaacctttataaagctgcaattcttttctttctctggccccttgtgttactattattcccgccactcgactccgttttataattgctcctgtggcacggaaaacgctcccatccccagtccattcggccgcatttctaagctttttcaaatacccaactgtggcagaaattaattacaccgcccggacataaggacacttggcccacgaaagggagttcatggagtgtttaatgaagcggtttaagtggccagttctgtgggggacaggcggcggcggcgtcgtctgacaaaaaaaaaaggcggccagcccaacaaatttccatatttgcccgttgcagttgccgtcgccggcgtctagtgagataaatggatggaggacaagtcctggggcagttcaggtgcctcttcccctttctttccacctcaagtggactttttgtccagtgcacattcagttagttcattgaaaggagttcagtggggcccaggcaagaggttgctcctctggtgccgtttcggtctctgtttgggctgccaatatttcagttggccttatgacagctacaagtgcgccccttgataagcattccgacgattccggtccccatgtccatgttgcggataaagcgacgacaactggacgatgtgagatgcgagatgtgtgaggtttcttcgccagacgaatggcatatcgcaggttgcgccaactgcaagttgccagttgcaggctgcaggttgattcacggcagtcgcgtgggacgctctgctcctcatcctcatccgctccgcacatggtcgcgtgctccattgtttgtgccttccctggaattccccgattccgattccgcatgaatatgtcaatgtaatgatctccgcccttcttctgcttcttgtgcgcccagccccgttcgtatctgtggaattacataaatattaacttgtactttttataaacatgtttgcgcaccacaaactgaggattgccgtcctggtcatgttgaattccgagcggaggaaggcttcgattgatatgatttatacactaaagactactccaaacgggcttcattcctgcggaataagttagttgcagtgcagcaagtttagtctattgacattaaacctgatctaaaagtatcttagagcagcattctcgcattagaagctggctacaaattacgttctggtttttaatcagactgcgtacagagttaattaaaacattactgggatcaatgatataattgtttaataattagagcaacaataggaatagcaatgcactaacactaatgtaattggttattttagtaaacttttatgaattcattgattttcttaccagttttatccagtttttctttctttgagcaggtttgtacatttttttcccaaaccgcctcgaaataacaccaatgccgcattaatcagcgtcaatagaagcagctcctgtccaaaaggatcgctaagaggactcagttgcgttcctgtcacatttcgctttgcatttgccatgccgcatttttccatcattttctgcttcttcccggcgacacccccgcgcccgcgcgaaatatgcgacagccctgacgaatgacttgacggcgaaatgtgctcaaacaaacataaattccgtgtccgccgggattgggatttgttgactgctcctccgagtggctgtcccgagtttctcccaatgtcctggccaaaaacacgcaacgagaaacgccagaaaaagccaaagttaacaaacgaaacgaaggattgccaggtgcgcgtgctgcgccaaacgaaattgtagttttttgcgcgcggattgtgtcataactcaaggaaatgataaggacggatggccaatccttatcacccagcacgcgaatcggtttaaactcactccagctcactttttaagccaatttaatgggattttcgcggaaagaaaaacgaaaccgacgcgtccacttgaaaccgtaagttctgcgatcagcaaaaaaaaaacgtgtggcaacattgccactggaaaactttaacccttgagcttcatctcgacttttacatttataactgtaaataaacaagtgcttaacgatcggtgtaagtgtgtccacaccacaatcgctaaaaattcccgtttaaccccaattacaagcatgaaacacatttttttttaaaatttaaatgtacttttatttacaagttaaacaaaatgtgtaaatagaaaatatgtaaatttatgctttactctgttggtgcttggtcgtaattgatttcttaaagctggcagtgctcagttacgctcggctatatcaaattgaaaccgatttacttcaacattttggaatatatttaatattatttatcagttgttgttgaggtagtaatctcaattgctataaggcctgtaaaatttagaataaatcgcttgcattgccaatatatcggtttccatatagtccttaaagcacacgcatatacatatatttgtaattctaatttacagcttgtggagttttattcattattagctcccatataaagtcttctggttcttctggttaatcttaataatatgtagaaaatgtgtaattccttgagcattatgttacacctaatcagttcgatttgttgtaaatattctcttacgattcttacaatatgtttgtacttaactagcaaacaaaacaaaataatttacgtcgcatgacacgtaagcaaacaatgagatattcatatctgatcctacagatatagggttaacaaaacaataaacgcgaaacttaatcgacgtccaaaaacaataaaaacttcaatgtaacgcaatgaacaaaatgtaagcaaaatatcaattaaatacgaaacaaggatcgaattctgatcatccctatcgcttatcctcctgggatttcacacctggaaatcattgaaaatggtttccgtgacacggatcttctccacgcgtatattgaacatcgcaaatccattcatgatgttgaaggcgatggcgaagaccaccagcgccaagtacgttcccaaggcgatccaccagagcagctgctcgtggagcttctgctcaaagctcttgagcaccagcagcccgatagttaggccagcaatggcaccagccaaatgggccacatacgaaacagcacccgccgtttccgcctgatctatggccaggaattcactcgatgatcccagctgcagttcgtcgccagcatagcgagcatagatggcaaagccaaagtcgaaggaaactagaagaaattgaactgtattaacaacaacactaaggtgcggtaggctaaacactcaccgaagaccagaatgtgaagcagcttgatgactccataacgcatctggtgatagttgagaagcacattggccaggtgggcggctagcaaagcgtatactccaccactggcgcccacaaggaacacatccgggtcaaagatgctagtgcccaggcttcccgccagcaccccggagaagtagatgcaggctatcctcgtggaaccatgaaccatctccagtggcagcccaaaaaccagctgaactgccacgttaaaaccgagatgcagccacccggcatggagtaccatgtagaagaggaagcgccagatctcgtgacgcttatcgggacggtagatgaacatggagtccgagggtatgggtccccttggcgccgcctcacccgtgaccactgagtggtaaacaaagaaacccagctgggggaaaagtagttaagtagtcaagggtctgttcaaggagaacttaaactttcaacgcacctccaccagagtaaccaggatgatgaaaaaaggcggcggacagcaggtgtagcgatcggcgtagtacttgcgatcccgctcctcgggcaggatctccatggccacggcgtgcaccattttgcgaaagagtggcggttcgtttagcaccagctggaaatcgttttcggagcagacttcacgatctcgatggtgtacggcgcacttaaagctacgtgtccgcttgccgctcatctggaattaagtatggaggtttaatcagcaatagttgatgcatatttaagtgtaaagataacctgcaattacatatctagctatggtactgcgatacctttttcgatgtaattgatatagcaatatatgtatattccctaagatcgttatataaacaccacttcgggagtaagcaatataacaaaacatttactaagaacttcgctaagaagaaagtgattagaaaattttcaaaattgtttctactatttcgcctatcaaaaaactctcccattttagtagccttttgatacaatttcagcaatttatcagcaaagactacagaaaacttcagtacctttctaacatcactcgaatacggatcaaacataactagaaaataaatcttttagacaatttctaatttccagttttactacaaatctttttcaaaatgtcgaaaatttatctgaaggccatggaggatgtggtgcagcgaaacacggacaacacaaaccggattacggagcaggcgcagggattcgtggtgtcggaaaatgccggggacagtctgctgcacacttcattcgatttgaccacggcccagtcgattgtgaagcacctgcacgccagtttcctgaaattggcccagagctgcgtccgtgatctggataccgatgataagctgtgctttctgcgcgtgaaaacccgcaagcacgaattcctggttagtccagaggaagccttcactgtgaccgtggtattgtaatcccccagcccatctaggggttaacagtttggacattgttgcttgctggtggacaagggagagaaacaccaatacacacccactatcgctacagctgtctcactcgctcattgttgatgctttcgttgaagatcgtcgtacatgtttaaccaaccccccaccccccacccatccaaaaaagaaaaaagaaatctagtcataaaattataaaacgaacatttatgcgtgtgaccggacaaactaaattatgtt

SEQ ID NO: 2489 - DNA, 1584 bp, DROSOPHILA
atgagcggcaagcggacacgtagctttaagtgcgccgtacaccatcgagatcgtgaagtctgctccgaaaacgatttccagctggtgctaaacgaaccgccactctttcgcaaaatggtgcacgccgtggccatggagatcctgcccgaggagcgggatcgcaagtactacgccgatcgctacacctgctgtccgccgccttttttcatcatcctggttactctggtggagctgggtttctttgtttaccactcagtggtcacgggtgaggcggcgccaaggggacccataccctcggactccatgttcatctaccgtcccgataagcgtcacgagatctggcgcttcctcttctacatggtactccatgccgggtggctgcatctcggttttaacgtggcagttcagctggtttttgggctgccactggagatggttcatggttccacgaggatagcctgcatctacttctccggggtgctggcgggaagcctgggcactagcatctttgacccggatgtgttccttgtgggcgccagtggtggagtatacgctttgctagccgcccacctggccaatgtgcttctcaactatcaccagatgcgttatggagtcatcaagctgcttcacattctggtcttcgtttccttcgactttggctttgccatctatgctcgctatgctggcgacgaactgcagctgggatcatcgagtgaattcctggccatagatcaggcggaaacggcgggtgctgtttcgtatgtggcccatttggctggtgccattgctggcctaactatcgggctgctggtgctcaagagctttgagcagaagctccacgagcagctgctctggtggatcgccttgggaacgtacttggcgctggtggtcttcgccatcgccttcaacatcatgaatggatttgcgatgttcaatatacgcgtggagaagatccgtgtcacggaaaccattttcaatgatttccaggaactctctgacaaagactcgcaagagaaaatggatcttgtaacgaagaatcttccactcttcgcggagaagattgttcttccagagaacgatacagcagccaagtcagaaggaatacatttttgtgtcttccacgacgaatcacagctcaaggtgctcatgggcctgatcgacaaggagctttccgaaccgtactccatttacacctatcgctactttgtctacaattggccagatctatgcttcttcgccctagatggagatcgctatgtgggcgtgatagtgtgcaagttggaggcgaaaagagatggatatttgcagggctatatcgccatgctggcagtggatgcggagtacaggaagcggggaattggaagggctctctcggaaatggccatagatgccatggcgataagggacgcagccatgattgtcctggaaacggagctgagcaacaaacctgcattggcgctctaccaaagtttgggatttatacgggaacgtcgttttttgcgctactacttaaatggcatggatgcctttcatttgaagctaatgcttcacgatttcatcgactcgtccttgaacgaggtttag

SEQ ID NO: 2490 - protein, 527 aa, DROSOPHILA
MSGKRTRSFKCAVHHRDREVCSENDFQLVLNEPPLFRKMVHAVAMEILPEERDRKYYADRYTCCPPPFFIILVTLVELGFFVYHSVVTGEAAPRGPIPSDSMFIYRPDKRHEIWRFLFYMVLHAGWLHLGFNVAVQLVFGLPLEMVHGSTRIACIYFSGVLAGSLGTSIFDPDVFLVGASGGVYALLAAHLANVLLNYHQMRYGVIKLLHILVFVSFDFGFAIYARYAGDELQLGSSSEFLAIDQAETAGAVSYVAHLAGAIAGLTIGLLVLKSFEQKLHEQLLWWIALGTYLALVVFAIAFNIMNGFAMFNIRVEKIRVTETIFNDFQELSDKDSQEKMDLVTKNLPLFAEKIVLPENDTAAKSEGIHFCVFHDESQLKVLMGLIDKELSEPYSIYTYRYFVYNWPDLCFFALDGDRYVGVIVCKLEAKRDGYLQGYIAMLAVDAEYRKRGIGRALSEMAIDAMAIRDAAMIVLETELSNKPALALYQSLGFIRERRFLRYYLNGMDAFHLKLMLHDFIDSSLNEV

SEQ ID NO: 2491 - DNA, 3236 bp, DROSOPHILA
gctcgagaaagtgtgccagtccctggtattttgtgggctcagcaaaagacccatagtcaatcaatagggcgcaggcggccagcttttcgtcaccttcctcgctgctcgattcctcgctgctttcactatcggtggaggtagatgaggtggattcactgcgtgagattatggaactgctggtcgacacggtcgacttagacgaggacgactcggatgtggtgaagccatcgtgtggcatgggactgggatcggagacaatcaacgcatgcaatccattccccaagagaagtgtcctaagtgaagaccaaccattgaatccagttcaactgggttaatagtccgctacttacttgtaaagcttcttgtccgtttccgacttgtccggtatgtccagatacttgacctggtcggtcattttgcacaacgagctgtatgtgatcgcccgtacgccggctaattgagtaattgggctccggcgttttgtacgtacgtgaaattcgaatcgtctaaacaaatgtgcgctgtatcgctgccagagcatgcaaaactcgaatgagaatgagacttatggcaatccgtatcaactgggatcggagctatggaaaatccacggggaaaaaatcacaggctgtcaaatagcaaacgcaaaggcaactattttatatgttaacgatacaaactattaatcgaaagacgtgggcttagtgatggaccaggtccttgggtgtcgccttatcgataacgtcgcaaatgtcaaatggcttgtgtggcggtatttttacatatagggaaatgaaaattggaaaacattttgtgatgtatgacagtgttcttcatagctaattgattagtgattcagtgtggtcttagacgaagaaaaaaaaccacacataacaattctatcaataggtaataaaaaataccaaaagctttgcaccgattggcgcgtgcagatatcgagaaccgataggcttcgataggtttggacaaataacgtctggtatcgaaaggaaattgtgttgattccaaataaatccgattccagcggagatgcagtcgcgcagcaagtccgatatgaagcccatacgaaaggagatcctcaatccgggaaacgcctacatcgagctaaccccgggcaccagggtgagttactaaaaccgcttggcagtttggcaggtttagttccatctgcgacagcaaaagcaaaacagtgggaaaatgggccaaggccagtgggtggtgcagccaacagagactcactcctcatgatattggccttttccaggtgaagttccactttcaaacgcggagggccggcgacagtcgcatcatcgatgatagccgcaagatggagaagcccatggagctggtcctggggaagaagtttaagctagaggtctgggagctgattgtgcagcagatgtcccttaacgaagtggccaagttcacggtacataagtcggtaagggaatatgatatacacagagtctggacaacctgatacccactgatctaattattctccgaactctggcacctgcagctctgcgctcaatatccttttatatccaagaccctgcgggacattggcaagaaaccggaggagcgacgtcactgctgcggaatgacattgcagaacgagggcattgggtacaccgacctggatgagctgctgcaaaatccttccgatctggagttcatcattgaactgttctccattgagctgcccgagcagtacgaaaaagagcgctggcagatgtccgacgacgaaaagatgctggccaccagtacgctgcgcgaacggggcaacaacttctataaggccagtcggttcacagaggcggagacctgctaccgcgaggctgtcggaattgtggagcagctgatgctaaaggagaagccgcacgacgaggagtggcaggagctggcggccatcaagacaccgctgttgttgaactacgcgcaatgtcggttgatcgccggcgacttctacgctgtgatcgagcactgcaacgaggtgctcaccctggatccgcgcaatgtcaaggcactttttcgtcgggccaaggcccatgcgggtgcctggaatccagcacaggcacgtcgcgacttcctcgacgccttggccttggacgccagcctcaagtcgaccgtgtctaaggagctcaagtccatcgaggatcagcagcaggcacgtaacgtccaggatcgcattcacatgcagaagctcttctagaacataagttgcgtcaacgtgctgctcatgctgcttgtctattggagcagctacctgcagcgctagcagtacttgtcactaccttcttttctttcgctggccgtcagcttcgctcatggtctcgtgctgctctgctcgatggcgaacctattcctctgctgctggaccctcaagaagctgctgcgagcaatgcaggggctcagctggtgattttgcgacaacataacacaatcaaccaactcggtaccataccacctcattttgtgagagctgcattttggggcactatatgcccatactcatcctccgcctcgattcacattcaacggtgtaggctaaagggtctaaatataatgtaaatgtaccatccagatgcttgtgtggaattgtaatcgtgtgtatatggaatgaaaaatgttgtttgcgtagcgttaccaaaaatagtaatcaaatgtttcacatttgttgtccatagtcgtatatgtatgtttgtattgtattgtatatccctatatgcgatatttactcgtagctagaatctactctaaatctagacaaattgtgtaagaagtaataaatgtgcttttgaccgctgtctaattgttaattgtagttgaagactttattgtttgtatacatatatgcggcaagcatacgtaataatatgcatttgcataagagagaatacagtgtataaaataaatatccaaacctttaaatggacaaataaggtcgtaagcaaattggtttcttcctttatatgagtttcaaacgataatactgtggtgagatatctattgtggttggttggctgaccgaaagaaaattatcgcatttgcaaaactagcctcactccaatgataaagaattattttttcgtgataatatagaaaaatactatttgcatttcgagaaataaaatatcaaattgagtttaatattaggtttgatttactaattaaaaatcacgattaagcggcatcgttaacgagtaatatac

SEQ ID NO: 2492 - DNA, 1013 bp, DROSOPHILA
gtatcgaaaggaaattgtgttgattccaaataaatccgattccagcggagatgcagtcgcgcagcaagtccgatatgaagcccatacgaaaggagatcctcaatccgggaaacgcctacatcgagctaaccccgggcaccagggtgaagttccactttcaaacgcggagggccggcgacagtcgcatcatcgatgatagccgcaagatggagaagcccatggagctggtcctggggaagaagtttaagctagaggtctgggagctgattgtgcagcagatgtcccttaacgaagtggccaagttcacggtacataagtcgctctgcgctcaatatccttttatatccaagaccctgcgggacattggcaagaaaccggaggagcgacgtcactgctgcggaatgacattgcagaacgagggcattgggtacaccgacctggatgagctgctgcaaaatccttccgatctggagttcatcattgaactgttctccattgagctgcccgagcagtacgaaaaagagcgctggcagatgtccgacgacgaaaagatgctggccaccagtacgctgcgcgaacggggcaacaacttctataaggccagtcggttcacagaggcggagacctgctaccgcgaggctgtcggaattgtggagcagctgatgctaaaggagaagccgcacgacgaggagtggcaggagctggcggccatcaagacaccgctgttgttgaactacgcgcaatgtcggttgatcgccggcgacttctacgctgtgatcgagcactgcaacgaggtgctcaccctggatccgcgcaatgtcaaggcactttttcgtcgggccaaggcccatgcgggtgcctggaatccagcacaggcacgtcgcgacttcctcgacgccttggccttggacgccagcctcaagtcgaccgtgtctaaggagctcaagtccatcgaggatcagcagcaggcacgtaacgtccaggatcgcattcacatgcagaagctcttctag

SEQ ID NO: 2493 - protein, 320 aa, DROSOPHILA
MQSRSKSDMKPIRKEILNPGNAYIELTPGTRVKFHFQTRRAGDSRIIDDSRKMEKPMELVLGKKFKLEVWELIVQQMSLNEVAKFTVHKSLCAQYPFISKTLRDIGKKPEERRHCCGMTLQNEGIGYTDLDELLQNPSDLEFIIELFSIELPEQYEKERWQMSDDEKMLATSTLRERGNNFYKASRFTEAETCYREAVGIVEQLMLKEKPHDEEWQELAAIKTPLLLNYAQCRLIAGDFYAVIEHCNEVLTLDPRNVKALFRRAKAHAGAWNPAQARRDFLDALALDASLKSTVSKELKSIEDQQQARNVQDRIHMQKLF

SEQ ID NO: 2494 - DNA, 3448 bp, DROSOPHILA
gaaaaagtaaatttagggtattccgcaaagcgcaatattaggggaattacaaattgaatttctaaatccatggtttgtttgaataataataaaaaataaaaacttaactctaaacaaaaaatcaaattagtttttcaaatgtactttaaaagaaagaaaccaaatactttataaaaactattttaattaaaatttactaaacagtgctaaatttaaatccagtattggagattaagtttaatgttttcgaatgaaaattaataaaaatcttaataaaatggttgcacatatttcgattcatagttttttattattattattattattcatagtaaaattattattgcattgttgtgtggctattaatggaatgccccaaattgttgctccaaaatgtagtttccaagttgatgaagtacaacgaaacagctgatcggatgtaaacaaaatagaatgctggatatcgctggtaagtaagtgagccaaaatattatcgagcttggcattcaaaactcatttccagcacaactccttgccgtgggcctcttgtggggcgttaccaatccgtttattcgcctcggcagccagggaatcgagtcggttggtgatacgggctcaaagtggcgtaactttgtccaggaggcacgcacaatcggctcccggtggcgctattggatacccttcggtctcaaccagtgcgggagtgctctgtacgtttggacgctccagagggccagtattacagtggcggtgccagtggccaattccctgagcttcgcatttacggcaatcaccggatatgcgctgggggaaaaactgccgggaagaagtaagctaaatgtctaagtaacaaccttgtccactttgtttaccaactgctcccgcagaagtcattctgggcaccctgctcgtctgctgtggcagtatcctgatgatatacgataagattttgcaggaacaggcccagcaccagctaaatataacattccactgaggttaccctaaacccaaggccaattgtctttattgcattcgataaaagcatcataaaattaaaggttagtgaaaggcacaccttacagagccttgtgcaccgcctccaccagcacttccatgctcgtgatcggagtctgaggcgtgattccatgtcccagattggcgatgtagcgcgacttgccgaacttgtgcaccatttctgtggtcaggttgcgcagctcatcaggatcgcggtacatgtcctgaggatccaagttgccttgcaacgtaatgttcggtccgaccaaattgcgtgcctccagcggatccacagtccaatccaagccaataacgtcgtagcccagttcgctctgctccttcagcgagtgcccagcacccttagcgaacagcgtctacatggaaattccatttagtaagcatcttatcaatgttttagtccatgggaacttaccatgggaaccacggggatggccttctttgtgagacggtccaccagctcgtcgcgtattctcttcaggtagggtacacaccactgcaggaactgctccttggagagatgctcggcggacgattcgaatacctgcagcatttgagcgccagctttcacctgcatctccaggtagtccacaattgcgtcggtcagcaggttcaggaacagcttagagtcctcaggatgttcgttgagccaagctttagctttcgacatggtcttgctcccaccgccctcgatcatatatcccattagtgtccacggcgctcctgtaaagccgattagcggcactcgaccttcgagcttgtgccgcatcatggtgattgcgtcgcccacgtagctgaggcgggacaaggctccgtccggcgtcaggcgcttgaggtcctccggcaccacgatgggctgtggcagaacgggaccaacgcccgcgtgcatctccacggtgaggccgagtgcttgcggaatgacaaggatgtccgaaaatattatggaggcgtccaggtcgaagcggcgcaatggctgcatggtcacttcgcacgctagctccggggtgcggcagacggtgaagaagtcgtggtgctttcgcagctcctggaactccggcaggtagcgccccgcttggcgcatcacccaaacaggcacccggtccaccacctcgccacgtgcggcgcgcagcaggttatcattcttgagcacgggaaagggctgaaactcatttccaatttgatcagttttcacgtttttcagcaggaaaatacagagacacagcaatcgaagtccaaacgacatgatgtaactgcaggcgccactccgatcagctgggaaactcacctttgcgtctttcatagtgacttttggctgttaaaaaggtagtagagggctaacgaagttatttccactgatgaaatccgtaaatttgattaaatctgtcacggaatcccgcaattctgcatgagtgtgcgttctctgccagactttgtttacgttttcgcctggtggtgggagaggtgcgatagtcgccggcaaatcgataattagctaatctggacaacttttctttttaggagaatcagaaattattccacttatgaatagttaattctttttcttggcttgggtttgttatgtgtcgagtggccgaaagataatccagattttgatataacccgtgatcataaaacatttaattttaataagttaaaagttttcgacgactttataatatcccttgatttcaatagaatgtgaaataattccataaggaatagaactaactagggaaatagaacttaaattttgaaaaataatcgattctttaattagcggctactcgaaaagcacctaaaattcaccaaccgcatgatttgatttttgtaaacaatttttgcagccggtggacatggaacgtttggcaagaactttctcccagcagaacgaactgataaccctgaatgagaactacaaggatgagttcgaaaccttcaagtcattggcatccatgccagcggacattctgcagatattccagaagctggcgctcgacttgctgcaggatttggagcaaccggttgacaggaaaggatgcgcagaacgttcgaaaaatctgcgcgaggagggaaaccttatgttcaaagagtccgcatcgggatcctccaaggactcggttctgaaagcatgcaggctttactcggaagccgttttcgaggctgagaatgctgtggaagagctgtcgctggcgtttgccaaccgaggaatagctttgcaggagtacgggtactacagagaagcctatgacgactgctccaatgcgctggagtgcggatacccggaaaggctgcggcacaaggtgatcatgcggcaggccttctgcgcctggaagctgaagaagattgcttcgctagaggagcatttggattatctcgggcagctgcagcttaaagagagctttgagcagcagctgga

SEQ ID NO: 2495 - DNA, 1263 bp, DROSOPHILA
cgcacactcatgcagaattgcgggattccgtgacagatttaatcaaatttacggatttcatcagtggaaataacttcgttagccctctactacctttttaacagccaaaagtcactatgaaagacgcaaagccctttcccgtgctcaagaatgataacctgctgcgcgccgcacgtggcgaggtggtggaccgggtgcctgtttgggtgatgcgccaagcggggcgctacctgccggagttccaggagctgcgaaagcaccacgacttcttcaccgtctgccgcaccccggagctagcgtgcgaagtgaccatgcagccattgcgccgcttcgacctggacgcctccataatattttcggacatccttgtcattccgcaagcactcggcctcaccgtggagatgcacgcgggcgttggtcccgttctgccacagcccatcgtggtgccggaggacctcaagcgcctgacgccggacggagccttgtcccgcctcagctacgtgggcgacgcaatcaccatgatgcggcacaagctcgaaggtcgagtgccgctaatcggctttacaggagcgccgtggacactaatgggatatatgatcgagggcggtgggagcaagaccatgtcgaaagctaaagcttggctcaacgaacatcctgaggactctaagctgttcctgaacctgctgaccgacgcaattgtggactacctggagatgcaggtgaaagctggcgctcaaatgctgcaggtattcgaatcgtccgccgagcatctctccaaggagcagttcctgcagtggtgtgtaccctacctgaagagaatacgcgacgagctggtggaccgtctcacaaagaaggccatccccgtggttcccatgacgctgttcgctaagggtgctgggcactcgctgaaggagcagagcgaactgggctacgacgttattggcttggattggactgtggatccgctggaggcacgcaatttggtcggaccgaacattacgttgcaaggcaacttggatcctcaggacatgtaccgcgatcctgatgagctgcgcaacctgaccacagaaatggtgcacaagttcggcaagtcgcgctacatcgccaatctgggacatggaatcacgcctcagactccgatcacgagcatggaagtgctggtggaggcggtgcacaaggctctgtaaggtgtgcctttcactaacctttaattttatgatgcttttatcgaatgcaataaagacaattggccttgggtttagg

SEQ ID NO: 2496 - protein, 356 aa, DROSOPHILA
MKDAKPFPVLKNDNLLRAARGEVVDRVPVWVMRQAGRYLPEFQELRKHHDFFTVCRTPELACEVTMQPLRRFDLDASIIFSDILVIPQALGLTVEMHAGVGPVLPQPIVVPEDLKRLTPDGALSRLSYVGDAITMMRHKLEGRVPLIGFTGAPWTLMGYMIEGGGSKTMSKAKAWLNEHPEDSKLFLNLLTDAIVDYLEMQVKAGAQMLQVFESSAEHLSKEQFLQWCVPYLKRIRDELVDRLTKKAIPVVPMTLFAKGAGHSLKEQSELGYDVIGLDWTVDPLEARNLVGPNITLQGNLDPQDMYRDPDELRNLTTEMVHKFGKSRYIANLGHGITPQTPITSMEVLVEAVHKAL

SEQ ID NO: 2497 - DNA, 6870 bp, DROSOPHILA
atatgtaccatgtaaattcgtttcttcgatcagaattgattttggcccgaaaatcgtcttctagcacaacacgcacacttatacgcgttctcgtctcttgtttttactcacccaagcaagcaaattatatttttagatttcttacgctctcagcgggagtgagcggaaagagagtaattttggccgtcaccaaaaaagtggctgcatagtgccaaaccaatgtatggccgttacgcatcttgttattctagggtctttggtaagacacaggcgtgatgtcgcttacgaatcaaattatatatatgtatatacgtaatgtaaggtaactaatggtaacgtacactgttataaatattaatgccaagcgcagaactttcaaaactgttacttgcaatatatttacagttgcttaagcctagcctagtggtctagattatatagctagattattttgaacgatccgatcctgaacttgcagctacttgggttcgtgatgcgaaagcacagcaaatgtgggggggttaagtgagcatcgtatgatgaccacaattcaaagaacagattccatacactcgtctatgtggctagagaaagaactatcgatccacggggaattcaattcttaaggatttatttaatctccagcagccttgcttgctactccaatgtcttcctctttccggttttaacaatatttacacttctgaaggcctaaaaagatcgctggcttacaacatgtgatacatcatatacatatataatctagtaattatgtaattatcgaatatttctgcatcattagatttagttgcttaactctcgcatagtttaaacttgcatctatgtatctgctgctctcgctgtaaacataaaagtcaaggaagaatctcttgaaccacataacacatgcacttgctttaaaacgggaaacagaggaagcagaaaaaaaacattacaacaaactcgactcctaaagctacgtgttatcctaaatatccgcttagccgtcgacgaccatgcgttccgatccggagtcgcactgctctatgaccaggcgagcgatgcgcttgatctcgcagtagggactctcgtgctcgattagctcgttgaggatctggatgccgttctcctgctccaccagcttgcaatatttttcgggataaacctgtgacggaatgcagaagttagtacacaatgcaccaacaatgggaaaaggaattgctcccccacctgtgtcagattggccagggcccaaacagcccaatgttggcactggggcgtctcgtagcagcgcaccaggctgaggatcggctcaaagctgcggtagttgatgttccgctcgctcttgatgttccaccgctgaatggcggccaccatgcgctccagcacgtgctcccggctgggcgtcttgatcgtccaggcatccgctccgtccgaggcaatgtgcgccagcactccagccgcattgtagctgacctggaagcgcaggtaggcatggttagcactggccatctctctctcccgcactctcgccaccacactcgcactagcaccacccacctcgatgccatcgctcagggagtccagcagacgggcaaacacctcaatgaactcctgggtcatcagcttgggccgcagccacttcacctcggccacattgcccagcaggcccatcatgttgcgcaacagctcgtcacgatccgggaaggtctgttttggaaaaggacagttcagcttaagaagtctggatacaggaagttaacctatttcttcatgaaaccaaggagtatacatttgttcgctttctctatgcagctcttaaattaaatattttagttcccaatcttatctttgttgcgctgcggataatggcaagtttttggagaacttacatgtaaacacttaaggaaatactccatgccacgtccatcgaggaatctcttacaattaatagcagtctcatcggttacgttccacatggtggaccaagccacctccatcacatcgtcgaaaacggagcgagtcagccgatcctttatcaacgtgaacatggtctaaagtcaagaatatcaccaataagtacaataagttccggcaaacagttgataggcaagacacttacactaactacgcccaactcgcccaggaagagcttctgtcgcccatccacctggcaagcgagtgtgttcagcaggtagattgctatgcgctggacaaatccctcttgctccgtcttagaaacgccgtgcagcaggatcttgatgagacgctcgtactcgaagagctgaaaaccagacatttagctgtacttaatataatattagattaggcggtgcttaccacatcgactggcatgtgaaactgggtgagcgtgaggtaaccattccgcagcatggtgtcgtcggtgatgtgcatctccatgccattgagcagcgtgcgaatgatgtgattgcgcagtagtgctccaaacttggatcgatccctgcccttgacaatgtagaacagcgtggcactaatgaagatgaaatttagaattaaatactattttcacttaacttcaaagctataaacccacctgccggagatttgcatgtgcttgaacttgagatgccgatccatggcggagagcacaacatccagtgctgtgtgtatgtccttgcagttctcgaagcggaagagatggtacaagtcgttgagaactcttgtcagaagcactggtctgtcgtggtaataacgcgccgcagtaaggatttgctgctcgttggcatcgccagctacctccaaagctggaatatcgtgtcttttgcaggcccagtgggccgtgtgatagaggcctaggaactgcagcggtcgctgggtgcgggacgctagccccgggatgtctgtgagggcaaagtgttgctccattttggggctctgctgcatgccactggtagttgtcgactccttggtggccacaccgttgccggccaaattcgtgccagagatatccaaatgtgtgagatgtcgcaagttgtccatcagcatctccagcgtctgatcgggcaggtcgtaggtgccgtggccatttccggaactggagatggatatgtccagtgtgcacagacgcctcaggcagcagatcgcatgcagctggttggcgatgggccacacattgaacaggatgagcgtgtgcagattgggcagcgagcccaatgcctcaaggctgaagttggccagcacgcaggaggtcaggtccaggtggcccaagtcgtggaggtgagcgaactgcaggcggtggtgcatcacaacaccgttgagcaccagccgccgcagatgcggacaagtcaactggaagtccactggctccttctcgttgggctccgcgtactgcagcagatgggaactgatgcccaattccagggatcgcagactgtcgccgtagtgggccagaaggtggtgggaaccaacggatatcatgtcacagtaccacaaggacaaagcgaacagtttgtgccgcatcagagtctccaagcctgcaaaatgtatcaaatagtatttcaatatgttttaaacttattcaagtcaatgtggttcagcaataaatatgcaatagaaggttgattggatatctatcaattcgaaggtaacacatttacataagtgtaatttttcaaatgaacttgcatctgattttgtataaacttttagaggtgcggttgcaaatatttaaatttaagtttgtctgtttgaaagtctgacagattccagtataaattccgttcaattactattcaatggagctcaacaacaccggatgtgggcggagaacactacggatggcgggcagagctcacctatactgcttagggtgctgttgcgaagattgacgatcttgagcgaagtgcggtgtgtgtcctcgaagaggcggatgacgctgtcgtccagcgggcgattgaatcgctgatagttctcgaggaagccgtcgcagatctcgttgggcagcacaatgcccggattgaggccgcgctggccatctggccggtggctgctaatgatgtccagattgttgcacagcttctggtaggcgatctccttgagggtcagcggctcctcgtccagcgagccgtcctccatcagccgcaccttgcagctcatcttggggccgcagttcttgtgctccgccagtggggcctcaataatggccctgttgtctaaaacgaaacgaggcgatgggaggtatgattaaacaaaatttcaataagcgtgaaactagtttttgggtatgtggtcatcatttcatcattttgtgaaatattgaaattactgttctttgaaataaaaaaagtgttgaaacagaattcagaaacgatatcggagaatatacatgataatttatttcaagtcatgaaatgactacttcacattatgattattatagaaatgaacttatattgctgataataaaattaaattaaacacgggttttctatcacaaaatacaaaactattgtagaccggcttttacttttaatcacgagacatgcacatgtaatgcgttcgatttttcaattaatttaaatgaatttgattttggcccattaatccatccaggtgctcaaactcaatactctgtcgattatacatgattttatagccccttatttgagattacaagtcatgatggaacggatgagtgattcaacctttgaatcacatcaatgaatgaatgaaagtgcccttttcttttcaagattacagacatggattgccattgaagtgttttccattgagtgaattaaatattttgtcactttcaaatgagcccttaacatcaatgtttataaaatgagcttacaatgtattattatactaagataaatgggcaatgacttgacattctagattatatactttttgatgtacgatttctttagttcttttgtaagctagccaggaattaatcaatttaattaacgagtatagtttgtgtttacatgttgcactttttcgactaattattgtttgggtataggaagcgggcttgcccttgcagtcgaacccttgcagctcctaacttttggaacttgagttgccatggatgactggccaatcttgcccagacttttcaacgcaggcacgtgccattgttttaatctgttttcggctcttggcttccgatagtcatgtacccctgctgttacataaccaagggtcatctaattgggaagaatgcggtattaatacggggactatgatcctggttacatccaggcagatggttatgtccatgtcgtggcgtgtgtgtatgtatatgcacaagttccgcggatctcaaaggtacatacatgcatgtaaaaaacaaatggcttgcgtgtgtctgtgtgggtgcgtagttattgaagaaaaaagcacaaaaacactaataaagcgtcggcctgtctggcttatctggccaacaaaactaagcggagtgaccaaaataacacggaactgcgagcagcgacagtcagctgtccggatatttttacccggagtctcggagttgctggccgactggccgtggagccccacgctttctgtaccttttattttgctttagtgtcgccccaaaaaagcagcctccaaaatccctcgctgcttttgcttctgtcgttgcgtttgtctttgcttttgcgtttgctttgccactgctgctctgtctttgcgttcgttttgccaacggattttccgaacttcgagcgatttttccgcgattgcgcagcgttttaccgttacacgcggcactcgagcgccagaaaattccaattgttattctctaattttacgatttgcgtatggaaatcacttcattattttggtttctattttctttcttctcgccagtgtgaccagatgccgaatgcgctccaacacccaatgctgtctacctaacactacttcgcactaaaaaataccgaaagtatcctttcatattcgaaagctaatccgaaaattctggaactccgaaatcctgacttttgaaaatctaaagttagtgaataaatgttatgcaaaggcttgcagttaagatatgcaattacttaatgtcattagcccgcgcaagaaaaacagacacttgaattggaaactatagtttattttgtaagttaagcgctgaaataaatcaattgtaaatgtacacattgttagtcggcggcggcgtgcttgcctgggttctaatttgtagttctcttgctccgataatgcgaagaaaaccgacaattgcttccctcgctgtagggatactttttaaagactaaatcactgcgttgcagaatcatcataatcatcataatcgtattgtataatccggatgccgtgccgttggctttcggactggcgtaataaataaacttgcatcgtttgcgttttaggtgctacgtaaaaaatgatagaacaaatgcggggagccgcatgcaattcggatagctcccccttctaaccggacagatctccctgatcgaagatgccctggtcgtagagctcggccaccactctccgaccgccgaagaaccggccgtcgagtgcctccttgccccgcatggcctccgctcctgccgagaactccacgaagatcttcacgatgatctccgcctcgtcgtcgtcctcgttctccgtctgcttctcgttgaagatgatcacgcgactgacggtgccgaatttactgcactcctcctggatctcctcctgcagggtctcgtccacatcctcgggtccgaccatatttcgcaggatgattacacgtgagtccaccggccgcatcagtcgctgcattaccaactgccgcgcgctctggcccttgatggacatgttctcctgctgctgcagcgtctgcacgtcgccctcatc

SEQ ID NO: 2498 - DNA, 2660 bp, DROSOPHILA
tcacactggcgagaagaaagaaaatagaaaccaaaataatgaagtgatttccatacgcaaatcgtaaaattagagaataacaattggaattttctggcgctcgagtgccgcgtgtaacggtaaaacgctgcgcaatcgcggaaaaatcgctcgaagttcggaaaatccgttggcaaaacgaacgcaaagacagagcagcagtggcaaagcaaacgcaaaagcaaagacaaacgcaacgacagaagcaaaagcagcgagggattttggaggctgcttttttggggcgacactaaagcaaaataaaagacaacagggccattattgaggccccactggcggagcacaagaactgcggccccaagatgagctgcaaggtgcggctgatggaggacggctcgctggacgaggagccgctgaccctcaaggagatcgcctaccagaagctgtgcaacaatctggacatcattagcagccaccggccagatggccagcgcggcctcaatccgggcattgtgctgcccaacgagatctgcgacggcttcctcgagaactatcagcgattcaatcgcccgctggacgacagcgtcatccgcctcttcgaggacacacaccgcacttcgctcaagatcgtcaatcttcgcaacagcaccctaagcagtataggcttggagactctgatgcggcacaaactgttcgctttgtccttgtggtactgtgacatgatatccgttggttcccaccaccttctggcccactacggcgacagtctgcgatccctggaattgggcatcagttcccatctgctgcagtacgcggagcccaacgagaaggagccagtggacttccagttgacttgtccgcatctgcggcggctggtgctcaacggtgttgtgatgcaccaccgcctgcagttcgctcacctccacgacttgggccacctggacctgacctcctgcgtgctggccaacttcagccttgaggcattgggctcgctgcccaatctgcacacgctcatcctgttcaatgtgtggcccatcgccaaccagctgcatgcgatctgctgcctgaggcgtctgtgcacactggacatatccatctccagttccggaaatggccacggcacctacgacctgcccgatcagacgctggagatgctgatggacaacttgcgacatctcacacatttggatatctctggcacgaatttggccggcaacggtgtggccaccaaggagtcgacaactaccagtggcatgcagcagagccccaaaatggagcaacactttgccctcacagacatcccggggctagcgtcccgcacccagcgaccgctgcagttcctaggcctctatcacacggcccactgggcctgcaaaagacacgatattccagctttggaggtagctggcgatgccaacgagcagcaaatccttactgcggcgcgttattaccacgacagaccagtgcttctgacaagagttctcaacgacttgtaccatctcttccgcttcgagaactgcaaggacatacacacagcactggatgttgtgctctccgccatggatcggcatctcaagttcaagcacatgcaaatctccggcagtgccacgctgttctacattgtcaagggcagggatcgatccaagtttggagcactactgcgcaatcacatcattcgcacgctgctcaatggcatggagatgcacatcaccgacgacaccatgctgcggaatggttacctcacgctcacccagtttcacatgccagtcgatgtgctcttcgagtacgagcgtctcatcaagatcctgctgcacggcgtttctaagacggagcaagagggatttgtccagcgcatagcaatctacctgctgaacacactcgcttgccaggtggatgggcgacagaagctcttcctgggcgagttgggcgtagttagtaccatgttcacgttgataaaggatcggctgactcgctccgttttcgacgatgtgatggaggtggcttggtccaccatgtggaacgtaaccgatgagactgctattaattgtaagagattcctcgatggacgtggcatggagtatttccttaagtgtttacataccttcccggatcgtgacgagctgttgcgcaacatgatgggcctgctgggcaatgtggccgaggtgaagtggctgcggcccaagctgatgacccaggagttcattgaggtgtttgcccgtctgctggactccctgagcgatggcatcgaggtcagctacaatgcggctggagtgctggcgcacattgcctcggacggagcggatgcctggacgatcaagacgcccagccgggagcacgtgctggagcgcatggtggccgccattcagcggtggaacatcaagagcgagcggaacatcaactaccgcagctttgagccgatcctcagcctggtgcgctgctacgagacgccccagtgccaacattgggctgtttgggccctggccaatctgacacaggtttatcccgaaaaatattgcaagctggtggagcaggagaacggcatccagatcctcaacgagctaatcgagcacgagagtccctactgcgagatcaagcgcatcgctcgcctggtcatagagcagtgcgactccggatcggaacgcatggtcgtcgacggctaa

SEQ ID NO: 2499 - protein, 758 aa, DROSOPHILA
MEDGSLDEEPLTLKEIAYQKLCNNLDIISSHRPDGQRGLNPGIVLPNEICDGFLENYQRFNRPLDDSVIRLFEDTHRTSLKIVNLRNSTLSSIGLETLMRHKLFALSLWYCDMISVGSHHLLAHYGDSLRSLELGISSHLLQYAEPNEKEPVDFQLTCPHLRRLVLNGVVMHHRLQFAHLHDLGHLDLTSCVLANFSLEALGSLPNLHTLILFNVWPIANQLHAICCLRRLCTLDISISSSGNGHGTYDLPDQTLEMLMDNLRHLTHLDISGTNLAGNGVATKESTTTSGMQQSPKMEQHFALTDIPGLASRTQRPLQFLGLYHTAHWACKRHDIPALEVAGDANEQQILTAARYYHDRPVLLTRVLNDLYHLFRFENCKDIHTALDVVLSAMDRHLKFKHMQISGSATLFYIVKGRDRSKFGALLRNHIIRTLLNGMEMHITDDTMLRNGYLTLTQFHMPVDVLFEYERLIKILLHGVSKTEQEGFVQRIAIYLLNTLACQVDGRQKLFLGELGVVSTMFTLIKDRLTRSVFDDVMEVAWSTMWNVTDETAINCKRFLDGRGMEYFLKCLHTFPDRDELLRNMMGLLGNVAEVKWLRPKLMTQEFIEVFARLLDSLSDGIEVSYNAAGVLAHIASDGADAWTIKTPSREHVLERMVAAIQRWNIKSERNINYRSFEPILSLVRCYETPQCQHWAVWALANLTQVYPEKYCKLVEQENGIQILNELIEHESPYCEIKRIARLVIEQCDSGSERMVVDG

SEQ ID NO: 2500 - DNA, 8107 bp, DROSOPHILA
aatactttgaaatattttctgttttcattggcatataattttttaagacttcagcgttgcgaaatatacagagattttctaactcatgcgtcttttgataattacatgacaagatttttaatttcccattttcggtttttgactaaacatacatttacgtacatacatacacaaaaattcatatatacatctttctctttattagttttaaaattgcaatacaaaacttcagacagatcccattaggattccaccatgacatatacatatacctatttttttttatcgatagattggtcttacatttcacgcacacagtacatatttattaaagctctatggaaataatgttttggggcaagggagggactcttaatgtctatacagaacacccaaaattaagtaaattattgccacgtcggccccaacttatcacatcttatcacataaaactggtctaactattcaaaaaaaaaaaattgcattagggtacttatttatatgcatatgtcggctataaacaaacgtttcatggcttataaactaatttaatccacccacgataatagtatgtttaaaacttcattataaagctagcattttttaatattaacgcagcatatttaaggcttattagaaatccaatttttctgggaaatcctttgccttaaattttctaacacattttgtctgccttattatttcaagttatgtccaatatgtgcttaaatgataactagtagtacaccgaaatcagtttacaaaaaaaaaaaatagattgtctagttgaatataacagcagaacaaaataatttgattttctacgctttctaaatggtcattttaatttcataattactataatttagttttgatgcaagttttgaaagtttaattttgaacacactaataagtctcgaataataaccattattcgattaaaaaatagaatttgaatatagtcgtttttggtttcaaaatcggaggatgcctgagtcgtttaagttcttgtctcctcgtagccacaatgaatatagccggtttcaagagtgccaccgacagcaggggatttgcttggtagatcgttcttagcaacttgttgctgctgatccttgtgcacgccattgctgccattcgactcgctgctgtcaaggattcgttcgaaaacggtctcgaaacggcagcgactcaacgaaaagcgagccacattcacgcagacatcgcaaaggatggcgaagagttcggagagaaggggggcatcgcccaggctgccaggcgaacggaccctgacgagaaaccgcaagctgtgggcatagtgctgcaagtcccgcgctcccggcaatcgttgattcaagcttcttgaaagaatggcctgttgggcggggccgcagaagcaggtcacggcgtagtaaccaccatgttccgatttcaatcgctgcggactatcgctggcgatgacctggcccgcccgaagcaccgccaccctttggcacagatgctcgatctccgaaacggaatgagaggtcagcaccaccgctctgcgggccagcagcagctgttcgatagtggcatacaccatgtccctggtcacgggatccatgtcgctcgttggttcgtccatcaagacggtgggcgtacatccgcaacaggtcacggccactgttagcttgcgcctattgccgccactcaggtttcgcacctggacatccttgtagggacgcagttcgtacgtgtccagcacacggtccaaaaactgatccaagtcacgaatgccgcgcaggcgtccgtagaagcggatgcactcggtcgtcgtgagcagcgggtccagcgggttgctctgcgggcagtatgagatgccgggctgaaaaaaacgatttgcaattaataccacagttgtcaagcaaatgtaaagccacaataaacatgaccgagccacactgcgtataagtgatactttgcagatagctgctattcaaataacataaataattattctcagttagcacgaaaatatggtggctgtttttggaatttaaaacttgattttaaacttctacagcacaattactgctgacttatgcaaataaaatactttacgtatgaataataaataaaaaaaattaaataaataataatctttaaaggcattttcaatgaatatgtaatctttgtcatataaattaaaaaagctaacataattttaaattgggtcctaaaagaagttactcacttgttcgaagtaaatttgtcccacgtcgggctgcaattgcccagtgagcagcttgaagattgtggacttccctgctccattcttgcccagcaacccgaaacattcgccccgctggacactgaagttaacattacgcaccgcatagtgtccgcggcggtaagccagccagagattctccgcccgcaccgcttcgccggtgtccacgcagctcttgaagatgctctggatgtttaccagcttcagctgacccagtttatccagctcgcggcggtaggtgcagtccaacaatcgctccactcgttgccacagacgccgcagcaaatgccactcgatgaggacgttgatgatcagggcggccacgcccaccaacaacagggcggtaaagtggcgcccaagcaggtcactggccaagggatgcttataagagtcgatgtcgtagcggcggaataccaaggccaccatatagttcttgcacaactccaggaagccgtctcccaaagcatgaattggaaagatcagaaaggcctggttgagggcgtggcgccaatcatcccaggctggcccatcgcccaccacacccaggatcaggatgatgcccatagtgaccagcgggacaatgaggttggcgcaaaaaatcgatacaatggcaatgcttgaatcgctgaagatcttctcagccacatgaacagatggaacacaggcgaagctgtgaaatagaaaatatagaaaatggttcggcattcataattcagaactccacctctctcctcaagaactcacctaaaggccagggacagtccaataatgcccaccagctgctggcggtccacaaagacaggcattccgaacatcaggattacaacgaggcagacaatcagacccaggaccatcaccagataatcccagacgagggccaccagccagtaggtaaccgcgcttactccgcacaatctctgctgcagcttctcgccattgacacgctcgtttaccaaataaacggaacctgatgccaccaccaagccaaaagctatcagtaggatgaagaccatagacccgtcacctgcctgccgaaggatcgagctggtactaagttcggcaaaacccagtttccacggttcattcagggtaaggatactagactctgagtcgttcatagtcgtgcgcagtagctccgagttaaggtcgtttagccaggccatcatggaatgatatcccttattgttataccaaactgtagcacctgacccgtttaatccatagccgccgtatcggcgctcgctatactcgccccaagagttcaggacccaatcgtaggactgttgagaagtattaaatactctgcactcgcccagatggtcacatgaggttcttagctgtggatacagtttctcggagaagctggttgccctctcgtgtgacaaaaactgagcggtttggggatagagcgatcggctcaggggtagaacagtgtcgaaatcatcttccagacgatagctgacgaaccacatggcacacagttcaaaaagagctgggagcaggaggacatagagaaggaggcggtagttccgggacagatgcctcaatcgcttgcccatgagcagtcggaattgcttgcaagcggttggtggttcgtctgttatcattgcagggccagcgactactccactccgatcgctggcaggacgtcgaggtcccgcatcctcgccattcctattcaactgctcgaactcctgttccaggcttgagctggttgtgagctccacatcgctgatgctgccagctgtcacttgggattgcagcagttccagaaattcgacggctcctggtgttaaatgctccgcatagctggcattgatggtcaggctgtgagggtagtctgcggctcccgaatgggttacctgagtctgagggagaagctgctgtgccttctggatgacgaaggttactccggtggcatcggcacaacgtaatcgaatgctatagtttgaggtacacaaacgctgcagggagtctcgactatgctgggcaataatgcgaccctataaaggtaacagaaatcgaaatgcacatatttcaatcacgagcgaatactaaattactgcttactgctagtagtaaatataagaaaaagtcccatgccaatatagtttcgcatgtttgttgcagatttaaaaagatattctagaatatgaattcgattgcatttttgtttcatacttacattccgcattatcacaagtgaatcactgaggtacttggcctcatccatgaaatgggtggcaaagatgactgctctcccttgacgcagtcgctcaatcaactgccaaatgtcctttctcgccttggcgtccaccccattgcagggctcatccaagatgaccacactgggcgaagcaatgaaggctatggccacgcagaggcgtcgtctgtagcccccggacagctgccacgaaggataggattcgtgcttaccaaagtttagactctggagggtttgggcaacctccgagcggatctcctccacacctccactcccacctggtggtatcttgatctgtgcatacagctgcaggtgctcccgagccgtcagcgtgggtattagaatattatcctgccaacagacacccacttggtgctctccggccaacaggaccttgccactgctctgccggatttgtccggtgagcaacttgatcagcgtgctctttccagctccatttcgacccagaagacagctcacctggttgcgcgcaaagtcgaggcttaagtttgaaacagcgcacttgctgccatacagtttgctaacattaaccaacgaggcgcccagtttgccgtccaattgtgagcgactgaccttcacaaagctgtagttatctgctaaatccgaaaaataatatttatatttaatgattcaatccatcggaagccacatacttttcttatagcgctggtaggccagtccaataaccgcatacagcagtaaatcgagaaggaacatgagcagcgccatggcacactcacttctcgcaggacccacctggatgagatgacgtactgtcagtccctcctgctgcagctccattcgaatcaactcgccccagcccttggcaaaggccgtggtgaaggagaggtccaccaggaagctctcgaaaacgctcaatttggcatcgaacatcagcacaatgataaagggacaaaggctaatgaagaatagaagggcggaggccacagcaccaatgtttgccgaattaaaaaagttggtgcacatataactggaagtcgggcgtaaaagttagtttattcatacatggtgcaatgtaaaaactacttaccagaacgaaattaggcaaaggccaaagctcaggcagtagaacatcataaaaaaccagttggtatagcccaaaataccgccactgtacaggaccccgctgatcagcgcaaagattacacaaagctccaaaaaactcatcagcgcccaggctaccagctcggaatgcgcctttagacccattgatcgcatcaactaaaggggatagatataatataggtttacttccaaataattattatcattagcttgcaagacacttttagagttatttgatagaaatttaaatatttaaaatagctcatgttccatattgtttttgaggaaaataattatttatacgagatacatattctcaccatgctattacggctctctcgcatccagatgcgttcccttacagaaagagcgacgaataccaccaggccgagtagataagccacctggacaccttgggccaagtacaagccacgcttaaagctacaaaaattaaaaagaaaatattaaaataacttattcaattgataatggtcagcacttacacatcgttaaggaaggcgggataaggaaattgcttggtgtagaactgcatgttgtccacttcgaatttgttctttttattggcatccccagatccaccgaagcctccaagcaaatcgaacagaccctgccgtttcgagcgcttcagcacatcttcatttttaagcaggagaagatcggggtcaccacttacgactgtctgttctgtagtgaccctaacttcttcagtggttaccccatccaaggatgatggagaaatggttgttgcctcatgatcactcgcagatgctgatacctttggagcggccttctcgtcaccgctttcctccagactgagatcaaagtcatcatcatcctcatcgggcgtatcgttctccacctgcttgatactaaaaagaccacttaaggaacgcccactttcaggcccatcctcctctggcgcaaagccagcctcttctcgcttgcttttgataattcccaggtcgaccatctgtttgagctgaacgaagccacgatgatacttcagatcaataaccatgctgtcggcgggtccggggaaccagaatctgttccggttctcaaaagtcggctgcgtgttatccgtatccatatgcagacggtaggacgcttgcttgagacctacgtcctccagattgagggcggccaaaaacaacttgttttgatttagttcgtaggctctcttgtgcagttcctccacactttccacagcctcaaaacgatcggccgaaacgcaatccattaaatccgccacggtggtaagaatatcatatatcagttggttggtgcgaatatattcgaagaccctttcaatttccccaatatcgaagtcatctccgaccaaactcttgaccagtggcgacttggccaacttgagaagattatcgaaggcctcctggaaagtagcgtttgtgtgcagcttggtgagaatagtggctgctgcacgacttagttgcttcagcctatccagttcctcaaaagaggcattactctgtaatcatataattattaacttcttacgtttttattaaggtaaattgcaaaaaaaaaaaacctacaaacttcaccacgctttctgtcatagcattggcaggggtatacaagatccgtccctggataatcggcttgatggtgttccaggtgagtttgccttggttcgtagaagtcacatcccggtagaggcgtttgcagtatttagctggtggttagaatggttataaatacaaaagcagctggcaactagggaaaactattggaataagttattgtacatccttacaaacagaatgtatgactgcgtttaaaagataagcccctttcatttaaccaatacaagcaaacatgggagttaagactttaatttgttatgtaattaggaagcttttcaaatattaaaaaatatttggtcatgctcacttggcctccagtccgtgggaagatcttcgtatcgacgacgacgacgggctggaggcagagcaaggttggaaatttgcagtatttgggaatttataagaggacctcctctatagagggttcaactcactgggcattgcatcgatctctgcatcgttggcctggctaaagtcctcggattccaggatttcattgaccaacggtatagtatcggtattgggaaacggatgaccacacaaaagaacgcccaacttcacgaaggtttcgcgatctaccagagaattcagttgggattatttggataacagcagtttacatttaaacaaactcgaaaacaaatgtttgatgtcgaagctgtagttcattcgtcgttcgatttcgggcacgagggaaattatttcacttatgttacctgtacaagaaaataagtaaaaaggttgcaattcaatgaatattcaaacatagttataccgaacaagagagaatgctatagtcgagtttcccgactatcagatacccgttactcagctagtgtaatgagtagcgtagtgctagctaaaaagttcgttgcaatatat

SEQ ID NO: 2501 - DNA, 4752 bp, DROSOPHILA
agtaatgcctcttttgaggaactggataggctgaagcaactaagtcgtgcagcagccactattctcaccaagctgcacacaaacgctactttccaggaggccttcgataatcttctcaagttggccaagtcgccactggtcaagagtttggtcggagatgacttcgatattggggaaattgaaagggtcttcgaatatattcgcaccaaccaactgatatatgatattcttaccaccgtggcggatttaatggattgcgtttcggccgatcgttttgaggctgtggaaagtgtggaggaactgcacaagagagcctacgaactaaatcaaaacaagttgtttttggccgccctcaatctggaggacgtaggtctcaagcaagcgtcctaccgtctgcatatggatacggataacacgcagccgacttttgagaaccggaacagattctggttccccggacccgccgacagcatggttattgatctgaagtatcatcgtggcttcgttcagctcaaacagatggtcgacctgggaattatcaaaagcaagcgagaagaggctggctttgcgccagaggaggatgggcctgaaagtgggcgttccttaagtggtctttttagtatcaagcaggtggagaacgatacgcccgatgaggatgatgatgactttgatctcagtctggaggaaagcggtgacgagaaggccgctccaaaggtatcagcatctgcgagtgatcatgaggcaacaaccatttctccatcatccttggatggggtaaccactgaagaagttagggtcactacagaacagacagtcgtaagtggtgaccccgatcttctcctgcttaaaaatgaagatgtgctgaagcgctcgaaacggcagggtctgttcgatttgcttggaggcttcggtggatctggggatgccaataaaaagaacaaattcgaagtggacaacatgcagttctacaccaagcaatttccttatcccgccttccttaacgatgtcctttgtccctttatcattgtgctgatgttcgatgccaaattgagcgttttcgagagcttcctggtggacctctccttcaccacggcctttgccaagggctggggcgagttgattcgaatggagctgcagcaggagggactgacagtacgtcatctcatccaggtgggtcctgcgagaagtgagtgtgccatggcgctgctcatgttccttctcgatttactgctgtatgcggttattggactggcctaccagcgctataagaaaaataactacagctttgtgaaggtcagtcgctcacaattggacggcaaactgggcgcctcgttggttaatgttagcaaactgtatggcagcaagtgcgctgtttcaaacttaagcctcgactttgcgcgcaaccaggtgagctgtcttctgggtcgaaatggagctggaaagagcacgctgatcaagttgctcaccggacaaatccggcagagcagtggcaaggtcctgttggccggagagcaccaagtgggtgtctgttggcaggataatattctaatacccacgctgacggctcgggagcacctgcagctgtatgcacagatcaagataccaccaggtgggagtggaggtgtggaggagatccgctcggaggttgcccaaaccctccagagtctaaactttggtaagcacgaatcctatccttcgtggcagctgtccgggggctacagacgacgcctctgcgtggccatagccttcattgcttcgcccagtgtggtcatcttggatgagccctgcaatggggtggacgccaaggcgagaaaggacatttggcagttgattgagcgactgcgtcaagggagagcagtcatctttgccacccatttcatggatgaggccaagtacctcagtgattcacttgtgataatgcggaatggtcgcattattgcccagcatagtcgagactccctgcagcgtttgtgtacctcaaactatagcattcgattacgttgtgccgatgccaccggagtaaccttcgtcatccagaaggcacagcagcttctccctcagactcaggtaacccattcgggagccgcagactaccctcacagcctgaccatcaatgccagctatgcggagcatttaacaccaggagccgtcgaatttctggaactgctgcaatcccaagtgacagctggcagcatcagcgatgtggagctcacaaccagctcaagcctggaacaggagttcgagcagttgaataggaatggcgaggatgcgggacctcgacgtcctgccagcgatcggagtggagtagtcgctggccctgcaatgataacagacgaaccaccaaccgcttgcaagcaattccgactgctcatgggcaagcgattgaggcatctgtcccggaactaccgcctccttctctatgtcctcctgctcccagctctttttgaactgtgtgccatgtggttcgtcagctatcgtctggaagatgatttcgacactgttctacccctgagccgatcgctctatccccaaaccgctcagtttttgtcacacgagagggcaaccagcttctccgagaaactgtatccacagctaagaacctcatgtgaccatctgggcgagtgcagagtatttaatacttctcaacagtcctacgattgggtcctgaactcttggggcgagtatagcgagcgccgatacggcggctatggattaaacgggtcaggtgctacagtttggtataacaataagggatatcattccatgatggcctggctaaacgaccttaactcggagctactgcgcacgactatgaacgactcagagtctagtatccttaccctgaatgaaccgtggaaactgggttttgccgaacttagtaccagctcgatccttcggcaggcaggtgacgggtctatggtcttcatcctactgatagcttttggcttggtggtggcatcaggttccgtttatttggtaaacgagcgtgtcaatggcgagaagctgcagcagagattgtgcggagtaagcgcggttacctactggctggtggccctcgtctgggattatctggtgatggtcctgggtctgattgtctgcctcgttgtaatcctgatgttcggaatgcctgtctttgtggaccgccagcagctggtgggcattattggactgtccctggcctttagcttcgcctgtgttccatctgttcatgtggctgagaagatcttcagcgattcaagcattgccattgtatcgattttttgcgccaacctcattgtcccgctggtcactatgggcatcatcctgatcctgggtgtggtgggcgatgggccagcctgggatgattggcgccacgccctcaaccaggcctttctgatctttccaattcatgctttgggagacggcttcctggagttgtgcaagaactatatggtggccttggtattccgccgctacgacatcgactcttataagcatcccttggccagtgacctgcttgggcgccactttaccgccctgttgttggtgggcgtggccgccctgatcatcaacgtcctcatcgagtggcatttgctgcggcgtctgtggcaacgagtggagcgattgttggactgcacctaccgccgcgagctggataaactgggtcagctgaagctggtaaacatccagagcatcttcaagagctgcgtggacaccggcgaagcggtgcgggcggagaatctctggctggcttaccgccgcggacactatgcggtgcgtaatgttaacttcagtgtccagcggggcgaatgtttcgggttgctgggcaagaatggagcagggaagtccacaatcttcaagctgctcactgggcaattgcagcccgacgtgggacaaatttacttcgaacaacccggcatctcatactgcccgcagagcaacccgctggacccgctgctcacgacgaccgagtgcatccgcttctacggacgcctgcgcggcattcgtgacttggatcagtttttggaccgtgtgctggacacgtacgaactgcgtccctacaaggatgtccaggtgcgaaacctgagtggcggcaataggcgcaagctaacagtggccgtgacctgttgcggatgtacgcccaccgtcttgatggacgaaccaacgagcgacatggatcccgtgaccagggacatggtgtatgccactatcgaacagctgctgctggcccgcagagcggtggtgctgacctctcattccgtttcggagatcgagcatctgtgccaaagggtggcggtgcttcgggcgggccaggtcatcgccagcgatagtccgcagcgattgaaatcggaacatggtggttactacgccgtgacctgcttctgcggccccgcccaacaggccattctttcaagaagcttgaatcaacgattgccgggagcgcgggacttgcagcactatgcccacagcttgcggtttctcgtcagggtccgttcgcctggcagcctgggcgatgccccccttctctccgaactcttcgccatcctttgcgatgtctgcgtgaatgtggctcgcttttcgttgagtcgctgccgtttcgagaccgttttcgaacgaatccttgacagcagcgagtcgaatggcagcaatggcgtgcacaaggatcagcagcaacaagttgctaagaacgatctaccaagcaaatcccctgctgtcggtggcactcttgaaaccggctatattcattgtggctacgaggagacaagaacttaa

SEQ ID NO: 2502 - protein, 1500 aa, DROSOPHILA
MDCVSADRFEAVESVEELHKRAYELNQNKLFLAALNLEDVGLKQASYRLHMDTDNTQPTFENRNRFWFPGPADSMVIDLKYHRGFVQLKQMVDLGIIKSKREEAGFAPEEDGPESGRSLSGLFSIKQVENDTPDEDDDDFDLSLEESGDEKAAPKVSASASDHEATTISPSSLDGVTTEEVRVTTEQTVVSGDPDLLLLKNEDVLKRSKRQGLFDLLGGFGGSGDANKKNKFEVDNMQFYTKQFPYPAFLNDVLCPFIIVLMFDAKLSVFESFLVDLSFTTAFAKGWGELIRMELQQEGLTVRHLIQVGPARSECAMALLMFLLDLLLYAVIGLAYQRYKKNNYSFVKVSRSQLDGKLGASLVNVSKLYGSKCAVSNLSLDFARNQVSCLLGRNGAGKSTLIKLLTGQIRQSSGKVLLAGEHQVGVCWQDNILIPTLTAREHLQLYAQIKIPPGGSGGVEEIRSEVAQTLQSLNFGKHESYPSWQLSGGYRRRLCVAIAFIASPSVVILDEPCNGVDAKARKDIWQLIERLRQGRAVIFATHFMDEAKYLSDSLVIMRNGRIIAQHSRDSLQRLCTSNYSIRLRCADATGVTFVIQKAQQLLPQTQVTHSGAADYPHSLTINASYAEHLTPGAVEFLELLQSQVTAGSISDVELTTSSSLEQEFEQLNRNGEDAGPRRPASDRSGVVAGPAMITDEPPTACKQFRLLMGKRLRHLSRNYRLLLYVLLLPALFELCAMWFVSYRLEDDFDTVLPLSRSLYPQTAQFLSHERATSFSEKLYPQLRTSCDHLGECRVFNTSQQSYDWVLNSWGEYSERRYGGYGLNGSGATVWYNNKGYHSMMAWLNDLNSELLRTTMNDSESSILTLNEPWKLGFAELSTSSILRQAGDGSMVFILLIAFGLVVASGSVYLVNERVNGEKLQQRLCGVSAVTYWLVALVWDYLVMVLGLIVCLVVILMFGMPVFVDRQQLVGIIGLSLAFSFACVPSVHVAEKIFSDSSIAIVSIFCANLIVPLVTMGIILILGVVGDGPAWDDWRHALNQAFLIFPIHALGDGFLELCKNYMVALVFRRYDIDSYKHPLASDLLGRHFTALLLVGVAALIINVLIEWHLLRRLWQRVERLLDCTYRRELDKLGQLKLVNIQSIFKSCVDTGEAVRAENLWLAYRRGHYAVRNVNFSVQRGECFGLLGKNGAGKSTIFKLLTGQLQPDVGQIYFEQPGISYCPQSNPLDPLLTTTECIRFYGRLRGIRDLDQFLDRVLDTYELRPYKDVQVRNLSGGNRRKLTVAVTCCGCTPTVLMDEPTSDMDPVTRDMVYATIEQLLLARRAVVLTSHSVSEIEHLCQRVAVLRAGQVIASDSPQRLKSEHGGYYAVTCFCGPAQQAILSRSLNQRLPGARDLQHYAHSLRFLVRVRSPGSLGDAPLLSELFAILCDVCVNVARFSLSRCRFETVFERILDSSESNGSNGVHKDQQQQVAKNDLPSKSPAVGGTLETGYIHCGYEETRT

SEQ ID NO: 2503 - DNA, 17722 bp, DROSOPHILA
atcctccagctggagtttctcgcgcagctcacgctgcagcaaacttggcttgatgataaacgtggagatgcgacgcaggatgtaggagaaggtcttgatcagcagcaggaagtcctgacgcggtacgcccaccaatcgctccagttcctcgagtgtgtactccggttcggtgttacttgtggggttctcctcggtgctgctgtccacccggccggtggtcgtcacactggtgcccactgtactactggtggcactcgccgatgctacgctgggactcatctgccggtgggtgtagaacagaaccgtcgtaaaggtctcgtagggcaaggcattgatgattttgatgccctcacgggctctaagatataaatgcaagaaattaatctctataagaacattgatattacatacctttccgtgatctttatccagttaatgctcattgtgagatatatttaaaaatttttaaggaacatagagttattaagtctttaccagcacttcttttattatgactttaatattatttgtttatacagaccaacaatatacaaaaaactatcgacttgccacggtgcggtgctgccacacagttactactgccaataataacggtaagtgctgactaaaatacaaaaatattacattttgcgatgtgattttaaacatattctttattaattttttagatttaaatgttttattaaattaatttatttttctgtatttaggcctgaataatttaccttataaaattacaatgttttaaataatatttgctgttatgtttcctgcaaaataaaattcgtgaaaaaaagccgcaccagcaaatatcaataccagattgtcgacggcaccgacgatcgacgattcaatttgtagaagattatcaagtacgaatagttttccaactcattaatataatcgtcctacctggcaactccgctgatgcctatcgatgctccgctcgatagcgccaacaatcgataagcagtatttgtgtattggaaacgcggcttaacttaatgcagatttttccgctgattcggctgcgaaagatgcacttttaaggcgcagcgagtgcacccacgccccgagttcgagtgcagttgcagtcgggaaagcttgacaagtgcgcggagcaaggagagcgacgagttcgttgagctacagcgaaacggaaaagtgtaaaagcggggtaaacaggcgcagcggagcggatgataaacggaactcgggatcggaaaattggaagcaaaaccaaccaccgattataaaaaatagtcagcatcttaaaagtaaggatttcaagctaaggtttcagcgaaagcccgagaaaaacaaaaaccccaactaaactaacggaacagtgcgtcgggatatatgcatgtgtatgtggtatacgtatgtgtgtctttggctgcgtgcgattgtattgttcctgtgtaaataaacaaaacccggctctttagtcttccactagttcgtttcgcgtttctctgcgaggaatttttgttgaaaaaactcaatttggcatagcataacttccagtttatttccctattctgcaaactgtgtgtatcagtgtgctggtgcttccagcatgccgtaaaaatcgatagcgcgtcgtcggttgtttattttatgcttcgtctgcattttgcagcccctttttatcgctctccccttttcagccacccttgcacacactcacactctctccggcggagtcgtgtgatgcatacacacacacacacacagacacatgcatacgcctgatacgggaaattaaaaataatactttttatcgcggcatgcaaaaggcaaagctgcaaaaacagaaacaattccaattccaacagcaataatctagccatgcaatcaattttagccaaacaataaaaagaatcgtttggtttcagtttccccgcttttcttttccgttattttcctctctatattcggttttatcgcattttccgctcattatggcagtttagcatatttatgctggaaaaatattggggtttcttcgcttcttacctttgttttacgttttgttttgctgtcgggctgtaaaaacagcagttaatccaattaagaaaaataaaactctaaatgccatcgccaccacgaattcgaaatcaccttttatctactcaaaagatattcatcttatttattttccaagataaatgttaaattataaatatattatagaaccatacacttgttgaaatagaatttctgctaacagctgcgagttttacagtcataactattattattatttattaacttagatttctacaggctgcgattttataaaaatgattcaattttttatctagactttgttattaaaatttctacataagcagaaaataattgctgcaatgacaaatatttcattttcagcttgtgtttatcgtagcttattttttgttaaatgtatattaaagtatttactccccttctcatgtaatatacatatattgaaaaaacagtacttttgtctattagaatatatttataccctcacttattggttcatctcgaaaactggtcgagtaaactgagaatcttgagatagtttcttgaattggatataatttgcatggttggccaatcttttgggtcggctatgcccgcctctttgcttcgtagaggagcttgggcaccgggcacttgcaattggcaccagcttcgggccagtcagtccgccagacttggtctttgggtcgagatgtagagctggatagtgtgccacactatataggggatactactgcgatacagacaccgcggacacggctgacatgcattaatgctgcgaataatgcctattgcagacggggataatggagtcacagaagcggccttcgttggacttacacacggatgtgccagcaggattagcagctggaggatctggcctgggagctgcagctgagatgtcgcccacttccggtttcctgccggacatgccgcagtggaagaaggacctcatccagcgccggaaaacgaacgtggcccgcacccaggcggcgtccatcacctcgcccaccgatggcagttgtggggctttggcagaagccaacgcagctccaggtgcaattgcaggtgagtggtggttggacaaactggaatactttcacctgacacgcaaattaaaggtattttcaagccaagcatttctgtcaaggcatgttaggtgcaagtattcgtatttctaatcgctatttcttgcattcttgacaaacgaaataattgcacttacttttgagctccatacttatcccttttaaatgataccgttcggtacttaaaataaattcaacgaactatagacttcggaaaggtttttaaaatatttaaaaactgccgtagcaaatagtaatcagggtgaaatatattgactggaaaaatgcgaaagactaattgtgacttacacaatctgcaattgctcagttggcgttaaccagccatgagtaatggtaacaagtgtttttaattcattttgccaacttttacgatttccaataccagtatacttttaaattagccgccttacatattcgcttatcgatacgatattcgcttatcgatagctcacagagttgtcagattgcggacgaataagataaaaaaaaccaagttatgttttaatgttctgtctttataacatttgtatttgctttctttcttcaattttttttctaacagatttcacagaaccggcgacaatcagtagcactagtcaaaagagaaacatgatcggttcagaggaaaagtctgagaaatcttctatttccaataccaattccgattccactggaggtcatcactctgttgttgccgtctccctttcgcccgatgcggcagcaacaacaaatgtaacagtaacaccaataccaaagcagcgatcgagtttactcaacacaagaagtcaggagagggagatggtgcgatatattctaagcgagagtggagaacgggatggagagcttgagagcggcgaacagccggctggtgtggtgagtaacagccggtgcggtgaagttgaaactggcacaattggatcgccgtcgtcgtcagcaaatcaaaatccaaacccaaatcatttaaaaacgaaatgcaaaccgggacagagcgttgctgagggcaagccttcagctaaagagaccatcgtcgataacagcaaaagctgcagcaaaaccaagagtatttccgataaattgcagagcaacaagtttataattcaacagcagcagcaacaacaacaacaacagcagcaacaacagcaactgtcgcccacaaaggtaacggtaaaaccgacaatggtcgccatgcaagagatgaagaagacaaccaaacaaaatggccagcaccgacatctagcgggcaaaattggcagcgtagcaggaggcgatgtggatccacaacatccaccgacgaatcccataccagattcattggacaccggtgaggatctgagctacggacccggaattgtgtccaagctgcgatgccgctacttgagcctggcccttcgcgagtcccgccagcagagcagcaaacaacgcctccaacgctccaccagtctgaacaccctgctcgaccgcgacgatgacgaggtggaagtggaggagcccgaaatgaccaacagccaggtgcgtgccaaatcaacaccgccaccgatattgggggcaaaaccgacaccgaaacccagcagccagcatcagcgtcccgtcagtctgggcgccaatggagctggatcagctgttaacccgccctcgaactcggatcaggcccaaacgggcgccgttgccaacggaggcgcaggatctggccaacgttcgcgtcactttaagcgcggcaacgaggtgatgaagcgggcacgttccgtggaggctctgctctgcgagaaatcgccatggaacagccagagaatcagcactgccggcgcagctgcagcagcagcaccttcaccacctgctcccaaggccacagccgctgctccctcacctgttacatcgcccacctgcgttaccatcgaggacaagatccacaatgcccgcgaacgactgcacagcgggacggatacggcgccacccaagcgtctgacctccatcatcgatgacaccgagcggccgccaccggatctggtcaagcagacgctcaagatgtttgaggcgagtgctaatcgacgaccgcgcgcagcccatcgttccaatggtgttggcggagtggccagcaaggtggccaactacaaatcgatcattaaggatcagaagcaaccatcatcagcagcggcgacgccaccgccgaccggcatgggttttgcctcctcaacgccgctaaggcatgtccatccggatattataccccgtcaggtggattcgcccgtatcggcgttgagtgtaatgatgcgtcgcatggagctgcaggagcccgagacgccggaaagggagacacgggacgcggaggccacaccgcagagcgaggcgctaagtgagactgagcgaaatgatcgcgatgaaggcgatggcgaagtcgatgacgacaaccacaacaacaacgacgacgatcacgacgacggcgacgacggcagcgacaacaatgagcaacgcgataaaatgggcgcggcggcggcaggcgataagcctaagcccccagcggaatcggcagcgggaggcgcccaacgatcattcgctgcctcgacggagaacgcgcatgtagccagcggtagtagcagcagtaccagtgccagtgtacggaagctcagcaacaacaacgactccagcagcggaccagcggtgaccaaacagatcggtgtcatccgtccgctattcaatagccagggagccgggagcacgccgctaacgagtcgcgagatcgaaaagaatcgcatcaatgagatgaagaagtcgacggccacagatgccggtggttcggtatccggatccggaacggttgctggtgctggatcaggaacctcgcccaccactagtctcgacagcgtgataaacaccaaggaagcggccagcagcgaaacggatgccagtgcctcgccactgtggacattgcgcaagctgaggaatcagagccagacggccggcggaggatcgggtcccagttcgagccttcattccacagagaacacctcgatggtgttcaacttttccaagagcaccaaggaagtgcccgactacatcgaaagcgacgttgtgatttacaggcgcaagcgggagctgccaaaggtgagtccggattgggtaaatggttactactacgagggactacgatttccatttccgttccttgacgcaattccttcgtgcgtttcgttttttttttttttttttttacgaaatctttcccggaagagtcacattttcgacgtcttatcggcgggcagccttgcggattattcatgcttaacaattaccccatgcattattattttcgccgatagtaatttggtttctttcgtccgtccccaatatctttgttgttttggctcattttccgtttctttctcgcgtactttttttgtattattattattattttttttttttttttttgtgtcatacggcggcggcagccatgccgtataaacaaatatgaaacaaagcacacagagaacagcgatcatgcgcatttcgaaagttcatcaaggcagggcgagaacggaactgaggaactgcggagaattgggtggcgcagtgacaaagcgccacttggatactctttctttctttctttcgagggaactcatgtgccatatgtatgtacatatatctttatatcttcgccttctgggaaattagtcatgtgtcgtgaatacgtcgttaataacgccaatattgccaagatgactgactaactgctcacatgcgataggggatctcctccagctgttcgatcgctgatcgtgttaatacccatttaggagttttacagattaggaagcagttgttagttaaggaactttgtgttttttagttggtattgcaccaccaggaaattattggactacatttaatatatttgcaatatatacaagggatcagtaatgtaaaggccccactctttcaattatcattgaaattagcagaactacaggtttccaatgacttctgatgggtatgtgtgtgtggccatttattatctgccggcaaccaaatcattgtgttgatcaataagtatctggccaagattacacagcacagtcggttaatcacaacaatacggcgatctggcagatcagttggggggatctgccactgccactgccattgctggtgctattgctttaggaagtggcaaacccctaatagagatcgaagcttgcatcacagctgcgaatagttcgatgtgatcttctgctccgagtcaattaaaattcgccttgaatagctcgccgatcgatagccccggatcgtgtgcgacatgaacagatgcccctcctatatgtatatgcatatacataactcgaaatatatatatatatatgtatatatacataacacatatatctgcatattctttcccaagtctgctttgttcccagccagatgcaagtctcatctgctggcagtcttctgccttcggtcgcttcttcttcgtttgggctcttctgtggctgcacttttcgagatcggaagaatgggaaaccagttttgaaggcatgcatatggacatgagaagatatttctgcgcttcctgctgctgccagcaaaagtccgagtctgtagagatatgtatgtgtacacagtgcccatgagatattatgtgtctggtctgtctgtctctcggtcggcatgtctgtggggaactttattcttggggcacagcagctcctcgggatgccggtttcgatggtatagaatgggatgggatgcaaggcaaggctgctccttacagctgttcctgttgccttgccagacatgtttaaataccctttattttgtgatggcaattgagctttttttttattgtttatactctgataatcaattcagtagctcaacttgaatgattcttgtttatagtagatatccaatacgtatggattgttttgatatgaaagagacacacagaacttgttaatatatatttattaataccaaattaggagtacaaagctccacaatggtgtcaaacccaaatattgttcttcgcaattggaaaagcgaatggtacagaccatactctatagagtctttatagctctcccttagctttagacttagcttttcggtgcggttgagttttcctcttgccttcttctcgttggcaaacccgttttgtttgtgctttgtgccgttctcctctcccactccctctccctctctctctctctctctctctctccctctcagctgccatgtttctctctatgtccatatccatatctccatatctcaatggctccatggctccatggctctcttcgccctcttcctgccactgaactcaattttgtcaattcttttttgaggctcacttctacttactgtgtttgcttttgctttttgcctttgccttgtctcttttatctcgctatgaactttattatctgcggcattggtatatacatatatggcatatatagcatatggtatggcatggtatagtatatggctgggggtcgatttatgccacaaaaaaaaaaaaatacaaaaaaatgggccaaaaacagtgggacagtgggttttggggagggtggggagggaaggcgtggagaggagaggagcggtgccgatagagtagatatatgacatggaacgggactgggaactgaaattggaaccgggacctggacttggtacttggtacactggtctggacctctggaacccccggcgtgagtcacagatgacccataacacaacgtcgattaagaatggctttccatgaatttcacttttcgaacacatggtgacctggaatttggacagattttcttgtggaaggggtgaagctgatcctcctttgtaaattgtcgagagacagccatttaaatccaaaaaaaaaaaaaaagaactgaaatgaaatacttatggtaaacgagttatgcatcagcgaaaagaggagggttgctggacgttctgcaacttctgtaggtagttaaagcgaaataaaggcgtgtttaccattaaatgataatatctgaagcagcagaagaacattgcaaatagctttaacaacattcgaaagcaataacacattttttaagtgccttgtttgcattttaacgaatttcatttcccagctaacaaaacgtttgcaatgaagataatgaatatttttgttgggggggttgtatactaattcaaaatcaacatctactgtattttatttattatttgaactatttgtgaacccccggggaatgccaagagtcaagcatttattgattgtactaatcgttttttttttttatcatcttatccttttagccaaatgaacctggcttcgtgctcctgggcgatctctccgtggagacgtcgacggacacggactacgacgactactccatgtgcccgccatcgccgtgcgatgtggagtttgagaatgccaacattgtgatcgacggcaagtccagcatacgccagaaacccaaagagtcttcggtatgtactacaccaagggatattgccgggattggattggagatcgactagatctcaactcaattccaagccatatgtatatgtatgcggtcgttacatactccactactaatgagtgagtcaggtgcggcgttttgttttttttgccaccgaatggtagatagcattggttttttttttcaattccagtttgggttgtgtatgtgaaaaggataagataagattacttgggccccttggcaaggagggaatgtacatacatacacatgtacacacacacgcacacattcgaactttttgaccactaacttcgacgggtggtgaggacgttgataagcgggaatgtaaagcataaacaattttgccttatataacatttatatcgagtgtgtgtgtgtgtgtgtgtcggtcggtcgtcgcctgtcccagggactattaatcaacccgcattaggtttgtcttatttcgggatttgtttgcccatttggagctgcttgtgttgcgtccccagatctgttcgcctggcgctaatttatttatttattcctttgctcgggtgcgttccatcagtgtgactgatatgggaatcgctactctactattgtctttagcctcagcagccatcggctgtatttcggaatcaattcaatcgttttccgtatcgcatcgcatcgaattgcgtcggtctgttggggtttgttctccgataaggaaggagctcgaattctgcagtcattgattggggttgactcattgatatgccattgtgataaggcatcaatcgatgagtaagtgccgattggggttgggagtcgcttttgaagcaatctatttgccattaacccaatgtcacggttatatgcatttaagaaaaatatcaaatgcattatgcatatacacaccatattgccaaaagtccatcaatgagttgtatattttatttatttataacaaggcattggtccaatgctttcgtctaaccttgaatttttatggctagcagagaaactacttagtttcggatatatattcggtgatttctggaccgctaaatgtaaatcgaacggcatctggttatgcaaattacataaagaccaatagttaaacgaaaccaaaataaaggatagaaaaccataaacatatatctttaagtgtcaaaatgtaaaatccaaatagttatcactaatttcaatggcgctagtattattgtaaattctacattcgctttgttatcagcaatgccagctagtcatacatttatgccaaattaaaaatagtttcgtttaaagggaaagtggttgagtggcatgatttcagttcactacgggtattaattatatgactaaaacagtttggcatgtaaaaatctatagcaaaaatggcatttgattattagttattattattattattcaacaaatgattaattataatatgaacgctgcgacgtgtggggatagcgacttcagattctgccacattacttgataccttgattgaacccatcgaagtgaaagtaatctcagaatcgatcactgatcaaatttctttcgattttcccacagttccgcgtgcagttcaacgacacgctgacgtcgacgtttgaatacccctccgaggcatcgatgaccatcgaggatccgccgtacgccgatccctttggccatgtgagcaaacaccatcagatgctgctcgccgagcagatgcatctgttgcagcaccaggagcagctggagctggagcagatgcaccagctggggctggcgccggagcagcaccatcatgtgaccgtcgacgagatcatcgagctgcccacatcgacggcgggacatggacatggcatcggacttggacacaggtcgggggcggcggggggcggtggcacgatgctggggaatttaccgttgggtaagtaatatctgttccaccgagtccatccaagcgtgcattgtattattattattattattattattattattattattgttgttgctgtacgctgtacgagatgtatgttgtgtgttgttgtatgtggcatgcagcagcgaatgatgatggaatggctttttgtctttgtctctctctgcgctctctattatcgtctctatctctctctctgtctgcctgattgcctgcatccaagcctctctatctatccatctctatctatacccgtctctatctctgtcacttgccttgtccttactcttgacttaccatcaaccagcgttgtgttcttgagttttgtttgtttgtttaccatcattaatacccactcatccatcacacatcgtcgcgatctcgttttttttttttaacactttcgtttgccttgggcggatcgcgaatatacaatagcaattgagaaaccccaaagacaactcaagacacttgtttagcaatgaacgtagaaaggtagtgccaatgagcagcagggaaatatacataatgtaaatcagctggataaccatccttacaatgctacttataaaatgtgatgatgtgaaggaatttacatgcaccatcttatgctcattttaatatttacactgttccaagtaaaatgtttccaaattaaagaaatcaatgtaaagttctcgtataaaactgatttaaactagagtttataggactacgacgaacccagttcggaactgggtgacccgcaagcccacatcccatgcctggctaaactctcgggtatataacaacgaaggtttctgcactttacagatgctgataatagagccacagagcatcttgtctccgtatccgtttctgagcccgctccaaactccgctccagcctccgtctccgcttcagtctccgcctcaactttcgtaaccgtctcagatcccaaatgtcgtagcgccaggacctcgggcaacggcggctgctggccgtggccgaagttccgtacggtccttggtgctcagtttcgccggctgaccaggcgcatcaggtgggtgcagccatcagctagcagcagccccttccaatgccccgtttaccgatccccgattcacctgctcttctatatacatacgctatgtcacagctctcaacgaaccaaaagctaaacccaagccaccgagttctccaaatagcaaaccatcgtgctacggtcttttctggctgaaaggctttcaatttcgcctcacgcatatttgcagattacccaagtttagggaggggtattatcttgccacagtcgccacaacagcagtcaacgcagcagcaggagcagccagaacctgcaatagccacatcggcaacagtggcaggattagcagtggcaatggcaaccgaagtggaaatcgagccaccactaccagcaccaccagtcacagtcgccaagcgcccgcagctcccggcgaagccagcacagcagcagcaacaacaggcggcgcgtagggccaggccatcggtgctgcttaagccgcagtacgcctgcttccttcagcacgacgatgatgcacccaaatcccagccaactgctgctggacgaccgcgcaaggcagcctcgttttcattgggcaatcaacggcaatcgaaggagcagcagcaacatcatcatcattaccagccacagcatcagcagagtaaatatgaacgcaacgattgcagtaggagtcggggcagttgcgagagtccagctccagaacaccagcagcgacgtcgtcggcctagtctgccgtcgtcgctggctttgtccaatgccagctcggccctgctccaggcacgcattccaggcaccacgctctactatgtctgatggccacccgatatgaaaagcattagactccaaactccagataaccagatatccagataaccagatactccaactccgaaccgatttgaaaccgccagcgaaacgtaggcattgcccaagctttactatatgtttacaactaggctaaagaacacccatcatcccttggatacctcttggtgaccccgttccgctcccaaaaaaaaaaaaaaacaaaaatatatattggtttgatggccgctaaactgtaaagtgtaaccctgtgcatatccgactcactccaaaacaaataactcaatgcggaaaccaggaacaccaaacccgaacacaccaatcacaacacacacaagaaaacaaacactggggcaaccggacactcgaaacacacgtttaatcgattcatagatgcgattcacgatgcttcccgatgtcgatgcactgccgccgttaatcgtttatgcgatgctctggataacaatcaacagtaattcgcgaattagcgagcgaagaatacgcgaaggatgatggattttagaactaacctaaatgatggataatgctggtgtccccatgtttcactaaaaccaaaccatgttcctatgactgctgcttgataatgccctgctcccccgtctgtattcattatccacaaccttaggtataagatgctccatagtctttagcaaccattatatgatagtttacctagtaaatcgtatgccaatcatcagattgaactgtactatgcccacccagcccatgtggaagttaaagattattgtagaaaactatttaggtcacctataaatgttggcaacgcctaagaattaagctaactactcagctagagatcgcagaaaccgaaacaattgcgataattgataactaagtgttcatggcaaattttggggtgtaactaaacgtttaataaacgaaaagtaaagcaactaaagctgcagacaaatcaaagaacctttatgtagcggctaatttcgacatgtgttcggtgtaaaccaaacaaaaacgaatcacagaacactagttagtgactattttcatttcagttacgtacttaagtatatatatttgtgcacccgtgtgagttggcgttagttatgtgttatgtgcttatgtatgtttgctttgtttggctcagttcggtttggtatgcagttgtggggcatgtattgaattgcaatttgcgatttgaaattgtagccatgtagttacgctaacctaccttctcgcccccgctgtttcacgccacccaaatggtttttcatttcaacaacaaccttttgttaaagtcaccgctgtcgctttgtttgtttgctatttgtttacttctatttctattttttgttcataccaatttctttttgcagatattatttaaatgtaacagaatacataagcaaagcgttgaaataatatctattgtataccaaaaccaaaaatatctatgataacaaacaagcaaaggcaattaaaccgatccgtaaactgaataaccgattaataactgcagccgctcaacccgaaccgcaataaataactatcaagtaaagaatagaacaacttaacaatgaaaaatgcaatattcaatatgcgaaatgacaaatgcctaatgccaaatgccaatccaaataacccaataaccgattcaagtgcgagaacagaaatgccacacctctaacccagtgcacttgctctgtctgctccgctgggcaatcaaactaatcgccaattcatattattattaaggtaactaacccagattagaacagacactcgaacacacgcacacaccagccaccaacaccacttggcacatcctagtcatatcatcaacttccatcgctcatctccacttccatttctttatccactggtcatgtttcgttttcatttgcttgaaaagatccaggcgagatcctcctttatccacaacaccgtcacctcatctcgattatatatacatataaatatatatatatatgttctgaaatatatatttcccaactcggagccaccttatttatcattgtactaaccccaaatccttggaaggatttaaacccacttgaaataaagatatacagtcgattaatctcgttctacacataattgcaggctccacggctctgggcttctacacgcccatgaagggcacggcgatggacaacctattccagctgggtgtcacccgatacgccctgcccgagagcagcagcagtgggagcagcaatggcagccacagtccaggcagcaacgggagcagtccagccggagctgcgggcagccggttgatgttcaacgggaatggcagcattatgggcatcggcgagggactgatcaaggagggcgacttggcggcaacggaagcaggacctggaactgcagatggagcaggtgcctccaagaagggttcagctgtggacgaggatgattaccatctgacggcgacgccgggcgccgaagttgtgtacagcgagggtacacagaaaacggatttgctatattaggtcgtcctgccagccaaaaaaccggagcgtctagctctttttctaccggtttccaccaaactccaaaccttccgagcataacaacctaccacatcctgatcgttcccctaattgaaaagcgtgcacttaggtgaaatatcaacttcggttagacgcgaaaacagtaacgaaggaaagaaaaataaaaacaacaaggcaacgtaaaccaagtatggcaagaaatccataaagatacgtatataaatagatattatttgtaagtttgtaagcctagagatccgatgtgtatgtgtacaacagcaagcgtgtgtgtctgtcttctttataaatatatatatatggttttttttttttgataaattaataattatattattgtaatgtatctacatacggcactgaatgaacaactttgctgctgcaattgtatttgtatttgtattgtgtattccatttacggcattttgatagtaaatatacaacaacaacaaatcaacgtatttccgactgcatcccgaaggttactgaaaccttaatccacgaagtacgcgacgagcggttagtcccgcccgagtattaacttaatggattctaacgatccgatcttgtgacccatcatcatcccttttcgcgacccttccaaaacgaaaatgaagaacattctaagctccgcttgcccattcagcggaagaaagcaaaggaaaatgtaacatttgcctcataattattatatacatttagcgcttattgaatattttttacaattgtattccgtaaataaatataaaatacatcaacatctagtcgcgtgttttaagttaaaggaagttaaggccaaagcaaaatgttagcaacagtttttgttaaaagttaacatatataataatggtaatttaaatattcaaatctatgaagtgacttattttataagtccacttatgtttgttatatttaattggtatttagaaaaggattcattttaaattaacaccgttgagggttcaattttggtagtgcgtctttgctaaccatgccgagtgggatcaagtccttgctaagttaggatgttgtcttagctaactgtgccatccctggtcggggtgtgtcttagctaacaattacgtgtcgatagatataatgctatcgatatgacagagtgtcgggaacaatcgatagcattacttcgatatcggtactagtgccacctccagttttgtgattgtgtcaaaaatacagggttttattgttgcactagcaatttaatccgaggaatataaattttgtgtggagttatgttcgagacgtcgttgccagcgattcaagaggcgagcggtcacacgtgtatgtgtttcactggcggtgcgggcgccaactccgccaaaaagcgtactacttttaaccttagttgacattgaaatgtacccgcttagttggatgtccacgatggtgcgtgtgtgtgcgtatatgtgtgctatgcggcgtctgtgtgcgcgagtgtgtgtgtgggattgcaaaggaggatgggagaaacgagagcagagcaaaaacaaaaacaaaaggaacctgctgcacatagtcggtgcatgcgagcgtgcttatgtgtgtgtgcgtgcgtgctagcaaaacaactgcaagaaatcagcaacagtagtagaagaagagaagctgtatcactgataaggaggctaaacaacaacaaaaacagcaacgataatgtgcaccctttcgaaatgcaaacaaaacaaagcgttgtagttgtgtaatcattcgttgtg

SEQ ID NO: 2504 - DNA, 5169 bp, DROSOPHILA
tgtattggaaacgcggcttaacttaatgcagatttttccgctgattcggctgcgaaagatgcacttttaaggcgcagcgagtgcacccacgccccgagttcgagtgcagttgcagtcgggaaagcttgacaagtgcgcggagcaaggagagcgacgagttcgttgagctacagcgaaacggaaaagtgtaaaagcggggtaaacaggcgcagcggagcggatgataaacggaactcgggatcggaaaattggaagcaaaaccaaccaccgattataaaaaatagtcagcatcttaaaaacggggataatggagtcacagaagcggccttcgttggacttacacacggatgtgccagcaggattagcagctggaggatctggcctgggagctgcagctgagatgtcgcccacttccggtttcctgccggacatgccgcagtggaagaaggacctcatccagcgccggaaaacgaacgtggcccgcacccaggcggcgtccatcacctcgcccaccgatggcagttgtggggctttggcagaagccaacgcagctccaggtgcaattgcagatttcacagaaccggcgacaatcagtagcactagtcaaaagagaaacatgatcggttcagaggaaaagtctgagaaatcttctatttccaataccaattccgattccactggaggtcatcactctgttgttgccgtctccctttcgcccgatgcggcagcaacaacaaatgtaacagtaacaccaataccaaagcagcgatcgagtttactcaacacaagaagtcaggagagggagatggtgcgatatattctaagcgagagtggagaacgggatggagagcttgagagcggcgaacagccggctggtgtggtgagtaacagccggtgcggtgaagttgaaactggcacaattggatcgccgtcgtcgtcagcaaatcaaaatccaaacccaaatcatttaaaaacgaaatgcaaaccgggacagagcgttgctgagggcaagccttcagctaaagagaccatcgtcgataacagcaaaagctgcagcaaaaccaagagtatttccgataaattgcagagcaacaagtttataattcaacagcagcagcaacaacaacaacaacagcagcaacaacagcaactgtcgcccacaaaggtaacggtaaaaccgacaatggtcgccatgcaagagatgaagaagacaaccaaacaaaatggccagcaccgacatctagcgggcaaaattggcagcgtagcaggaggcgatgtggatccacaacatccaccgacgaatcccataccagattcattggacaccggtgaggatctgagctacggacccggaattgtgtccaagctgcgatgccgctacttgagcctggcccttcgcgagtcccgccagcagagcagcaaacaacgcctccaacgctccaccagtctgaacaccctgctcgaccgcgacgatgacgaggtggaagtggaggagcccgaaatgaccaacagccaggtgcgtgccaaatcaacaccgccaccgatattgggggcaaaaccgacaccgaaacccagcagccagcatcagcgtcccgtcagtctgggcgccaatggagctggatcagctgttaacccgccctcgaactcggatcaggcccaaacgggcgccgttgccaacggaggcgcaggatctggccaacgttcgcgtcactttaagcgcggcaacgaggtgatgaagcgggcacgttccgtggaggctctgctctgcgagaaatcgccatggaacagccagagaatcagcactgccggcgcagctgcagcagcagcaccttcaccacctgctcccaaggccacagccgctgctccctcacctgttacatcgcccacctgcgttaccatcgaggacaagatccacaatgcccgcgaacgactgcacagcgggacggatacggcgccacccaagcgtctgacctccatcatcgatgacaccgagcggccgccaccggatctggtcaagcagacgctcaagatgtttgaggcgagtgctaatcgacgaccgcgcgcagcccatcgttccaatggtgttggcggagtggccagcaaggtggccaactacaaatcgatcattaaggatcagaagcaaccatcatcagcagcggcgacgccaccgccgaccggcatgggttttgcctcctcaacgccgctaaggcatgtccatccggatattataccccgtcaggtggattcgcccgtatcggcgttgagtgtaatgatgcgtcgcatggagctgcaggagcccgagacgccggaaagggagacacgggacgcggaggccacaccgcagagcgaggcgctaagtgagactgagcgaaatgatcgcgatgaaggcgatggcgaagtcgatgacgacaaccacaacaacaacgacgacgatcacgacgacggcgacgacggcagcgacaacaatgagcaacgcgataaaatgggcgcggcggcggcaggcgataagcctaagcccccagcggaatcggcagcgggaggcgcccaacgatcattcgctgcctcgacggagaacgcgcatgtagccagcggtagtagcagcagtaccagtgccagtgtacggaagctcagcaacaacaacgactccagcagcggaccagcggtgaccaaacagatcggtgtcatccgtccgctattcaatagccagggagccgggagcacgccgctaacgagtcgcgagatcgaaaagaatcgcatcaatgagatgaagaagtcgacggccacagatgccggtggttcggtatccggatccggaacggttgctggtgctggatcaggaacctcgcccaccactagtctcgacagcgtgataaacaccaaggaagcggccagcagcgaaacggatgccagtgcctcgccactgtggacattgcgcaagctgaggaatcagagccagacggccggcggaggatcgggtcccagttcgagccttcattccacagagaacacctcgatggtgttcaacttttccaagagcaccaaggaagtgcccgactacatcgaaagcgacgttgtgatttacaggcgcaagcgggagctgccaaagccaaatgaacctggcttcgtgctcctgggcgatctctccgtggagacgtcgacggacacggactacgacgactactccatgtgcccgccatcgccgtgcgatgtggagtttgagaatgccaacattgtgatcgacggcaagtccagcatacgccagaaacccaaagagtcttcgttccgcgtgcagttcaacgacacgctgacgtcgacgtttgaatacccctccgaggcatcgatgaccatcgaggatccgccgtacgccgatccctttggccatgtgagcaaacaccatcagatgctgctcgccgagcagatgcatctgttgcagcaccaggagcagctggagctggagcagatgcaccagctggggctggcgccggagcagcaccatcatgtgaccgtcgacgagatcatcgagctgcccacatcgacggcgggacatggacatggcatcggacttggacacaggtcgggggcggcggggggcggtggcacgatgctggggaatttaccgttggatattatttaaatgtaacagaatacataagcaaagcgttgaaataatatctattgtataccaaaaccaaaaatatctatgataacaaacaagcaaaggcaattaaaccgatccgtaaactgaataaccgattaataactgcagccgctcaacccgaaccgcaataaataactatcaagtaaagaatagaacaacttaacaatgaaaaatgcaatattcaatatgcgaaatgacaaatgcctaatgccaaatgccaatccaaataacccaataaccgattcaagtgcgagaacagaaatgccacacctctaacccagtgcacttgctctgtctgctccgctgggcaatcaaactaatcgccaattcatattattattaaggctccacggctctgggcttctacacgcccatgaagggcacggcgatggacaacctattccagctgggtgtcacccgatacgccctgcccgagagcagcagcagtgggagcagcaatggcagccacagtccaggcagcaacgggagcagtccagccggagctgcgggcagccggttgatgttcaacgggaatggcagcattatgggcatcggcgagggactgatcaaggagggcgacttggcggcaacggaagcaggacctggaactgcagatggagcaggtgcctccaagaagggttcagctgtggacgaggatgattaccatctgacggcgacgccgggcgccgaagttgtgtacagcgagggtacacagaaaacggatttgctatattaggtcgtcctgccagccaaaaaaccggagcgtctagctctttttctaccggtttccaccaaactccaaaccttccgagcataacaacctaccacatcctgatcgttcccctaattgaaaagcgtgcacttaggtgaaatatcaacttcggttagacgcgaaaacagtaacgaaggaaagaaaaataaaaacaacaaggcaacgtaaaccaagtatggcaagaaatccataaagatacgtatataaatagatattatttgtaagtttgtaagcctagagatccgatgtgtatgtgtacaacagcaagcgtgtgtgtctgtcttctttataaatatatatatatggttttttttttttgataaattaataattatattattgtaatgtatctacatacggcactgaatgaacaactttgctgctgcaattgtatttgtatttgtattgtgtattccatttacggcattttgatagtaaatatacaacaacaacaaatcaacgtatttccgactgcatcccgaaggttactgaaaccttaatccacgaagtacgcgacgagcggttagtcccgcccgagtattaacttaatggattctaacgatccgatcttgtgacccatcatcatcccttttcgcgacccttccaaaacgaaaatgaagaacattctaagctccgcttgcccattcagcggaagaaagcaaaggaaaatgtaacatttgcctcataattattatatacatttagcgcttattgaatattttttacaattgtattccgt

SEQ ID NO: 2505 - protein, 1108 aa, DROSOPHILA
MESQKRPSLDLHTDVPAGLAAGGSGLGAAAEMSPTSGFLPDMPQWKKDLIQRRKTNVARTQAASITSPTDGSCGALAEANAAPGAIADFTEPATISSTSQKRNMIGSEEKSEKSSISNTNSDSTGGHHSVVAVSLSPDAAATTNVTVTPIPKQRSSLLNTRSQEREMVRYILSESGERDGELESGEQPAGVVSNSRCGEVETGTIGSPSSSANQNPNPNHLKTKCKPGQSVAEGKPSAKETIVDNSKSCSKTKSISDKLQSNKFIIQQQQQQQQQQQQQQQLSPTKVTVKPTMVAMQEMKKTTKQNGQHRHLAGKIGSVAGGDVDPQHPPTNPIPDSLDTGEDLSYGPGIVSKLRCRYLSLALRESRQQSSKQRLQRSTSLNTLLDRDDDEVEVEEPEMTNSQVRAKSTPPPILGAKPTPKPSSQHQRPVSLGANGAGSAVNPPSNSDQAQTGAVANGGAGSGQRSRHFKRGNEVMKRARSVEALLCEKSPWNSQRISTAGAAAAAAPSPPAPKATAAAPSPVTSPTCVTIEDKIHNARERLHSGTDTAPPKRLTSIIDDTERPPPDLVKQTLKMFEASANRRPRAAHRSNGVGGVASKVANYKSIIKDQKQPSSAAATPPPTGMGFASSTPLRHVHPDIIPRQVDSPVSALSVMMRRMELQEPETPERETRDAEATPQSEALSETERNDRDEGDGEVDDDNHNNNDDDHDDGDDGSDNNEQRDKMGAAAAGDKPKPPAESAAGGAQRSFAASTENAHVASGSSSSTSASVRKLSNNNDSSSGPAVTKQIGVIRPLFNSQGAGSTPLTSREIEKNRINEMKKSTATDAGGSVSGSGTVAGAGSGTSPTTSLDSVINTKEAASSETDASASPLWTLRKLRNQSQTAGGGSGPSSSLHSTENTSMVFNFSKSTKEVPDYIESDVVIYRRKRELPKPNEPGFVLLGDLSVETSTDTDYDDYSMCPPSPCDVEFENANIVIDGKSSIRQKPKESSFRVQFNDTLTSTFEYPSEASMTIEDPPYADPFGHVSKHHQMLLAEQMHLLQHQEQLELEQMHQLGLAPEQHHHVTVDEIIELPTSTAGHGHGIGLGHRSGAAGGGGTMLGNLPLDII

SEQ ID NO: 2506 - DNA, 4940 bp, DROSOPHILA
ggaatgtgtccactgtgcggaggcagaagcacacacacacacgcgtacaggtgctgcacacacacacacacacacacacatgcacgcgctgttagaaaatgtgtgtgggggaacgggaacaacacgacattagcaaagccaatagcaacaacaactggttttttacttagattttattgttttttgctggacttgtacactaaactaaaccaaacacacacacacacttacataattgttcgtttgtattgctattgacttgacgcacattgcacatttgttggtttttcctcgccaatttcttattcgactgtaattcccgccaagcaattattaatcgcaactaccgaaatgccgcggattttgtttaaatgccgacgcgacgcacagctcgctaactcaaacaataaaaaagaaatgcataataaacaaaacaacaacaaaactacacaaaataaaatacaattcagccagtgtgaccgtaggactgtcattaaagaatctcaaaactatcgtctagctgccaatcaacttaaaaaatatataaactctttaatgaacaaattttttattataaacacgctgcttgtcactaacaagaaatattgaacagaattgaatattgaaatagtttttctttaatcttcgagtgaccgtatatgagtatggttgtagaaataatgcggtcccattgaatatattatttaacggaaattgggatttcaagtgttttatattcagtttttcaaactttaatttaagttcacgcatcccatctatttttaatgaacccggtgaatttagcgataatgacaatgaaatactttctgtttataacaaaaacaatactgtcttcagcgtttattttattgtatacttattgttagcgtctctcaccatttttgtttttggtcagttgaaaacaaaaaaaaaagtgaaaacattataagaatattaaattaagtgtatagggaatcattcaatttgcctaacatcgtcactatccttgcgctgcgtttgccctgccaccgaagctgctgctccccactgtcactgttgctgcggaagtttctgcggcagttgcaattgttgcggctgttgaagtttctgttgcagttgcctgctgctccttgacggccacaacgtcctccaccgcctggacttgctcctggatgtcccgtcgttcctgctgacgcaccagctcaaagtacaggccccgcttgcccatcagttcgtcatgtttgccggtctaaaacaagggaaaatataaatatttctgaagataccaatggtctaggacaactcacctccacgacgcgtccctgatcaaggacgacaatgaggtcagcgtttcgtatcgtggacaagcgatgggcaatcaccagagtggtgcgattctggaccactgtatcgagtgccttctgcacttccgcctcgctggtggcgtccaaggcactcgtcgcctcgtcgaggatgaggatgcgcggattcttgagcagcgcccgtgcaatggcgatgcgttgccgctgaccgccgctcaactgggtgccccgttcgcccacatgcgtcgcatatccatcgggcagggcggtcacaaagtcgtgcgattgtgatagacgcgctgccgcatacacatcctcctcgcccgcatctggtttaccatatcggatgttctccaatatcgatgtgccaaacagcaccggctgctgttcgatgaaaccgaggacattggaccgcagccaatagggcgatatgtccgacagcttgtagccgtccagtttgatattgcccgccgatggttcgtagaagcgttccaccagcgacgctatcgtcgacttgcccgatccactggctcccaccagggccaccgtctggcccgggcggagcgtcaggctaaagtccttgagcaccagctgtgaatgaagcaaaaattgacataggaagttcattactgtttgcattgcctagactctaatctttttatcacttagccgtaaatattggccataaatgtttgtgggtattataaaatggttatctacttgcggaagcgataagaagttattcaatattatataaaaaagtggcgagtttacaaattacagagcatcgattaatgtaaatatgccatcattgtctcgagaatgaaatgaagatatactttaatacaactcacatgatcgggttgcatgggatatgcgaatgagacgttctcgaatcgaatctcgccgtgcagccgctcctgcgggatgatgtagccgcgcagcaattccacctgtggctgcagcgataggaactcgaagactcgactgccggccgacatgcctctgatcatggtgcccagcaggatggatccctgggcaagggatcgctgcacaccctgcgaagcgaccaggaaggccatcagagcacccggcgacagactctccgtagacatgaggtggccgcccataaagagcgtagataggactagtgtattgaggaagaagttggtcaggccctggaagattgcgatgccgtagccgagtttctgcgccaggcgagccgcctcattggtctccgcctcgaacagctgcatctcgcggtattcacaggcactggatctaaccgttcggatgttggacagcgcctcctcgcagacacccgtcgctcgttccgcctgcgcctgtgagcttttgcttagagagcgcagtttcttgcccaaatacgtcatgaacataaccacgcacggaacgctggccagcgcaatggcggccatgtgcggtgaaatcatgaagagcgatatactgccgccaatcagctgggcagcacttcgcagtccctgggagacgaactgcttgaacgaggtcttgaagtcctgtacatcggcggttagtcgattgaccagctcgcccgttcgattctcatcgaagaatgcgatgtcctggacgacaatctgcgtgaacagatcctgccgcatcttggctgccatctgctcaccgacgcggctcaacaggtagatgtacataaaggtgaaaccagattgcagcatgtataggctcagcagattgctggccggtttgctcacgtcctttacgaacgagttgttaatcggatccatcacgtacgtgttggcatatctggccagtgtgtttaccaggtcaccgagaagatttgggatgcgtatgttgatataagccactatcagggcggcctgcaaatgaaattagctaaatattttgacaaatgctacacctgttcgtgggctttttgtgatccaagaactcacgcatacggccccgatcagctcccagagatgtggctccaagtaggtccacaaacgcttccagtcgaagtgctgctccgacgcagtgtcctcctcctcctcctcctttcgaatggccagccggctgccttcgcaatgaacgatcgctccgcgatgccccgcccaccaggaacgggcgcccagaccgatagctaaactaccaccgccccacacaagcaggcgtgtcgtctgcagcaggcggctggcatttgtgggcggtatcgcgggcggttggggagcgttcgttccacgcaaatgttggcgcatcaggcgggcggcattctggaggcgtggcagtggctgctgcgtgggctgcagcaggtggcgactaaacaaagcgaaataggcggttaataataggttggctgattgatgacataaccggagtgagggcgagggggagtcgttgtttccccaattcactgctggccgtagcagatcctcgtgcgtcggcggcccagaacctcgcccgcgatggtgacccctactctacctaaatatgtcgctgctcctgccgcaattggacacgagtaggcgcagcatctcttctcgcgtggcttgcaaatatcaacaaaatacgcaagcgttaacgcatcacctggcgatagacgcacaggcatggctagcgatgggcaactgtaagctatcgattgttcggcgagtcgttaaaggggcattgctgatattttcctgttcaatattttgaatccccttttaataatgattctacatgaaaagtctgaagatcaataataaaaaccaacagaaaaaatagacttattttaaaaacttgcatttgtccatttattactttaaatgagtatcgaagtctagtttccaatgcagcaaaaaattataagttttataggatacgagcaagaaatgtggaattgatttaatttgtttaattgatttatcgattgaaaagatttatacatttatattaatacaaaatatttaaaatgtaggaatatatgattttttaagtgaccactgtcctgtcacaccaatccaactgtttagtgtcatctctatctgctggcagtctggcaacaccacgaaagtcgagttggcatttgatttcattgctgcgttcggattgaaaaaatttcatatttaattgtttaactcccaagaacgtcagcaaaccagtaacttgtataatatttttagttaagtacagccgaaaaaagtgccgtaccgagtgcgtgtaaataaacaagcgatttgtgtaagtcagtgtgcagcgtaagctaattagaagagaaaaaggagagctgtatgtgtgtttgtgcaacctacctgcctgcgaatgtgtgtttactctctctctctcgtaatattaggctgtgttttatttttataaaagataattgacaaagccacctgaaaagtgttttctttagtttattgtggctagtaaaagcgattgtgtgctcaaaattcgcaaaaaaacaccggattgcaaccctgcgtatggttctttttcgccaagagaaagaaaaaagagtgctgtctctttctctccctcaccgctgctccaattttttttttcaagagagtgttttcacttttgacttgcgaagtggtaaaaaaaacatttaaaaataaaaaaaaaagaaatgaaaaaagtata

SEQ ID NO: 2507 - DNA, 2379 bp, DROSOPHILA
ttgcccatcgctagccatgcctgtgcgtctatcgccaggtgatgcgttaacgcttgcgtattttgttgatatttgcaagccacgcgagaagagatgctgcgcctactcgtgtccaattgcggcaggagcagcgacatatttagtcgccacctgctgcagcccacgcagcagccactgccacgcctccagaatgccgcccgcctgatgcgccaacatttgcgtggaacgaacgctccccaaccgcccgcgataccgcccacaaatgccagccgcctgctgcagacgacacgcctgcttgtgtggggcggtggtagtttagctatcggtctgggcgcccgttcctggtgggcggggcatcgcggagcgatcgttcattgcgaaggcagccggctggccattcgaaaggaggaggaggaggaggacactgcgtcggagcagcacttcgactggaagcgtttgtggacctacttggagccacatctctgggagctgatcggggccgtatgcgccgccctgatagtggcttatatcaacatacgcatcccaaatcttctcggtgacctggtaaacacactggccagatatgccaacacgtacgtgatggatccgattaacaactcgttcgtaaaggacgtgagcaaaccggccagcaatctgctgagcctatacatgctgcaatctggtttcacctttatgtacatctacctgttgagccgcgtcggtgagcagatggcagccaagatgcggcaggatctgttcacgcagattgtcgtccaggacatcgcattcttcgatgagaatcgaacgggcgagctggtcaatcgactaaccgccgatgtacaggacttcaagacctcgttcaagcagttcgtctcccagggactgcgaagtgctgcccagctgattggcggcagtatatcgctcttcatgatttcaccgcacatggccgccattgcgctggccagcgttccgtgcgtggttatgttcatgacgtatttgggcaagaaactgcgctctctaagcaaaagctcacaggcgcaggcggaacgagcgacgggtgtctgcgaggaggcgctgtccaacatccgaacggttagatccagtgcctgtgaataccgcgagatgcagctgttcgaggcggagaccaatgaggcggctcgcctggcgcagaaactcggctacggcatcgcaatcttccagggcctgaccaacttcttcctcaatacactagtcctatctacgctctttatgggcggccacctcatgtctacggagagtctgtcgccgggtgctctgatggccttcctggtcgcttcgcagggtgtgcagcgatcccttgcccagggatccatcctgctgggcaccatgatcagaggcatgtcggccggcagtcgagtcttcgagttcctatcgctgcagccacaggtggaattgctgcgcggctacatcatcccgcaggagcggctgcacggcgagattcgattcgagaacgtctcattcgcatatcccatgcaacccgatcatctggtgctcaaggactttagcctgacgctccgcccgggccagacggtggccctggtgggagccagtggatcgggcaagtcgacgatagcgtcgctggtggaacgcttctacgaaccatcggcgggcaatatcaaactggacggctacaagctgtcggacatatcgccctattggctgcggtccaatgtcctcggtttcatcgaacagcagccggtgctgtttggcacatcgatattggagaacatccgatatggtaaaccagatgcgggcgaggaggatgtgtatgcggcagcgcgtctatcacaatcgcacgactttgtgaccgccctgcccgatggatatgcgacgcatgtgggcgaacggggcacccagttgagcggcggtcagcggcaacgcatcgccattgcacgggcgctgctcaagaatccgcgcatcctcatcctcgacgaggcgacgagtgccttggacgccaccagcgaggcggaagtgcagaaggcactcgatacagtggtccagaatcgcaccactctggtgattgcccatcgcttgtccacgatacgaaacgctgacctcattgtcgtccttgatcagggacgcgtcgtggagaccggcaaacatgacgaactgatgggcaagcggggcctgtactttgagctggtgcgtcagcaggaacgacgggacatccaggagcaagtccaggcggtggaggacgttgtggccgtcaaggagcagcaggcaactgcaacagaaacttcaacagccgcaacaattgcaactgccgcagaaacttccgcagcaacagtgacagtggggagcagcagcttcggtggcagggcaaacgcagcgcaaggatag

SEQ ID NO: 2508 - protein, 761 aa, DROSOPHILA
MLRLLVSNCGRSSDIFSRHLLQPTQQPLPRLQNAARLMRQHLRGTNAPQPPAIPPTNASRLLQTTRLLVWGGGSLAIGLGARSWWAGHRGAIVHCEGSRLAIRKEEEEEDTASEQHFDWKRLWTYLEPHLWELIGAVCAALIVAYINIRIPNLLGDLVNTLARYANTYVMDPINNSFVKDVSKPASNLLSLYMLQSGFTFMYIYLLSRVGEQMAAKMRQDLFTQIVVQDIAFFDENRTGELVNRLTADVQDFKTSFKQFVSQGLRSAAQLIGGSISLFMISPHMAAIALASVPCVVMFMTYLGKKLRSLSKSSQAQAERATGVCEEALSNIRTVRSSACEYREMQLFEAETNEAARLAQKLGYGIAIFQGLTNFFLNTLVLSTLFMGGHLMSTESLSPGALMAFLVASQGVQRSLAQGSILLGTMIRGMSAGSRVFEFLSLQPQVELLRGYIIPQERLHGEIRFENVSFAYPMQPDHLVLKDFSLTLRPGQTVALVGASGSGKSTIASLVERFYEPSAGNIKLDGYKLSDISPYWLRSNVLGFIEQQPVLFGTSILENIRYGKPDAGEEDVYAAARLSQSHDFVTALPDGYATHVGERGTQLSGGQRQRIAIARALLKNPRILILDEATSALDATSEAEVQKALDTVVQNRTTLVIAHRLSTIRNADLIVVLDQGRVVETGKHDELMGKRGLYFELVRQQERRDIQEQVQAVEDVVAVKEQQATATETSTAATIATAAETSAATVTVGSSSFGGRANAAQG

SEQ ID NO: 2509 - DNA, 2547 bp, DROSOPHILA
attttcaaattggtttaagcaatattttaaaacttgaaaatgtttcaacatagattaagatataggcaaaaaaccacctattaatatcgataaagtcctatccgtatagcctatatttggagtggaattataggaagagtattccacggacacatctataaaacactgctttcctttttgtaggcacagcactgacacaactaaacaagacaaacttgaatccaatcaatgaggaggcacagaacccgcagaaactgcaattcagatcatatggatttcagtgccgggcacttcaagaggagaaccagatagtaatccgatgcctagatgagcagaacaacagcagggaagcaatcttgcccaggcgggccgtaaaacagttgttgccggtcgctgattcagatgatatgaccattctacttcgtactcccagagcggtggagctttggaagtggagtaatggcaattactctctatcaagcaggctgatagatgggcaggtggagcaaatggctcttagtcaaggaggtgctggcatagagagcggatatgtggcgctgatggcttcatcgccagcagcagagattcggatttacaggtagatattcataagcacttcacgcatagggcatttacaaggatttcactcgttttgcagcttcggcagcccagacacgagcagcttccaactggaccaagtcctggagctcgaggactcccaacagtcgcgggtaatgcgctttatgcacctgcccgagtccgacgatctactgctctgtgtgtccaacgtactgccgcagcaaccgcttcgcatctaccagcaccgcggagcagcgggattccagcaaatcctcggcgacagcgccttgccaaaggctcatgccctggaggtgctctatctgcccagccataagctgcgactgctgtccatggccacggaggagtcggtctacttgctgcagccacagtttactacactttaagtcacttgttttgtttgttttttctaaataaaaattactttttattaaccgtgttttcttggccgtcaattacgttgcttagtcgtcgctggactcgacattctcggtctgcaagttcttgaacgtggacaccggcacataggtcacgtaagtgtacagcttgttgggggagtcctcatcgtcgttgcggcgacgcgccaggcgcacgcgaatgcggaatggagtggacctggaagggtggatggattagcggcggattagaaaggatgctaaatcggaggaaattaaggactacgcacctgatacccttggaccagatgtgcttgttcagacgggtgtcgatcctcacatcggtggtgcccatctcccgctcggcgaacttgcggatctccttgatggcgcggggtgcgcgcttcttgaagccgatgttgtggacacgcttggccaagtgaatggtgcactcgcgcgtcacgacttcgttgatcgcggatttgttgattttctcacccttggtcttggtcattgtgctgtttagcccgaaacggtgctactcaatatcctgcaagtgcgtaacaacaaattttagttaatgccacacaacataaacaaaacttcagtggaatattccatttgcaaagaaattgttgcacagcgaaaatgaacatacgccgtgatcggtttttcgactgggaacattgtccacacagttttgttgcatttacttcgtggaaatatgcgatgttttccgattaatatacaaaatcgcaaattacgaacctcttccggaaacgcagcgaaaagaaaaggatagaagaagagatgctagaggtgagcagaaaacagtgtggctgcattgtgcgaccggcatcgtgaatatcgttatgcctgaaaaagtaaatttagggtattccgcaaagcgcaatattaggggaattacaaattgaatttctaaatccatggtttgtttgaataataataaaaaataaaaacttaactctaaacaaaaaatcaaattagtttttcaaatgtactttaaaagaaagaaaccaaatactttataaaaactattttaattaaaatttactaaacagtgctaaatttaaatccagtattggagattaagtttaatgttttcgaatgaaaattaataaaaatcttaataaaatggttgcacatatttcgattcatagttttttattattattattattattcatagtaaaattattattgcattgttgtgtggctattaatggaatgccccaaattgttgctccaaaatgtagtttccaagttgatgaagtacaacgaaacagctgatcggatgtaaacaaaatagaatgctggatatcgctggtaagtaagtgagccaaaatattatcgagcttggcattcaaaactcatttccagcacaactccttgccgtgggcctcttgtggggcgttaccaatccgtttattcgcctcggcagccagggaatcgagtcggttggtgatacgggctcaaagtggcgtaactttgtccaggaggcacgcacaatcggctcccggtggcgctattggat

SEQ ID NO: 2510 - DNA, 477 bp, DROSOPHILA
tgcaggatattgagtagcaccgtttcgggctaaacagcacaatgaccaagaccaagggtgagaaaatcaacaaatccgcgatcaacgaagtcgtgacgcgcgagtgcaccattcacttggccaagcgtgtccacaacatcggcttcaagaagcgcgcaccccgcgccatcaaggagatccgcaagttcgccgagcgggagatgggcaccaccgatgtgaggatcgacacccgtctgaacaagcacatctggtccaagggtatcaggtccactccattccgcattcgcgtgcgcctggcgcgtcgccgcaacgacgatgaggactcccccaacaagctgtacacttacgtgacctatgtgccggtgtccacgttcaagaacttgcagaccgagaatgtcgagtccagcgacgactaagcaacgtaattgacggccaagaaaacacggttaataaaaagtaatttttatttagaaaaaa

SEQ ID NO: 2511 - protein, 124 aa, DROSOPHILA
MTKTKGEKINKSAINEVVTRECTIHLAKRVHNIGFKKRAPRAIKEIRKFAEREMGTTDVRIDTRLNKHIWSKGIRSTPFRIRVRLARRRNDDEDSPNKLYTYVTYVPVSTFKNLQTENVESSDD

SEQ ID NO: 2512 - DNA, 4610 bp, DROSOPHILA
tttatttttaacagataatacgcaaaaatataaatataagaagtttaaaagagtgcgtccattttacaaatcaacagctctaatttttttgaaaagacagcagtaattcacatcatctaattttcgataaattttaactttattttactcttttacgtctatgaatatttaaagttttgtgtatttattaattatattattgccaacattaaaatttactgaccttatagcttcacgtaagaataagatgaacgtggcaaaacactaaaaaaattatatttaaagtgaaatggtgcttacattaataaaaaaaaaacgcataagacgtcgaaaacggtggaaaatgtgcctatttctgggatccctctattcttcgttaaggcacttgcaaatggagtaggttagtaaaaaattgtattttattcaaatatttatttgattttatgcattatttaatacatacttatattagatagatttaattaaaatatatttaagcttacaactttcaacttatatgtgtgtgtttattacctgtgcatattcatacgtatcggatttgctcgtatcgtcacctaataaatccatattttacacctacaatttgtataagagaatagcctataacacttataaatacgatgcctatacatatatgcgtttaatgtttaaagatgtttaagtatattatacaagctatcaaataaattaggttcatttgtatgcttatcgtaaaaagcgtttttgggtttcgcccatttttgaagatcccacatgaaagtggagaaaggacatatgcagctgaagtgttaacgatggaacatcgttttctattctttaatatcattgtggtgatatatgcgcccttagagatggttctggggctagcataggtggaggcagatgatcatagtaacgctcgataaactgaagctaagcagggtggactccagtgtctgtgacttcattaagctgcctgtcacctctgcatttaaactatctataacccaccgataatcacttcctgttgggcctcatcctccatgtcaggaatctcctgcttatgcactatcatcccatcgctgctggtctggcgaggagcagtttggccgtacttttggtgtatgccgcggtgacgcttgagtgcaaaacgatcagcgaatgctgcagagcaaatctcgcacttgtagggtttttctccggagtgcacctttgcgtggttcttaaggtgcgccgcctgagaaaaggccgatccacaaatttcacacttgtatggcttttcgcccgtgtgaatgcgcctatgattccaaagagtagcgtggcgcgcaaatcctttgtcgcaaacaccgcacacatagggccgctcgccactgtgcgtgcgttcatggttcttgaggtgtggtgactgtgaaaactgcatgccgcaggtttggcatctatgtaaagataacggtaattagtataaagagtataatttcaagtagaagattggtattacttatagggtttctcgcctgtatgaatgcgcgcgtggtttttcaaatatacggctttagcaaaggccaatccacagatgctgcacttgtagtttttttcaccgctgtgcagctttttatgggaccacagacttgagtaacgtgaaaacagaccaccacatatattacaactgaagggtttggacggatttctgcaggacaaacaccttggttttgttagcgtaggataaggttgcaatttcatgttatactcactcagttttaacagtaactgattgctttaccgatccgcccaccccgctgtgtgaagcatgggagtgctgccccactagcaccacgccggagccattgcatttctggcatttggtcatctgctgggaatttcgttttttcacaggatgatggccagacccactgctcgcctctcgctttggcgttgtaccgccagtctgtgcagccacaatttgctgaagttgtgcttgggcctgaggagtcgttgatatgatttgcacgggatgcgccatttgacctgcaaaagatgcgatgaagttagttatggtccatttagaatgtaatctttcacaactaccgtcttgggcgacgaagagctgctgttgttgttgcgctgtttgttcagcctgcatgcaggactcgcagcgcacctgctttggacctttgcgtttggactgctgcagcatagagcttccacaatttatgcacttgcttgcctttgactcatgttgctgctgctgcattacagattgctgaaccggctccagcgtgtcagaagacacaatctgtatctggcccatctgaccatttccaataatgttctgtgcctgcacaagcccctgcgcgctgaccacggcaatagaatcgccgcccgcttgggcgttatgttgctgttgttgctgctgttccccgtctgtatgcatccgcttatgagcattaagaagtgccaaatgagggaacatatctgaacatacgtcacacttaaagcttatgttggatatggtgttctgcaaagaagaaaatctttaggctttgcttaacgagtcttccttttacatacagctgcaattggcttattttgattgacaatctggatgcggccttgtgcgtctaccgtggcgatgccaagagctgcaccctgattgagaggcattccgttgaccagggcgtaattgtatccgcccacgggctgggctatataacacgtcttattgtcgtctgtggtggccagctgtgcgagattgacggtaccgccattgccctatgtgaagacaatatgaaaagtcagcaccaataacatatagtaagtaaactacttacatttgtcgtgtaatagaaggtaggctgctgctccgttttttggccctctattttgggctgtttaagaatggtgccatccgccgtctggtattgaattgtggccggttgcccattaatggcatttgtgaagataatgtttttggtaaggtcttccatggtccccaaaattcgagtatgctcaaaaattaacttttatcatacgttggccttttatttactgcagctctgtcgcgcttttcaacactgcatcacgcgacgctaattctataaaagagaaaaagagatgaatatagtgccataggaacccagcgaaaacgactgattaaaaatggcgacggtgagacaaaaaatatgtacatacgcgacacaaaacatacacagacgaacgtttaatgcagcagctctttacattaacagactctagtatctaaactggagtctagcacatttgtttttttatcatacaatattacactacatgtgttatttttttcattattaaaattaccttttacgcaaccggaccacaccataaattgcgcactgcctgctccacaataaaattgttaagatttgagtggtgtaaaattgtattcgtgaattgataacgtattttaacgatatattgtttggaataatacaagatatatatttaaatagtgttatctttttctaacaaattccagcactttaactttcagtccatcattttttacgattgctaaagagagatggagacagaacaacgctcagagatagagcagacgagcagcagttttactttttaaaagtgtgaccgtttcacgactcatgaaaataatcatttccctcgaaaatataccaaaattcacaaagaactggtaggatttcttagagcccttttacactaattcgataactcagaaaacataaatatttttatatacgttttgtacttcgtaatttggattacatcacatgttgtcttacatgttgtctcttactcaaaaggcaaacgctacgatcagtagaatctggctgttactagctttcgaaaagaaatatcttgtgctgagctgcgttaaaaacacgttttaaatttattgagacttaacttttaatattctacaagctaaggtaacactgtaagagcaaagacactagaatattctagtgtctttggtaagatcatgggccatggttgataacaaattccataagataacgaaattttacaggcactcgacttttaactaattcttaaagattccatataaaacgtacttatttttgtatacttaaatcttttaggaattcctatttatctttatcactcgatgtaggggagtgagttaagggacaacagattttttatgccccacgtagtgacgcaagttatccaacccataaatatagcactctaccaaaagctaaacaaatttctaactccaatctcagcagcgttgcctttgcccttgtttttgacgccaacacttagccacccgatatataaccaaacttaaagtaaacacaacttccacttggagaccaagccatggtcaacttattgcgcttcagtcaaactgcgtcagtcagcaaatttgaatttcacaatgctgggaaataatttcagtgtaaagcttttatcctaaacatattaaaaagcttaagagaatcctaaagaaaagcttctggccgaggttgagtggattaggattaagatttagaagatcagtctgagtcgggacgagatcgtgaacagcttcaaatcaaagataagctagtaataaagtgtcttgtaat

SEQ ID NO: 2513 - DNA, 2068 bp, DROSOPHILA
agtaaaactgctgctcgtctgctctatctctgagcgttgttctgtctccatctctctttagcaatcgtaaaaaatgatggactgaaagttaaagtgctggaatttgttagaaaaagataacactatttaaatatatatcttgtattattccaaacaatatatcgttaaaatacgttatcaattcacgaatacaattttacaccactcaaatcttaacaattttattgtggagcaggcagtgcgcaatttatggtgtggtccggttgcgtaaaagaattagcgtcgcgtgatgcagtgttgaaaagcgcgacagagctgcagtaaataaaaggccaacgtatgataaaagttaatttttgagcatactcgaattttggggaccatggaagaccttaccaaaaacattatcttcacaaatgccattaatgggcaaccggccacaattcaataccagacggcggatggcaccattcttaaacagcccaaaatagagggccaaaaaacggagcagcagcctaccttctattacacgacaaatggcaatggcggtaccgtcaatctcgcacagctggccaccacagacgacaataagacgtgttatatagcccagcccgtgggcggatacaattacgccctggtcaacggaatgcctctcaatcagggtgcagctcttggcatcgccacggtagacgcacaaggccgcatccagattgtcaatcaaaataagccaattgcagctaacaccatatccaacataagctttaagtgtgacgtatgttcagatatgttccctcatttggcacttcttaatgctcataagcggatgcatacagacggggaacagcagcaacaacagcaacataacgcccaagcgggcggcgattctattgccgtggtcagcgcgcaggggcttgtgcaggcacagaacattattggaaatggtcagatgggccagatacagattgtgtcttctgacacgctggagccggttcagcaatctgtaatgcagcagcagcaacatgagtcaaaggcaagcaagtgcataaattgtggaagctctatgctgcagcagtccaaacgcaaaggtccaaagcaggtgcgctgcgagtcctgcatgcaggctgaacaaacagcgcaacaacaacagcagctcttcgtcgcccaagacggtcaaatggcgcatcccgtgcaaatcatatcaacgactcctcaggcccaagcacaacttcagcaaattgtggctgcacagactggcggtacaacgccaaagcgagaggcgagcagtgggtctggccatcatcctgtgaaaaaacgaaattcccagcagatgaccaaatgccagaaatgcaatggctccggcgtggtgctagtggggcagcactcccatgcttcacacagcggggtgggcggatcggtaaagcaatcagttactgttaaaactgaaaatccgtccaaacccttcagttgtaatatatgtggtggtctgttttcacgttactcaagtctgtggtcccataaaaagctgcacagcggtgaaaaaaactacaagtgcagcatctgtggattggcctttgctaaagccgtatatttgaaaaaccacgcgcgcattcatacaggcgagaaaccctataaatgccaaacctgcggcatgcagttttcacagtcaccacacctcaagaaccatgaacgcacgcacagtggcgagcggccctatgtgtgcggtgtttgcgacaaaggatttgcgcgccacgctactctttggaatcataggcgcattcacacgggcgaaaagccatacaagtgtgaaatttgtggatcggccttttctcaggcggcgcaccttaagaaccacgcaaaggtgcactccggagaaaaaccctacaagtgcgagatttgctctgcagcattcgctgatcgttttgcactcaagcgtcaccgcggcatacaccaaaagtacggccaaactgctcctcgccagaccagcagcgatgggatgatagtgcataagcaggagattcctgacatggaggatgaggcccaacaggaagtgattatcggtgggttatag

SEQ ID NO: 2514 - protein, 561 aa, DROSOPHILA
MEDLTKNIIFTNAINGQPATIQYQTADGTILKQPKIEGQKTEQQPTFYYTTNGNGGTVNLAQLATTDDNKTCYIAQPVGGYNYALVNGMPLNQGAALGIATVDAQGRIQIVNQNKPIAANTISNISFKCDVCSDMFPHLALLNAHKRMHTDGEQQQQQQHNAQAGGDSIAVVSAQGLVQAQNIIGNGQMGQIQIVSSDTLEPVQQSVMQQQQHESKASKCINCGSSMLQQSKRKGPKQVRCESCMQAEQTAQQQQQLFVAQDGQMAHPVQIISTTPQAQAQLQQIVAAQTGGTTPKREASSGSGHHPVKKRNSQQMTKCQKCNGSGVVLVGQHSHASHSGVGGSVKQSVTVKTENPSKPFSCNICGGLFSRYSSLWSHKKLHSGEKNYKCSICGLAFAKAVYLKNHARIHTGEKPYKCQTCGMQFSQSPHLKNHERTHSGERPYVCGVCDKGFARHATLWNHRRIHTGEKPYKCEICGSAFSQAAHLKNHAKVHSGEKPYKCEICSAAFADRFALKRHRGIHQKYGQTAPRQTSSDGMIVHKQEIPDMEDEAQQEVIIGGL

SEQ ID NO: 2515 - DNA, 4980 bp, DROSOPHILA
ctagtactattactactaattctgctactactactactactactactatctttacttctagtactactactactaattctgctactactactactactactcctacttttacaactactactactactactactacaatcctatagggtatttgcctaccctacctcttatttctttcctattttaagagctgtcttctcatttcattaaatttcatttcatttggtttcgtttttatctctgctttagcctttcccgcctttgagggcaatcaatctcgcatttggtaactgccatttgcccaggcgaacatcaacacacctgcatggatgacgatgacgataatgatacgataatcatctcaaggatgactcacgttcgctcctggctgttaaatgcatccgctgcaagtgccactttcccgcctctccatatgtttcatacacactcatatataaccatatacctccacatacacatattcagggcacgcagagcagcagctcagacctcgatgtgcccaacttccgcttggaaggggcaggttaaggaacacacacgaacaacggctgtgggtgtgggtggtggtaagaagtacaaaaaatatatataaagactataaagactgccatgtgggaaaatagtttataaagctattttctggattaaaagattacagaaaatctttaaacaaacaaagccctagtaatgcggttaataacaatgtgttaaagattttattgaggggtcttaagtgaggatttagtgagtaaagattctcaaaaataaacaattattcttaaatttgtagtagcaagaatgtgttaaacttctcactttcaaattattaaataaatctaatttaatcagtatatattgtaaacattaaatgctacaataatgcatatctcactaaatcccatttagaataatttcttcaacaagccaagtaaataataataataataattaaaaaaaaagtaataaatatagcaattacctaggtgtccattagaccaaccaaatcctcttggatgcgctgccagccgaactccatgcggccttcttccaacttgagccgacacctgtccggaatgtgcttaaaaagctgacggaagggaccgtattgctccaggcacttaatgtcccccagtaggatgagcttgttcttggcacgggtaatagccactgtgagacggcgctgatcctccaggatctctgcctcccgtgagcgttccatgtcagagaaatcaccacctgttttggagcagctgtatatgatgagatttttatccctgccttggaactgatccacggtgttgcactccaggtcggtgtccagtttggaggcgagctttttgaatagctctacttgagcgcgatatggtgctatcacgccaatcctggaggcttcgtagcccgattttaataaatatctgagcaagtgcatcactatgcccgcttcacagtagtttgtgtatttggatactctctttttggaagtaagcttcctaatctcatctttgtcctcgctaaagctttgctctatggatgagcaggtatccaccagtcgctgggatgcataaacgaattcctggcaacgctctaagcaatcccctgtatttatcagcgtgactgcctgctctaaatgagtggttaaggcacgctgcacccatctgggtgcttcgttcaacagttcgacttcaaacctcgcgccggacacctcatccgatgcacacttaaggtctcctccataggtgagctcattggccagccgggtgatggttttgttcatgcggtactgtaaactcaaaacggcggtggccttttccgagtccaatctttggaataaagtctcatccgctcccctttgtcgggcttctttggatctgacaatcggcggcaactgttctggatctcccacaaggacaaatttgctgcagtgaatcaatggacgcaacacggtgggctgcaacacctgcgtggcctcatccacgatgcaataatcgaactgacgacgctgaaagagcggatgtccacatcccagacaggtcactcccacaatggaaggctgccctagagccttctccaattcctctactgttttgcagtcttttgttaacctctcttcgctgatttcctccaactgcttatgaatcctagacccagagcccaatctcatcatgggcaatccgaaaggcagcaaacgcatgatcagattgtccacagccgaatgcgtttgtgctgtaataagcacactctttccgagaagatggagcagtctgacaagggcaaccaatgtctgggtcttaccagtgccgggcagtcccttgatcaacaggtgactgctggttgtcaaagcacgcaaagcagcattttgttgcactttgttaagattcagcagaatgggtgctcccttggtgaggatgatcttgggcagaactttgtgctgctctggtggcttcttggccacaataatatctctcagctcctggaagcgttctccctcggagagcagcataccaagattggtaaagttaaaagtggcaaaggactgcgaatcgtgcttatcaataataaaggtctcctcgctataacgctggctaagatccctctccagccgaagatccaaacgacgagcttctatagatacaataaaaccagcagcaacggccaaacgggatgtggaactgattacaacatattcgcccaagtcgaactgaaagaaagagttgagataagaatatagtgatctgtggattttgtggcaaaacataccccactgaggctgagatctcgactgggatctgcctcttcaccgagctccaaggtctggcgatagcgtccctcttctaatatcacttcttgacccttcactagcttcaaatgtcgaatggctatgccttctttttctctctccgcagggtccttcgtccaaaaagacctcacatgcgaggactgccgattgtgttgctcttctagagccagcaaaccacaccaatgctgcacgtaggcatggtctgcctcacttagatgctccaatagctgtggcatgagtttcttgaggggatgtgagtcgcttagctgtaaacttgaatccttctgggcgaaactggagcaaatggtattgtaggcacaattgccgcaggcgctgtgatggtaaacgggttcgggtagcggcagttgctccagtggatcctccttgctagccggaatggctacttcacgtgttagccagtaggccagatcatttcttaacataaggagatccctctgttcgtttctcccgctagcaacttctcgtaggagtccctctttgaggtacagaagcaatcccgattgagtatccctgccctgggcagagtgcatcagttggtagagcagcaattggcccttgtgttccatggagaagctggctcggccggtcttcagttccagtggtatgatctcctccctctgccgttgattttttacctttacggagacatccaccttacccttgagtcccagttgtggaacccagaggttctcctctatatcgcatatctcgtggatttgacctctatagacttcgggcagcaaaacacttggcggttcacccttcacatattgggccacaaaactgacaatgggatcaatgaatttcatcagatgatcctccatttccacctggatgagattgctggcatagagtaaatgagccaaagaagagctggccagcatctcctggagggcagattgaatgtgttttttatcgaagagcttctggcgtagaaccttttgcagcaattcgtgcaccagagtgccaatgaccatctgaaatggaatacattctggataaattgggttatgctgatatcgagatgtactcacaacagagtttcccgagtccagaccgcgaaatcgttcctgcagaacagatttccgtttgcaaaacagggaaccggtgactgtggtgccggaaatgaggaaatccggatgggacacgcagtagccctgctccttatcgaccacatagcatcctgcagacggatcccacttgcccaacagggagacagtgtctccaacttgcattggcatgcaattccacggcggtagcagttggcaatcagctgtctccggatccccgccagaaatcctcttaacatgcactttaaggccttttctattggggagctgctccagccgcaccacttcgcaacgctgccacttggtgagctccaatcgatgattggatatagaatccatagctgcaatcagcgccaaatcgaagtcatcattgtcaccccaatcaatgttctccacttcgtctgacgaaaaatccagttgctctttgaatttcttttgtggattggatgacgtcacgtcagtgttatcattctccaaaatattaggcgtcagcacgcgtttggtggccatcgaaggggctatttgttattgttaaatcaaattatttactttatttcagttatgcgtacaaatgatttggcgggaacagagtgactgttttctgcgtgtggtaaaatacttatgaacacaccggcgcctcgttgctatttagctagcttgtagctatttaaaaattaccgcgtgttttaaactaaaatctccttctatcactaacagttgttagaaaatgaagtaatgtgtatcaaacaattatttaatatataaaattgcttaagctgccttctgcttactttttgttttctttttatatgtatatatttgatacttcagatctagctactaattttagtcatcttaacgaagtacaggtggcgcagttgtggaaaacatccgcacagatggcgacaatttagcgacatatattaaattgctcgtgttgattttgaattcttatcaccaccaatttttaaatagatttcaatattatagttaatttaatttaattttaatttatttttatcctacacaagagatcgaaatgttgaagaactacaacagcttagtaaagca

SEQ ID NO: 2516 - DNA, 3427 bp, DROSOPHILA
aatcatttgtacgcataactgaaataaagtaaataatttgatttaacaataacaaatagccccttcgatggccaccaaacgcgtgctgacgcctaatattttggagaatgataacactgacgtgacgtcatccaatccacaaaagaaattcaaagagcaactggatttttcgtcagacgaagtggagaacattgattggggtgacaatgatgacttcgatttggcgctgattgcagctatggattctatatccaatcatcgattggagctcaccaagtggcagcgttgcgaagtggtgcggctggagcagctccccaatagaaaaggccttaaagtgcatgttaagaggatttctggcggggatccggagacagctgattgccaactgctaccgccgtggaattgcatgccaatgcaagttggagacactgtctccctgttgggcaagtgggatccgtctgcaggatgctatgtggtcgataaggagcagggctactgcgtgtcccatccggatttcctcatttccggcaccacagtcaccggttccctgttttgcaaacggaaatctgttctgcaggaacgatttcgcggtctggactcgggaaactctgttgtgagtacatctcgatatcagcataacccaatttatccagaatgtattccatttcagatggtcattggcactctggtgcacgaattgctgcaaaaggttctacgccagaagctcttcgataaaaaacacattcaatctgccctccaggagatgctggccagctcttctttggctcatttactctatgccagcaatctcatccaggtggaaatggaggatcatctgatgaaattcattgatcccattgtcagttttgtggcccaatatgtgaagggtgaaccgccaagtgttttgctgcccgaagtctatagaggtcaaatccacgagatatgcgatatagaggagaacctctgggttccacaactgggactcaagggtaaggtggatgtctccgtaaaggtaaaaaatcaacggcagagggaggagatcataccactggaactgaagaccggccgagccagcttctccatggaacacaagggccaattgctgctctaccaactgatgcactctgcccagggcagggatactcaatcgggattgcttctgtacctcaaagagggactcctacgagaagttgctagcgggagaaacgaacagagggatctccttatgttaagaaatgatctggcctactggctaacacgtgaagtagccattccggctagcaaggaggatccactggagcaactgccgctacccgaacccgtttaccatcacagcgcctgcggcaattgtgcctacaataccatttgctccagtttcgcccagaaggattcaagtttacagctaagcgactcacatcccctcaagaaactcatgccacagctattggagcatctaagtgaggcagaccatgcctacgtgcagcattggtgtggtttgctggctctagaagagcaacacaatcggcagtcctcgcatgtgaggtctttttggacgaaggaccctgcggagagagaaaaagaaggcatagccattcgacatttgaagctagtgaagggtcaagaagtgatattagaagagggacgctatcgccagaccttggagctcggtgaagaggcagatcccagtcgagatctcagcctcagtgggttcgacttgggcgaatatgttgtaatcagttccacatcccgtttggccgttgctgctggttttattgtatctatagaagctcgtcgtttggatcttcggctggagagggatcttagccagcgttatagcgaggagacctttattattgataagcacgattcgcagtcctttgccacttttaactttaccaatcttggtatgctgctctccgagggagaacgcttccaggagctgagagatattattgtggccaagaagccaccagagcagcacaaagttctgcccaagatcatcctcaccaagggagcacccattctgctgaatcttaacaaagtgcaacaaaatgctgctttgcgtgctttgacaaccagcagtcacctgttgatcaagggactgcccggcactggtaagacccagacattggttgcccttgtcagactgctccatcttctcggaaagagtgtgcttattacagcacaaacgcattcggctgtggacaatctgatcatgcgtttgctgcctttcggattgcccatgatgagattgggctctgggtctaggattcataagcagttggaggaaatcagcgaagagaggttaacaaaagactgcaaaacagtagaggaattggagaaggctctagggcagccttccattgtgggagtgacctgtctgggatgtggacatccgctctttcagcgtcgtcagttcgattattgcatcgtggatgaggccacgcaggtgttgcagcccaccgtgttgcgtccattgattcactgcagcaaatttgtccttgtgggagatccagaacagttgccgccgattgtcagatccaaagaagcccgacaaaggggagcggatgagactttattccaaagattggactcggaaaaggccaccgccgttttgagtttacagtaccgcatgaacaaaaccatcacccggctggccaatgagctcacctatggaggagaccttaagtgtgcatcggatgaggtgtccggcgcgaggtttgaagtcgaactgttgaacgaagcacccagatgggtgcagcgtgccttaaccactcatttagagcaggcagtcacgctgataaatacaggggattgcttagagcgttgccaggaattcgtttatgcatcccagcgactggtggatacctgctcatccatagagcaaagctttagcgaggacaaagatgagattaggaagcttacttccaaaaagagagtatccaaatacacaaactactgtgaagcgggcatagtgatgcacttgctcagatatttattaaaatcgggctacgaagcctccaggattggcgtgatagcaccatatcgcgctcaagtagagctattcaaaaagctcgcctccaaactggacaccgacctggagtgcaacaccgtggatcagttccaaggcagggataaaaatctcatcatatacagctgctccaaaacaggtggtgatttctctgacatggaacgctcacgggaggcagagatcctggaggatcagcgccgtctcacagtggctattacccgtgccaagaacaagctcatcctactgggggacattaagtgcctggagcaatacggtcccttccgtcagctttttaagcacattccggacaggtgtcggctcaagttggaagaaggccgcatggagttcggctggcagcgcatccaagaggatttggttggtctaatggacacctag

SEQ ID NO: 2517 - protein, 1119 aa, DROSOPHILA
MATKRVLTPNILENDNTDVTSSNPQKKFKEQLDFSSDEVENIDWGDNDDFDLALIAAMDSISNHRLELTKWQRCEVVRLEQLPNRKGLKVHVKRISGGDPETADCQLLPPWNCMPMQVGDTVSLLGKWDPSAGCYVVDKEQGYCVSHPDFLISGTTVTGSLFCKRKSVLQERFRGLDSGNSVVSTSRYQHNPIYPECIPFQMVIGTLVHELLQKVLRQKLFDKKHIQSALQEMLASSSLAHLLYASNLIQVEMEDHLMKFIDPIVSFVAQYVKGEPPSVLLPEVYRGQIHEICDIEENLWVPQLGLKGKVDVSVKVKNQRQREEIIPLELKTGRASFSMEHKGQLLLYQLMHSAQGRDTQSGLLLYLKEGLLREVASGRNEQRDLLMLRNDLAYWLTREVAIPASKEDPLEQLPLPEPVYHHSACGNCAYNTICSSFAQKDSSLQLSDSHPLKKLMPQLLEHLSEADHAYVQHWCGLLALEEQHNRQSSHVRSFWTKDPAEREKEGIAIRHLKLVKGQEVILEEGRYRQTLELGEEADPSRDLSLSGFDLGEYVVISSTSRLAVAAGFIVSIEARRLDLRLERDLSQRYSEETFIIDKHDSQSFATFNFTNLGMLLSEGERFQELRDIIVAKKPPEQHKVLPKIILTKGAPILLNLNKVQQNAALRALTTSSHLLIKGLPGTGKTQTLVALVRLLHLLGKSVLITAQTHSAVDNLIMRLLPFGLPMMRLGSGSRIHKQLEEISEERLTKDCKTVEELEKALGQPSIVGVTCLGCGHPLFQRRQFDYCIVDEATQVLQPTVLRPLIHCSKFVLVGDPEQLPPIVRSKEARQRGADETLFQRLDSEKATAVLSLQYRMNKTITRLANELTYGGDLKCASDEVSGARFEVELLNEAPRWVQRALTTHLEQAVTLINTGDCLERCQEFVYASQRLVDTCSSIEQSFSEDKDEIRKLTSKKRVSKYTNYCEAGIVMHLLRYLLKSGYEASRIGVIAPYRAQVELFKKLASKLDTDLECNTVDQFQGRDKNLIIYSCSKTGGDFSDMERSREAEILEDQRRLTVAITRAKNKLILLGDIKCLEQYGPFRQLFKHIPDRCRLKLEEGRMEFGWQRIQEDLVGLMDT

SEQ ID NO: 2518 - DNA, 3899 bp, DROSOPHILA
ttgatgattttgtaactcactcgttgaaaacagccggctctcacgctataagtggatattggaaactgcctgaggcctttatttcgggaaatctaaacgatatttacataaataatttaaaccttgctaatgatgtcgttagaatgcctcttcaaaatgacagtatcaatcttcccttgatagtcgaagcattgaaaactgtccagggcggcactataaatcgtctccatacaacccctgaaagccaggtggcggatgtgcctgtggccaagtggatccatggagcagcctacctttacgggaaccacagtatttctggcattactcatctgaataatgtcaatctctacaacgatcttaccgtgaacgggtctgtaaatggtgtcccctggcaggcggacaagctcattttgatggacaatgagcaggatataccgggctccctgctggtggcgaatagtcttcccgaacagaagcgagttatgagcaataatgtgaagaatctctgggtggatttcgtcaacgatctgcccgttaacgagttactggtcagcaaggcagaaaaccgtcccaatcttcacgtggaaagccaactgatcttcacccagcccctcactgtgggtcactacgaagcgggcaacggaaatgggctgctggataaatattacaagaaaaagcggggtgtcgaatcgaatgacattcatgattggcagcagctgcaggaaaatgtggcagctattaaaaacagattggccagtatgttaaaaacacattaatacaaattctcctttagtcatgtgcattaaattcaaccaacagagccgcctaaagtgctggaaggctttgctgtgctgcagaaattacctcataaggcctcgcacatgaagatcatctccgtggacaacgaggacgtactggccatctgggagcagatgcccagcgaagtagggactacttacacatggcaaccggatatacatctttttgggcgaagttcaagtaagttatgtagatttatttgcatataaacgtattttaaaatcaagtagcatattcaaccttaaatagggacaaattcgaaatctcaaatattagaaatacattttaaatttagctttaaaattcatgcgtaaatgctatgaacactcataccagaactgtgagtaaatacattttacaagtgggcggcacagaacgcagacgtttgaacacggaaaaaataatacgataaatacgagaaatggttcagacaggcctactacataactacctttttagtttgtctaataagtaagctgagtaatcatttaaattgcgagtatcagtcggtctactgctccagttcgtcgctctgcacatcgaggatggcgcgcaagatggacagctccagcttggcggaggcacgcgaagagagtctgttcatcacattggccacgtacagcccgagagactcgtgtcgcgacgagttgcatagattcttgaaaaaggttggcggcagcgagttgtcaaagttgcccaggttgataatctcgggtgtattggaggaggcggcgttgatcttcggcccgaagataatgtcattcttaaagtccagctcgtcgatgtgtggcgaaaagccgtttgtggaagccaccgaggtggaagcaatggtggcggctgtcgatgagttcgctcccccaccaccaccgtttatctgttgtgccgatggaatggtgatgatgttgatacccggcggtggtgtctggttgtcctcacgctccttcttaacctgcatcagctgggcagtggttgtgtgcaccacattgtttcccgccggcagttgatctggaacgctggtgtgcactgaagttgcggctgccgatgaagcggcttgtttcgggctcgtggtcttggtctgctttttttgcgccgatgacgaggtgtactcctccgaaagtttgcgcttcaaagaatctggcagctgaatggtggtgcgcgaggagcttgatctttgcccactggctggcgcctgttgcccaatagccggtttcggtgctgctgcggagctgggcgtcttcttcacagtaattcccttcttttgcagtactgctgcggcggcggacagcgagctacttcgcggtgtgttgttagccagtgtgttgagcagctttttctcctcgatggctgggcgaggagtgtcgacgttgggtttggcgtacgccaaccgctcgtccttttctggcgaaccggtgctgtgtgactttgtggggctttcgccgtcggaggacgccgagccggtagagttggtgtgctgtccgtactgatgggcgtcatcctcgtcctcaggctcctgcacctccagcatttcgtactcctccacctcctccatgggtacttgatcactgcagaatagcagtagaaattttgttagtgtttcacggttagaggactatttacgccacttacttctcctccttgattgagattttaggctcctgatggatctgatgcatcagactgaagagcttccacgccgaattgccctttagcttttcctgctcgtacttcttttggagcactatgaagatggagcgcgattcgtgcacagagagcttgttgagacgcccgatcctggcccacgcctcctcctgctcctgcttgctggcgccgccattgtttggatgcagcaccttttctttggcgatgtcctgcagaatcttgtccagttggattgccatcttagtcagcgacttgcggcccgctggttgcgcgttcctgataattttggaggctgttttgataacacgcgacacacgaattggtatatgtaactaggatccgcttgtttttctctccgctttcgcaccgttcgcttctcttttcttctgtatttggcgtcggtaaattggcggaaaatgtgaccgtgcaacacgcaaatactagaaatgccgccttttggtacagtaacttagggatgagggagattttggcaacatagatgttcacagttcacagctctcgatgcagtgaaaattaaatttttatatattatatttatcactataaatattaatacttgcattatttttacttatataacaattataatgtttctccataaggaaaagttattcattttggtagtcataactatcgaaggaatggtttttgttttgtctttttctattctattctcatactttatttatttattttatgtaaggatccttacatatcgataattcttaataccgctaatttacggtaaaactacccgtctatcttgctgccgatagggacaaacaaataacgcaatttatattgcagatgagaactccacgaaatttaaattttattgaaatacgttacagttttcgccacctcacaacgccacgatatttactttgtcctgaccacctatgcatttgaccgtttccaagcgcgtaggcccatccgctccggctggactgctaaccataaaggggaattcggccaggccgtagcaggcagcgccataattacccagccgatctacggcgatgagagcacccatgaaatccttgtggtgcttgagaatgcggcgaaggccctcttgagctgcctcagccggaggttttcccgcccgcatggtctccaccgctagcagggagggcaggaagcgcatcatcacatctccatctccggttgccacggctgcacccacctcgttgtctgcataagcgccagcacccggaatgggggagtcgccgacccgtccgggaatcttgtgccgcgccccgttggtggaggtgccggcgtggatgttgctttccacgtcgatggcgatcatgccgatggtatcgtggttcttgcgtccgatctcatactcattgcgggcacggtcctccttccagcgggtcagcggagtcggccgcggctta

SEQ ID NO: 2519 - DNA, 1835 bp, DROSOPHILA
cacattttccgccaatttaccgacgccaaatacagaagaaaagagaagcgaacggtgcgaaagcggagagaaaaacaagcggatcctagttacatataccaattcgtgtgtcgcgtgttatcaaaacagcctccaaaattatcaggaacgcgcaaccagcgggccgcaagtcgctgactaagatggcaatccaactggacaagattctgcaggacatcgccaaagaaaaggtgctgcatccaaacaatggcggcgccagcaagcaggagcaggaggaggcgtgggccaggatcgggcgtctcaacaagctctctgtgcacgaatcgcgctccatcttcatagtgctccaaaagaagtacgagcaggaaaagctaaagggcaattcggcgtggaagctcttcagtctgatgcatcagatccatcaggagcctaaaatctcaatcaaggaggagaatgatcaagtacccatggaggaggtggaggagtacgaaatgctggaggtgcaggagcctgaggacgaggatgacgcccatcagtacggacagcacaccaactctaccggctcggcgtcctccgacggcgaaagccccacaaagtcacacagcaccggttcgccagaaaaggacgagcggttggcgtacgccaaacccaacgtcgacactcctcgcccagccatcgaggagaaaaagctgctcaacacactggctaacaacacaccgcgaagtagctcgctgtccgccgccgcagcagtactgcaaaagaagggaattactgtgaagaagacgcccagctccgcagcagcaccgaaaccggctattgggcaacaggcgccagccagtgggcaaagatcaagctcctcgcgcaccaccattcagctgccagattctttgaagcgcaaactttcggaggagtacacctcgtcatcggcgcaaaaaaagcagaccaagaccacgagcccgaaacaagccgcttcatcggcagccgcaacttcagtgcacaccagcgttccagatcaactgccggcgggaaacaatgtggtgcacacaaccactgcccagctgatgcaggttaagaaggagcgtgaggacaaccagacaccaccgccgggtatcaacatcatcaccattccatcggcacaacagataaacggtggtggtgggggagcgaactcatcgacagccgccaccattgcttccacctcggtggcttccacaaacggcttttcgccacacatcgacgagctggactttaagaatgacattatcttcgggccgaagatcaacgccgcctcctccaatacacccgagattatcaacctgggcaactttgacaactcgctgccgccaacctttttcaagaatctatgcaactcgtcgcgacacgagtctctcgggctgtacgtggccaatgtgatgaacagactctcttcgcgtgcctccgccaagctggagctgtccatcttgcgcgccatcctcgatgtgcagagcgacgaactggagcagtagaccgactgatactcgcaatttaaatgattactcagcttacttattagacaaactaaaaaggtagttatgtagtaggcctgtctgaaccatttctcgtatttatcgtattattttttccgtgttcaaacgtctgcgttctgtgccgcccacttgtaaaatgtatttactcacagttctggtatgagtgttcatagcatttacgcatgaattttaaagctaaatttaaaatgtatttctaatatttgagatttcgaatttgtccctatttaaggttgaatatgctacttgattttaaaatacgtttatatgcaaataaatctacataactta

SEQ ID NO: 2520 - protein, 440 aa, DROSOPHILA
MAIQLDKILQDIAKEKVLHPNNGGASKQEQEEAWARIGRLNKLSVHESRSIFIVLQKKYEQEKLKGNSAWKLFSLMHQIHQEPKISIKEENDQVPMEEVEEYEMLEVQEPEDEDDAHQYGQHTNSTGSASSDGESPTKSHSTGSPEKDERLAYAKPNVDTPRPAIEEKKLLNTLANNTPRSSSLSAAAAVLQKKGITVKKTPSSAAAPKPAIGQQAPASGQRSSSSRTTIQLPDSLKRKLSEEYTSSSAQKKQTKTTSPKQAASSAAATSVHTSVPDQLPAGNNVVHTTTAQLMQVKKEREDNQTPPPGINIITIPSAQQINGGGGGANSSTAATIASTSVASTNGFSPHIDELDFKNDIIFGPKINAASSNTPEIINLGNFDNSLPPTFFKNLCNSSRHESLGLYVANVMNRLSSRASAKLELSILRAILDVQSDELEQ

SEQ ID NO: 2521 - DNA, 10460 bp, DROSOPHILA
gatattatttgtaagtttgtaagcctagagatccgatgtgtatgtgtacaacagcaagcgtgtgtgtctgtcttctttataaatatatatatatggttttttttttttgataaattaataattatattattgtaatgtatctacatacggcactgaatgaacaactttgctgctgcaattgtatttgtatttgtattgtgtattccatttacggcattttgatagtaaatatacaacaacaacaaatcaacgtatttccgactgcatcccgaaggttactgaaaccttaatccacgaagtacgcgacgagcggttagtcccgcccgagtattaacttaatggattctaacgatccgatcttgtgacccatcatcatcccttttcgcgacccttccaaaacgaaaatgaagaacattctaagctccgcttgcccattcagcggaagaaagcaaaggaaaatgtaacatttgcctcataattattatatacatttagcgcttattgaatattttttacaattgtattccgtaaataaatataaaatacatcaacatctagtcgcgtgttttaagttaaaggaagttaaggccaaagcaaaatgttagcaacagtttttgttaaaagttaacatatataataatggtaatttaaatattcaaatctatgaagtgacttattttataagtccacttatgtttgttatatttaattggtatttagaaaaggattcattttaaattaacaccgttgagggttcaattttggtagtgcgtctttgctaaccatgccgagtgggatcaagtccttgctaagttaggatgttgtcttagctaactgtgccatccctggtcggggtgtgtcttagctaacaattacgtgtcgatagatataatgctatcgatatgacagagtgtcgggaacaatcgatagcattacttcgatatcggtactagtgccacctccagttttgtgattgtgtcaaaaatacagggttttattgttgcactagcaatttaatccgaggaatataaattttgtgtggagttatgttcgagacgtcgttgccagcgattcaagaggcgagcggtcacacgtgtatgtgtttcactggcggtgcgggcgccaactccgccaaaaagcgtactacttttaaccttagttgacattgaaatgtacccgcttagttggatgtccacgatggtgcgtgtgtgtgcgtatatgtgtgctatgcggcgtctgtgtgcgcgagtgtgtgtgtgggattgcaaaggaggatgggagaaacgagagcagagcaaaaacaaaaacaaaaggaacctgctgcacatagtcggtgcatgcgagcgtgcttatgtgtgtgtgcgtgcgtgctagcaaaacaactgcaagaaatcagcaacagtagtagaagaagagaagctgtatcactgataaggaggctaaacaacaacaaaaacagcaacgataatgtgcaccctttcgaaatgcaaacaaaacaaagcgttgtagttgtgtaatcattcgttgtgaacacaccacacacacacacacacacaacacttgtttaataatacattttaattctattatttttgatttaatttttgcctgttattcaaatcgatctgtgtttttgcagttggcattcgttattaattaaatcagccgccaacagctgagcgagagagcaatcgagagcgacaggagaggatccacttccaatcgaatcgggtggaatcgaatagcaggggcttggtaattaaaaggaagaccgaactgaactgaactaaactgaaacggaacgaagcgaagcgaagcgcggcgaggcggcaagaaacgaaaagaaaagaacgaaagtcggcagagtcggaaagtcggcaagtctgattgtcggcaaagtcgcaaagtcggagagtcacagtctcaatcgcagtcggcgagagattccactcgtgtcgcacgtccgttcgtttccacattgtcgttataaaaatagcaacgccttaaacgatcgcatcaacctcatcaacagaacaccaccagaaatcaccgccccctcctacgcctcaatcgccatcgccaccgcatcccatccccatcatcttcattagcaggcagcctgacagagtaactaactgatcttgattgcgaccataatcaccgtcatcatcatgtaatccttcactaaccaattgatttccgctcgtccaccaaatagattccaaactgccgtttcggcagccggcaagatttcacgaaatctaatggccaaggacgaggaggatgatctgctgcccgacaaggatgcggccaagggcttctatgccaaatacgagcccaaggagattctgggcaggtaagaatcgaactacacttgccgtgatctcaaacctcttattaaatccttttaaattcagttgaagtattattgatcctgcacttaaccattcaaatacgtttctttctatttactttgcgtagttaattttgcaaatttaagatcatagaaacattgatacttgtatcctcagaaatcactagaacgtccaaatattgattgtttctgctttcccaacctcttactgccaagtctgcagtaatgcagtttgggctaaatggtgccaagtgagtcagcctcatcaagcttccatggcatggagcaatggcatgggctgcttttcaagcggcgcctgtctgccggcctactcacgccacaacgaagatcagaatttgccaagcaaatagcagagactaagcgaaaacaagggctaattacatattacaattctagggattagagattagataaatacccgatcatggcaatgtcaagtgcagcagaagcagagctctttatctacatgcaatgtttgtcttacaggggcatcagttcgaccgtgaggcgatgtatcgaaaaggagacgggcaaggagtttgccgccaagatcatcgacttgggcgccaccacagagtcaggcgagacgaatccatatcacatgctggaagcaaccagacaagaaatctcaatactgcgccaggtcatggggcatccctacataagttagtctcacatagcacccacatgtacttaattccaccactaaccatctacattatcgtgcacagttgatctgcaggatgtgttcgagtcagatgcatttgttttcctcgtcttcgagctgtgtcccaaaggtgaactcttcgactatctgacctctgtggtgacgctatccgagaagaagacgcgcaccattatgcgacaaatctttgagggcgtcgagtacatacacgcgaagagcattgtccatcgggatcttaagcccgagaatatcttgctggacgagaaccacaacgttaagatcacggattttggcttcgccaagcagttgcaagagggcgagaaacttacaagtaattataacacagcatccttctgtattcgctaagctaaactatatgtactttccccctattagatctgtgcggaacgccgggttatttggctcccgaaacgctcaagtgcaacatgttcgagggatcccccggctactcgcaggaagtcgacatgtaagagcgaataaactagccacttattattacacctttttttggctcacttaaattatagaagcaatttaagcacaaaaagtatcacatttattgtaatacgaattgtctgctcaaattactaaattgcttatgttaacagctaattttattattaaaaatttttgcttacataaaaaaagaaaggtctaaacttttgtatcgatattagacccgttttccttttttttttgttttatagacgcaaattttgctgatacatttcattaactagtgttcctcgtgtcaggcgatttgttttgatctttaggtgtgcattttaatgaatgagtcagaagcagaaaggcataataatctgaaatctgagtagttccgataccgacgtctatatttcttcggttcagcaaaacgtagggctttttgtatttttgagttctttaacgtttcccactggtatctacgttacttggtttcagcagaaatttttaataggaaaaattgacaccttttacccatttctttttcgatttctttttgttgttcgcagatgggcctgtggcgtgattatgtttacgctgctcgtcggttgtccacctttctggcaccgcaagcagatggtcatgctgcggaatatcatggagggcaagtacagcttcacctcgccggagtgggctgatatttcaggttggtcaaattgatatgcacatgccaaacgtatgcttatttacttggtttcgattgattgcagaggatcccaaggatctgatacgcaaatgtctagtcgttgatccttcgcaacgtataaccgtcaaggaagtattaagacatccattcttcaaccaaatggtaagtgccggaattgttggcagccgccgggctccaattaccacgaccaccaccaccaccactactacaaccgcctgtacaagaggaaaatcagtcaaattagttcaattagtcgccaagaatgaggtccgcctacgagtcgtcttttgtgctcgggcagcagtctatagttttcgggttcctgttcttgtacatagatactagatctctagttgatgggtttaacctcgggtgggttaatcttctacacaaccaatccaccaaaacaaccaaacacctggccctgcaaatgtttctaaacacaacgtacatctaagaacacacactctgatggaaagaacacccacctgtgactcacaaaccaaccactcacaacagcctattaacagcttcttcttactgttacctcctaaaaatacgattatgatttataattcggttagggtagcagcctaaccccccgtagtttagttcaattgtcagatttatagcctgacaggatcagtcattagtttggatcccccgccccccttaaaaagaaaaagaaaggaaaacccttcggaacctcttgcgttttgttaactttttatttctatgattactatttattataccaaacattttctttcttcttttccttacatataaactatatatcaaatcgaatccaattaattttaaacgaacccaaacgaacgataacgaacacacactaccatcgatagctgttcgagcaaaacattgatggcctcaagcgcagcctgtcgaccaagtcccgacgaatgagtcgcatcactgagatcgcactggtaacgaaccgttcccggactaacccaagctctctctatctcttaatctctctgtgctgtgtgtctccgtgttcatatattgatatcggagccgtaatcgtaatcgctctaataacgattatcccgataatcctgataatcccgataataaaatcaagcaatcgggccggcagacccaactcatgaccatatgcaaccctgccggcccagcattcgtgtgtctgttttccgttgcattctgttctgtttcgttctgtgccgatctaatataacccagctaaactgtacatcatagtgcatatcaattgtatactatacatacttatttatttaaaatccgttcaggtcatctgtgccaagcataataacttttaaccggccggcaatagccagcgaaaaacgaaacaaaaacgaatacgtacccgatctgcttcgtttttgtttgcatctgatttgatttgcttgtcgactgatcgatgcaccacaatgataacaaaaaaagaatatatatatatacatatatataacccttctctataatcccattccttgttgtactcgatgtttttttgtcgattttgtgtgttttttgtacaaatcaaccgattgcctcgataactaaaaacgataacacacgtctgcagctctgcgctcgccatttgaatcataatctgttaagttaataactgtgtctgcatgccaaccaaccaaaaaaaaagcaaaacaaaaatccagcagggtttcccttatcccaacctccaaagaaaaccccacaattcctattttgagtcactgcatgcaagcgtgcattaaccattcagtcagcgagaagaagatttgaagatttggcgatagtagatagtagaattcacagaatagatacaataccccatcaaggtgcatataagtatgaaacacgaaggtatatattattggtagtccactaggatgttgtacacttcccacagatcaaataagtagactgtaagttgaagtcattttaggtattatattcatatacgtataagaacgtcctgtgcttcacccaacccaatttttaatttaacctccgtgactgataaaccaattttaatttcttccgggcccactctgctgctgcctctgaccctcctgcccactgccaatctcatccttcctccgtctcgcctcgccttcggttttttgtttattaatcgcggtgtcgacgggatcaggtgttaatgggtgatcgccggcatccggccccgcccatcgcgcccgcccaaacgaacagcaggcatctgctgcaacccgaggcgtcatcgtatcgctttggtcagctgaacagtagttgcgccggtgcccccaattatctgtactgtgcgccacagagctcctactcgtcgaatcgaatgcgcgacggggcgctggacgatgcgggtgccagtgctgcatccgccacctgccatgtcatgtcgccatccaacgcctccaattcctacgccaccaacaccacagccaacacctcgaactcggccttggcatccgcctcctcccacaaaacgctcacggcgatggtctactatcagcagcaaccgcagcagcatcagacgcagcagcagcagcaacagtaccagcagcaacagacgacacagctgccggtgcagctgcagttgcagcatccactattgcagaccggtggcgatggcaagcaatcggtgtatgcacctcctacagtgcaggcaggttttccattgatattctttgatcttgcttacccaacacgaatggcccagcgggcgatggcaggaatcgctagggaaacgttaaattgcataccacagagcaggacgagtgtgccccacaattgcattagagttgcctgagatttttcatcattaaaagaatacttaaagctttgctacgatcattttaaatgtttatatacaaatgccttttcttgacaaatgtttatttgaactatttatttaattgtgtatgtttatatttccttaaatattatatttaaatgttaacttatgttgattacttttgaaacatttaactttctatattaatttaaataataatttcgtttaagactatatatcagtcagttttgtatggaatttttcgtttttgctaacgttttttgacagccgcgtgggttatacctaatatttagttgccacacgtactattaccgattaatttctagtgcttttagttgattcgaatcagtccactccactccattaatcatcagagacaagctgcactcgattcaccttcattgtatcactcatccattaatccatttcacaccattatgtcgttcggctgtctctttctaaatgatgttcgatccgtcgatggatcgttatatctagcgatcgatatgctttccactgctgctttccattcaaaccaaatcattcgtctactatttagcgtaagactttgaaagtacctctactgcattatactattactattactattactattattatattctcttatagctgacacttagtcatatcatagcgagtaaacactatgtttgtattatatgcacctttctttagtacatatctctcgggtgaactggatgatatttacaagaactgtatgtagttgacttgcttctgccgtttatacctctgtgttgtagcccctatagtaaatatatagtatatagatcattaatcccgcctatcagtgtctctcatttgtctcatgtgtcttgcggaggaagtcaggatatttagataagctaactagcatgatagacttaaacttaactatcaataacccaacatccacattgaaaaaactatggtgcttttcgatcgtaacgttaacgttattaaccattgcttctaattacgttgtaatatcaactgtaagctttattttattcggatttaatatacttttgggtgtgcatatgctgcccatctataatcgtatcaattatgaaataacgccaaaatcgattcactgacggattattttgtttaatttctcctctgttgatgatgttatacacgttttgtttgtgtgtcatgtcctctatattgtcagagtctcaacgcccttataagatgtgtgtctataagtcggtgttgtggagactcccttgtgagtaaaccaagtcaaactgagatagatttgcatacagtattatatccatacaaccacgcccactccgcatatacctaaaattatcgtctatgtatattcgttctatctgcataatgctacacatatgtctatatatatatatatctatctatgtatgtatgtatgtatatcgcgccagttgtcaatgttgttgttcacctcaaaatgtttctcttactgtaattaccccgctaacccattgtcctaacctctgacccctgaccccaaactgttggctaatggctttcggttatggctttgttgtcttctgttacggcctccgcttgaccatctaaactataaaacattcgaaacgaaagtaactaatgccacccagaatcactaacgaatcatctatcgaaaaaacactgactgacccagttgttgtactcttcactaaaaaataacaaccataagaaaaggactaacactggctgtctacgatccgtgttgttgttcctcctttgtgcgaggaagtaaccattaaccattaggctatagttcaccaactgctaaccacgagtcgaattaacaaaaaaaaaaaaaaccataaacccctgctaatttaacccgtggcgtgtgcacctctaacccaaacacgaagccaaaagaaagagatcgatccgcattgccgagtatccagatggtttaatccgtatcctttgccctctctctctctccctctctctctctctgtctctctctttctgatgtttagctgcgcaaacaaagtcgcttcaacgcgcgcaaaaagttccaattcgccatactcgtgatacgggccatcattcggatacggcgcctacgcttcaccgccgagccgctgcacgttgaggaggccatccgggatccgtatcgcgtcaaggttctgcgcaaaggtgagttgctacaacaattcatatatcgaatatagtacactaattcaacttttgttgtaggtcatcgatggctgtgccttccgtgtctacgggcattgggtcaagaagggtgagggccagaatcgggccgccctcttcgagaatactccccgcacggagctccacgcgctctacatcaacaatctcagccgatagaaggcggtcgggcatggggcatgggccatgggccatggggaatggggcgtggcggagtcgcgctgatctacacaagcacacacacacacacacacacagaaagaaagaaaaaagaaaataagaggaaacacagtaagcaagaaaccaagaaacaaaccaacaaacgaattagcaaaagctactactatgagaagcaggaaattgcgattgcaacaggacacaccaaacacaccaaaaaggattcaatccatccatacattcggattcgcctcgttctggacggacagccaacacgcaggtgtacatatatacgtatgtatgtatgtatgcatgcctagtaacattacctcccctgccttcttcgtccttgtgattttgtttaatactttttaattcgattttattgcgtctaatgcgcgccagccatctagtgtaatcagttagtgtagtgaatgtagcgttcaaccacggccatgcataccacccagatggtacatggctatccagtggtccaacgttatgacccggcgccagaacgagccgaatcggatgacgagatgcgattgattgttgggttgggggaatgtacacacctcatctcaccatactccacacccaactaagcccacacaagcaagcgtacatgcatatgtattttctgttaatgattctattaaattatttaattgtattgctaagcgtttacattttaattgttatgttgtagtatacacaataaataaaaacaaacaaaaaaaaaaaaaaagaacgaaataataagctgaaaacaaatccattgcccattgcctcctagttagttgagcaacttaaggattatggcaattaataatggcttaagatgttagatgtgcttgtcgcaattgtatttccgctcgcagcaagcgggaaattcgcgattgatgttcacaaagtcgcgctgcttgcagcccggtggcggagcgactgcatcgcaggttttgaaggtcaccaagccatccgc

SEQ ID NO: 2522 - DNA, 1940 bp, DROSOPHILA
ttgcactagcaatttaatccgaggaatataaattttgtgtggagttatgttcgagacgtcgttgccagcgattcaagaggcgagcggtcacacgtttggcattcgttattaattaaatcagccgccaacagctgagcgagagagcaatcgagagcgacaggagaggatccacttccaatcgaatcgggtggaatcgaatagcaggggcttgattccaaactgccgtttcggcagccggcaagatttcacgaaatctaatggccaaggacgaggaggatgatctgctgcccgacaaggatgcggccaagggcttctatgccaaatacgagcccaaggagattctgggcaggggcatcagttcgaccgtgaggcgatgtatcgaaaaggagacgggcaaggagtttgccgccaagatcatcgacttgggcgccaccacagagtcaggcgagacgaatccatatcacatgctggaagcaaccagacaagaaatctcaatactgcgccaggtcatggggcatccctacataattgatctgcaggatgtgttcgagtcagatgcatttgttttcctcgtcttcgagctgtgtcccaaaggtgaactcttcgactatctgacctctgtggtgacgctatccgagaagaagacgcgcaccattatgcgacaaatctttgagggcgtcgagtacatacacgcgaagagcattgtccatcgggatcttaagcccgagaatatcttgctggacgagaaccacaacgttaagatcacggattttggcttcgccaagcagttgcaagagggcgagaaacttacaaatctgtgcggaacgccgggttatttggctcccgaaacgctcaagtgcaacatgttcgagggatcccccggctactcgcaggaagtcgacatatgggcctgtggcgtgattatgtttacgctgctcgtcggttgtccacctttctggcaccgcaagcagatggtcatgctgcggaatatcatggagggcaagtacagcttcacctcgccggagtgggctgatatttcagaggatcccaaggatctgatacgcaaatgtctagtcgttgatccttcgcaacgtataaccgtcaaggaagtattaagacatccattcttcaaccaaatggtgttaatgggtgatcgccggcatccggccccgcccatcgcgcccgcccaaacgaacagcaggcatctgctgcaacccgaggcgtcatcgtatcgctttggtcagctgaacagtagttgcgccggtgcccccaattatctgtactgtgcgccacagagctcctactcgtcgaatcgaatgcgcgacggggcgctggacgatgcgggtgccagtgctgcatccgccacctgccatgtcatgtcgccatccaacgcctccaattcctacgccaccaacaccacagccaacacctcgaactcggccttggcatccgcctcctcccacaaaacgctcacggcgatggtctactatcagcagcaaccgcagcagcatcagacgcagcagcagcagcaacagtaccagcagcaacagacgacacagctgccggtgcagctgcagttgcagcatccactattgcagaccggtggcgatggcaagcaatcggtgtatgcacctcctacagtgcagctgcgcaaacaaagtcgcttcaacgcgcgcaaaaagttccaattcgccatactcgtgatacgggccatcattcggatacggcgcctacgcttcaccgccgagccgctgcacgttgaggaggccatccgggatccgtatcgcgtcaaggttctgcgcaaagtcatcgatggctgtgccttccgtgtctacgggcattgggtcaagaagggtgagggccagaatcgggccgccctcttcgagaatactccccgcacggagctccacgcgctctacatcaacaatctcagccgatag

SEQ ID NO: 2523 - protein, 560 aa, DROSOPHILA
MAKDEEDDLLPDKDAAKGFYAKYEPKEILGRGISSTVRRCIEKETGKEFAAKIIDLGATTESGETNPYHMLEATRQEISILRQVMGHPYIIDLQDVFESDAFVFLVFELCPKGELFDYLTSVVTLSEKKTRTIMRQIFEGVEYIHAKSIVHRDLKPENILLDENHNVKITDFGFAKQLQEGEKLTNLCGTPGYLAPETLKCNMFEGSPGYSQEVDIWACGVIMFTLLVGCPPFWHRKQMVMLRNIMEGKYSFTSPEWADISEDPKDLIRKCLVVDPSQRITVKEVLRHPFFNQMVLMGDRRHPAPPIAPAQTNSRHLLQPEASSYRFGQLNSSCAGAPNYLYCAPQSSYSSNRMRDGALDDAGASAASATCHVMSPSNASNSYATNTTANTSNSALASASSHKTLTAMVYYQQQPQQHQTQQQQQQYQQQQTTQLPVQLQLQHPLLQTGGDGKQSVYAPPTVQLRKQSRFNARKKFQFAILVIRAIIRIRRLRFTAEPLHVEEAIRDPYRVKVLRKVIDGCAFRVYGHWVKKGEGQNRAALFENTPRTELHALYINNLSR

SEQ ID NO: 2524 - DNA, 7737 bp, DROSOPHILA
cagacttttcaacgcaggcacgtgccattgttttaatctgttttcggctcttggcttccgatagtcatgtacccctgctgttacataaccaagggtcatctaattgggaagaatgcggtattaatacggggactatgatcctggttacatccaggcagatggttatgtccatgtcgtggcgtgtgtgtatgtatatgcacaagttccgcggatctcaaaggtacatacatgcatgtaaaaaacaaatggcttgcgtgtgtctgtgtgggtgcgtagttattgaagaaaaaagcacaaaaacactaataaagcgtcggcctgtctggcttatctggccaacaaaactaagcggagtgaccaaaataacacggaactgcgagcagcgacagtcagctgtccggatatttttacccggagtctcggagttgctggccgactggccgtggagccccacgctttctgtaccttttattttgctttagtgtcgccccaaaaaagcagcctccaaaatccctcgctgcttttgcttctgtcgttgcgtttgtctttgcttttgcgtttgctttgccactgctgctctgtctttgcgttcgttttgccaacggattttccgaacttcgagcgatttttccgcgattgcgcagcgttttaccgttacacgcggcactcgagcgccagaaaattccaattgttattctctaattttacgatttgcgtatggaaatcacttcattattttggtttctattttctttcttctcgccagtgtgaccagatgccgaatgcgctccaacacccaatgctgtctacctaacactacttcgcactaaaaaataccgaaagtatcctttcatattcgaaagctaatccgaaaattctggaactccgaaatcctgacttttgaaaatctaaagttagtgaataaatgttatgcaaaggcttgcagttaagatatgcaattacttaatgtcattagcccgcgcaagaaaaacagacacttgaattggaaactatagtttattttgtaagttaagcgctgaaataaatcaattgtaaatgtacacattgttagtcggcggcggcgtgcttgcctgggttctaatttgtagttctcttgctccgataatgcgaagaaaaccgacaattgcttccctcgctgtagggatactttttaaagactaaatcactgcgttgcagaatcatcataatcatcataatcgtattgtataatccggatgccgtgccgttggctttcggactggcgtaataaataaacttgcatcgtttgcgttttaggtgctacgtaaaaaatgatagaacaaatgcggggagccgcatgcaattcggatagctcccccttctaaccggacagatctccctgatcgaagatgccctggtcgtagagctcggccaccactctccgaccgccgaagaaccggccgtcgagtgcctccttgccccgcatggcctccgctcctgccgagaactccacgaagatcttcacgatgatctccgcctcgtcgtcgtcctcgttctccgtctgcttctcgttgaagatgatcacgcgactgacggtgccgaatttactgcactcctcctggatctcctcctgcagggtctcgtccacatcctcgggtccgaccatatttcgcaggatgattacacgtgagtccaccggccgcatcagtcgctgcattaccaactgccgcgcgctctggcccttgatggacatgttctcctgctgctgcagcgtctgcacgtcgccctcatccatcagcttcttctgcagctcctcctgctgcttctcgtgcgccttcttgatgttctccgagagatttgctgccgtgacagcggcattgtttgcagcggcagagagggcggcagcagctgcagctcctttgctggcctccgctcccgccagagtggccacagtgggcactaagcccacgccaacgccgccgaccgtcatgggcagggtgggtgtggccagaagggcgggcggcggaagagtgggcactaccgcctgtagaggttgcaggccagcaggaaccccaagcaaactgggagccaccggagttggtgcctggaatattccgggcggcagaagagcgggagcggcttgagccaaagcaggatgcagagcagccgcggatgtggctgccgaaaccactggcattgcacccaccttagtgaccactgctccagctgccatgacaggagtgttctgcgacaaaccaagaaccgcattgctggccaccgcgtccagggcttggatctttgccgttgctgccgctgcagccactgccgcagccgtgggcatcgtggagttcgttgtgggacaggccagggcattcggcggcgtaatagatcgacccactctgttaaaaaagcatatgcattagatattccgcacatacttttctaagcgctacacactcacctcagaagctggcctcccaaatcaaagagattcatgctggcgattgcctcgtccatggcctgtttgttggcgtactcgatgaagccgtagcccttgtgcgtgtgaagggaagtgccctgggccagcttgcagtagaggatcgggccaaaggcctcgaagacgctcttgatgtcctcctcggaaaggtcgggatggatggaggccacgtagatgcggttgaagctcttggcctcctcctgcacctcgtcgatcacctgctgcgcctgtggcatgttactgggtcggcctaccttgatgttcctgccccccatcagggctccgttcatctgttccagcgccagctgtgcgccctccggtatctcatactccacgaacgcgaatcccttgtgcttttgcgtgatgggatcccaggacatgttgattgatttgatggggccgaagggagtgaaggccacacgaattgtgtcctccttgagctcaaacgaaatgctgcccacgtagactctaaagaggaagggaaaggcgctgagttagtggtactcaatgtttaggagagattaaagtgaaaggagtttgtgtggtcagatcttatcagctaagagcgcacagtgagtggagcaccatcgactgcatccagtaacgcggagctgcagcagtgggatccaatcttcgcaagacagatttacagagtttacatcatggcgttcatccagtggaactatgttcaatactactaactcctcaactcacctgcacatgagagccagtgcctgttgtcgctgaacctgcgtgcgctgagtggccaattgctgctgttggtgggccagtgtctgcttcatcaacaccatcttgatgctctgctccatggcgtacttcttggccttgctgaccaggtcgtgctgctccgaggagagcttgggcagggcgccgcccaggaggccgaggagcgccgaacgggtacccggaccgaacttgacatcgcccgtctgcttgaggtcgtacaggggctgcgaaaggtagggaattttcgaatccgtggacttgcctagaattgggaagagggattagtgcatcttatagtgggaggggattcgtttcagttgatcatcagctatgcaatttgattgggattcgattcgattcgacttttttcatttgacttgttcgatttttgattgattttcattctttggtttttttttttttgtcttatccgaaggcaaagtgggtcagacaattgacaattggtcaagagattgcgtttgaaaccgcttaaataaagacaaaaactgcctgctgcctgcaagaaagatgaagacaaaaaagaaaaaataagaaaacaaattgttaatcatatagtggctccacgagcggatcatttgggtttttggagcgcgtgtctatcgatgggcagttgctattatggtcacaatcattttttttagttgtttttttttttcaatattagatactgcatacttaaggttaatgctttcgctttcttgttcgatttgcgttggatgagagagtctatgagtctatcgtttatgcagaggggcttgagtttttgtcatttatttgtcaaggctggaaaatgcaagaataaaaggagagagctcccgtcaaataaaacatattcgcttatcggtaggcaattgattgagatacgtagtgtatgtgatgtgattcaagtgtgtggataatattaaatatacataaataggagttaatgtgtgtcgagtagtggtggtgtgtagtgtgtatgcgtatcaaatcaaaattcatccgccgacacacaaaccgaactgggcacacggcgggacatccgggtaatcccgtccagaaagaagcgcgcgaattggccgaactaacgatcttgcgatctcccaatctcgcgtgtgcccagctccgttctggcgagtagtttataaaaattagaaattataagcaaccttaggtgcggtttcgtattcgtattcgtttcgtaatcgatttccatgagttggggcgtggtaactgacttgaagaagggtcacacacattttacattgctcagagtgataaaaagagaaaaataaaaaaaagaaaacaagacgctgaaacgataataagagcaacaatatgtttaagttggttagcttctccaccgccctacctacatacaaaaagctgtcatcttctacccacggttaatgattcgcatacgagaacaaggctcgtgagttagtgattgctagatgcggatggcgatcgggaagatcgggcgattggcagcggattgagcgggattgagtgtttagtaccccaccaattgctaaaatatacggacgcatgactggacggacgtttgatttgatctgctagctagctaggacgacaaaacacaaaatcattggtacttaatgtaaaatgcaaccaggacaggaccggagccagactcagaatctcaaacaggatcaggatcgggatcgggatcgggatcggtccccgatcggctggcggcacacgacgacgtggtggcgaggtggttagaagcggattaatgtcgatgttctggttgggctgttttgtggctgatattgatagtagtagtagattggtagtggagtagtagtagtagagtagttatctaattggtcatctctctttttcgatctcgaatacccgaacctcgatttcgatcttgataaaacttagtcataggcggaacaaacttaaaaggagttaaaacgcttacgagaactaaaaaagagaaatatagaagaaagagaaagagagagataatagttatacatatatgcattttggattagttctggcgatccgtcgactcgtatattaacgtattggttttgttttcaggaccgggacttggactcactgatgccctagatttatgaacaatacgcatttcattgcgctttctcgcttgcattcgctttcgttatttagcacatgtatgtatatatgcttttgctctatcgactggggatcgcgcccttttcgacttttggcgatagactgactctcaaatcgatttgtttgactctcacctcacctcacacctcacagtctgagttagagttcatcgtgcgtttatgaagtctgcaattacttaagcagaacaaaaagaaaaaccgattatttagtggcgtcagtgctgcccctggatgcaacggagtagtagagtagagtagtagagtagagtagagtagtacaagtacaagtgggagagaaaatataagatgtgcttatgttttatgcttggacaaccaaaaagatacaatacaatttggaaggccggctcctcgaggattccgtattccgtggactgttgcactgtcgattgaaacctacgtgccacatatgtatgtatgtattgtaagtgtcaagctcattcattgccagacacacacaacatgtttttgggggcgatgtgctgatcgccgcggcaatatcattccatcatacatagttatttatagacaaacagctgggaaactcacccgaatcggaacgcgttcttttggtggccggcatgtcgctgatctcgcgctgatcatccgaacgcggcgatctcgatgctctgtcgttgcttccctgtaacagaagtcgagtaacaccgggttagaaggtggttcgaatattgaatttttctagatttagagagaccctagcagagcatttcactacctaagtaaacaaacagtttgcaaatagataaaagataacagataacctatcctaaataccgaatgatcatatgctatatggtcagaccctttccctttccacccccaggtaaaatccgcatgtgggaccaaagggctgtacttccatttccacttccatggagagcggcgaatcggaggtgcgggagcgcgtggtgttaattcggatgtgtatctacccgccggagctggcagctgtgacgtcgtagtcccaaatggaggcaaggtcacgacggggtgctccgcggaaacctccacccgtcgccacccacatgccccttaacccctaatgccgcccaagagcggtcgctgcaacgccactgtgaaagttccgaaaaaaatgcgcaaatttcacgggaaaacgaaagacgcaatcttcggtttggtgcgagttaaaaagtgtctgctgcggagcaagtgagtcgcgtttgtctagtactaaccattttcgcttttttccagttattctagtggcgatttcttgtccacaactcaacgatttgtttaattttatacgcttgcaaaaatttttgtcaagatggatacgaactagtggtggcacttcgcgtcgattgcctcactcttcgattattcgatagtaaagttgagttatctggctactctaatagccgataggttttgagtaactgtggggaaattgtcattttaaaatgtaatctcgataaattacgatcggttataaactttttagctggctgtgcaagcaattccacactgtcaatcgaaaaatccccgagttaagcgcaagcgaaactcagcccgaaatagattagtttggctaacctagtgaagttcatagttcagaagatgcaaagcagtgtatgtatagtgtatgtagtgaaaaatggaccaaattgcattgcagaaaaaaaagtgccacttcttaacatacattttggaaagattacgttctcgagtgactaatgtcaaactgcacgtaagcacaccagtttttcaattacaactgcatttagtttttctttattcaacccttctcttaaggactacgactaaaattaaactatgcattaatatttacaactctcggtctttctgtgagagttttcccctctgttttttggttctttttttttctgaattttctgcagtgcatagactgtgaaaaggtaagccagataaggcaagatattgcccatttgaagggggattttttttcttttgttttagtagcgaatattttttcacaacttggcgaaacaggaacttgcacaatgacgcacttgatagagttaattacaacagatccggatgcaatcatcacaatcgcaatggtcttgcggccgcgtaatccgtttttaaagctaatgtcagtcgcgcgacttgcattcatttcaacatgacgtattcaaagtgaaaccgaatcaaaaattaagaagttaagaatccaaaaatgttgctgcttttagctaaaatcctaattgtggcgtaaaatgatcctacgaataaattaacgagaccgaagatcgctaagtaaaaatgttgcttcggcttaagtaaatggtttggtttggcgagtgttaagtg

SEQ ID NO: 2525 - DNA, 2455 bp, DROSOPHILA
cgaagtgccaccactagttcgtatccatcttgacaaaaatttttgcaagcgtataaaattaaacaaatcgttgagttgtggacaagaaatcgccactagaataactggaaaaaagcgaaaatgggaagcaacgacagagcatcgagatcgccgcgttcggatgatcagcgcgagatcagcgacatgccggccaccaaaagaacgcgttccgattcggtaattgcagacttcataaacgcacgatgaactctaactcagactgtgaggtgtgaggtgaggcaagtccacggattcgaaaattccctacctttcgcagcccctgtacgacctcaagcagacgggcgatgtcaagttcggtccgggtacccgttcggcgctcctcggcctcctgggcggcgccctgcccaagctctcctcggagcagcacgacctggtcagcaaggccaagaagtacgccatggagcagagcatcaagatggtgttgatgaagcagacactggcccaccaacagcagcaattggccactcagcgcacgcaggttcagcgacaacaggcactggctctcatgtgcagagtctacgtgggcagcatttcgtttgagctcaaggaggacacaattcgtgtggccttcactcccttcggccccatcaaatcaatcaacatgtcctgggatcccatcacgcaaaagcacaagggattcgcgttcgtggagtatgagataccggagggcgcacagctggcgctggaacagatgaacggagccctgatggggggcaggaacatcaaggtaggccgacccagtaacatgccacaggcgcagcaggtgatcgacgaggtgcaggaggaggccaagagcttcaaccgcatctacgtggcctccatccatcccgacctttccgaggaggacatcaagagcgtcttcgaggcctttggcccgatcctctactgcaagctggcccagggcacttcccttcacacgcacaagggctacggcttcatcgagtacgccaacaaacaggccatggacgaggcaatcgccagcatgaatctctttgatttgggaggccagcttctgagagtgggtcgatctattacgccgccgaatgccctggcctgtcccacaacgaactccacgatgcccacggctgcggcagtggctgcagcggcagcaacggcaaagatccaagccctggacgcggtggccagcaatgcggttcttggtttgtcgcagaacactcctgtcatggcagctggagcagtggtcactaaggtgggtgcaatgccagtggtttcggcagccacatccgcggctgctctgcatcctgctttggctcaagccgctcccgctcttctgccgcccggaatattccaggcaccaactccggtggctcccagtttgcttggggttcctgctggcctgcaacctctacaggcggtagtgcccactcttccgccgcccgcccttctggccacacccaccctgcccatgacggtcggcggcgttggcgtgggcttagtgcccactgtggccactctggcgggagcggaggccagcaaaggagctgcagctgctgccgccctctctgccgctgcaaacaatgccgctgtcacggcagcaaatctctcggagaacatcaagaaggcgcacgagaagcagcaggaggagctgcagaagaagctgatggatgagggcgacgtgcagacgctgcagcagcaggagaacatgtccatcaagggccagagcgcgcggcagttggtaatgcagcgactgatgcggccggtggactcacgtgtaatcatcctgcgaaatatggtcggacccgaggatgtggacgagaccctgcaggaggagatccaggaggagtgcagtaaattcggcaccgtcagtcgcgtgatcatcttcaacgagaagcagacggagaacgaggacgacgacgaggcggagatcatcgtgaagatcttcgtggagttctcggcaggagcggaggccatgcggggcaaggaggcactcgacggccggttcttcggcggtcggagagtggtggccgagctctacgaccagggcatcttcgatcagggagatctgtccggttagaagggggagctatccgaattgcatgcggctccccgcatttgttctatcattttttacgtagcacctaaaacgcaaacgatgcaagtttatttattacgccagtccgaaagccaacggcacggcatccggattatacaatacgattatgatgattatgatgattctgcaacgcagtgatttagtctttaaaaagtatccctacagcgagggaagcaattgtcggttttcttcgcattatcggagcaagagaactacaaattagaacccaggcaagcacgccgccgccgactaacaatgtgtacatttacaattgatttatttcagcgcttaacttacaaaataaactatagtttccaattc

SEQ ID NO: 2526 - protein, 545 aa, DROSOPHILA
MEQSIKMVLMKQTLAHQQQQLATQRTQVQRQQALALMCRVYVGSISFELKEDTIRVAFTPFGPIKSINMSWDPITQKHKGFAFVEYEIPEGAQLALEQMNGALMGGRNIKVGRPSNMPQAQQVIDEVQEEAKSFNRIYVASIHPDLSEEDIKSVFEAFGPILYCKLAQGTSLHTHKGYGFIEYANKQAMDEAIASMNLFDLGGQLLRVGRSITPPNALACPTTNSTMPTAAAVAAAAATAKIQALDAVASNAVLGLSQNTPVMAAGAVVTKVGAMPVVSAATSAAALHPALAQAAPALLPPGIFQAPTPVAPSLLGVPAGLQPLQAVVPTLPPPALLATPTLPMTVGGVGVGLVPTVATLAGAEASKGAAAAAALSAAANNAAVTAANLSENIKKAHEKQQEELQKKLMDEGDVQTLQQQENMSIKGQSARQLVMQRLMRPVDSRVIILRNMVGPEDVDETLQEEIQEECSKFGTVSRVIIFNEKQTENEDDDEAEIIVKIFVEFSAGAEAMRGKEALDGRFFGGRRVVAELYDQGIFDQGDLSG

SEQ ID NO: 2527 - DNA, 3487 bp, DROSOPHILA
cagctttttctcctcgatggctgggcgaggagtgtcgacgttgggtttggcgtacgccaaccgctcgtccttttctggcgaaccggtgctgtgtgactttgtggggctttcgccgtcggaggacgccgagccggtagagttggtgtgctgtccgtactgatgggcgtcatcctcgtcctcaggctcctgcacctccagcatttcgtactcctccacctcctccatgggtacttgatcactgcagaatagcagtagaaattttgttagtgtttcacggttagaggactatttacgccacttacttctcctccttgattgagattttaggctcctgatggatctgatgcatcagactgaagagcttccacgccgaattgccctttagcttttcctgctcgtacttcttttggagcactatgaagatggagcgcgattcgtgcacagagagcttgttgagacgcccgatcctggcccacgcctcctcctgctcctgcttgctggcgccgccattgtttggatgcagcaccttttctttggcgatgtcctgcagaatcttgtccagttggattgccatcttagtcagcgacttgcggcccgctggttgcgcgttcctgataattttggaggctgttttgataacacgcgacacacgaattggtatatgtaactaggatccgcttgtttttctctccgctttcgcaccgttcgcttctcttttcttctgtatttggcgtcggtaaattggcggaaaatgtgaccgtgcaacacgcaaatactagaaatgccgccttttggtacagtaacttagggatgagggagattttggcaacatagatgttcacagttcacagctctcgatgcagtgaaaattaaatttttatatattatatttatcactataaatattaatacttgcattatttttacttatataacaattataatgtttctccataaggaaaagttattcattttggtagtcataactatcgaaggaatggtttttgttttgtctttttctattctattctcatactttatttatttattttatgtaaggatccttacatatcgataattcttaataccgctaatttacggtaaaactacccgtctatcttgctgccgatagggacaaacaaataacgcaatttatattgcagatgagaactccacgaaatttaaattttattgaaatacgttacagttttcgccacctcacaacgccacgatatttactttgtcctgaccacctatgcatttgaccgtttccaagcgcgtaggcccatccgctccggctggactgctaaccataaaggggaattcggccaggccgtagcaggcagcgccataattacccagccgatctacggcgatgagagcacccatgaaatccttgtggtgcttgagaatgcggcgaaggccctcttgagctgcctcagccggaggttttcccgcccgcatggtctccaccgctagcagggagggcaggaagcgcatcatcacatctccatctccggttgccacggctgcacccacctcgttgtctgcataagcgccagcacccggaatgggggagtcgccgacccgtccgggaatcttgtgccgcgccccgttggtggaggtgccggcgtggatgttgctttccacgtcgatggcgatcatgccgatggtatcgtggttcttgcgtccgatctcatactcattgcgggcacggtcctccttccagcgggtcagcggagtcggccgcggcttatacgggccgcaagagaccttgggatccgggtgaacgttcttccagaagtttggctggcagttctcagccgtccactgtaaccacatgtccttcgactccggcgtgaccagcgactctgattcgaatcccatagcattggcgaaagctgacgccgcatcacccaccagcatggtgtgctgcgtgtgttccagaacatgccgggctaccttaatggcatccttaatgcgtcgcagaccagccactgcccccacatccatggtggccccgtccatgaccatggcatccagtgtggtttcgcccaactcgtccggcgatccgccatagcccaccgttcggtcacactggagtttctcacacttcgagcagccctccactaccgcattccgcgtctgccggagtccacccttgctttgcttcaggattcgccaggcgagcacattggcagccgtgaagttccaagtgttaatgaccatgggcagcagctcacccgtcgtcttattcgccttcacggcagtggtgccagcttttccactgcaaaggggcggatcttagcgaacaaagaatacgctgtatgcgctgctcacctaaacgccgaagtcagcgttggtttgggcgaagtatttactgccgcaaggatggaaaacgccatggtggccaaacaaaggatccaaagacttgcccgcaagtgccttctcatggttaatcgtaatggtctctacgagaagtcttggtgtatcacaatctgtccctgttctgccggaaaatggtcgagttctgcttttaaatgctagcagtctaacctcactgttttgctttcttatctgttgttttgatataccctctaaaagagtcgtacacattttcaaattggtttaagcaatattttaaaacttgaaaatgtttcaacatagattaagatataggcaaaaaaccacctattaatatcgataaagtcctatccgtatagcctatatttggagtggaattataggaagagtattccacggacacatctataaaacactgctttcctttttgtaggcacagcactgacacaactaaacaagacaaacttgaatccaatcaatgaggaggcacagaacccgcagaaactgcaattcagatcatatggatttcagtgccgggcacttcaagaggagaaccagatagtaatccgatgcctagatgagcagaacaacagcagggaagcaatcttgcccaggcgggccgtaaaacagttgttgccggtcgctgattcagatgatatgaccattctacttcgtactcccagagcggtggagctttggaagtggagtaatggcaattactctctatcaagcaggctgatagatgggcaggtggagcaaatggctcttagtcaaggaggtgctggcatagagagcggatatgtggcgctgatggcttcatcgccagcagcagagattcggatttacaggtagatattcataagcacttcacgcatagggcatttacaaggatttcactcgttttgcagcttcggcagcccagacacgagcagcttccaactggaccaagtcctggagctcgaggactcccaacagtcgcgggtaatgcgctttatgcacctgcccgagtccgacgatctactgctctgtgtgtccaacgtactgccgcagcaaccgcttcgcatctaccagcaccgcggagcagcgggattccagcaaatcctcggcgacagcgccttgccaa

SEQ ID NO: 2528 - DNA, 1434 bp, DROSOPHILA
ccaagacttctcgtagagaccattacgattaaccatgagaaggcacttgcgggcaagtctttggatcctttgtttggccaccatggcgttttccatccttgcggcagtaaatacttcgcccaaaccaacgctgacttcggcgtttagtggaaaagctggcaccactgccgtgaaggcgaataagacgacgggtgagctgctgcccatggtcattaacacttggaacttcacggctgccaatgtgctcgcctggcgaatcctgaagcaaagcaagggtggactccggcagacgcggaatgcggtagtggagggctgctcgaagtgtgagaaactccagtgtgaccgaacggtgggctatggcggatcgccggacgagttgggcgaaaccacactggatgccatggtcatggacggggccaccatggatgtgggggcagtggctggtctgcgacgcattaaggatgccattaaggtagcccggcatgttctggaacacacgcagcacaccatgctggtgggtgatgcggcgtcagctttcgccaatgctatgggattcgaatcagagtcgctggtcacgccggagtcgaaggacatgtggttacagtggacggctgagaactgccagccaaacttctggaagaacgttcacccggatcccaaggtctcttgcggcccgtataagccgcggccgactccgctgacccgctggaaggaggaccgtgcccgcaatgagtatgagatcggacgcaagaaccacgataccatcggcatgatcgccatcgacgtggaaagcaacatccacgccggcacctccaccaacggggcgcggcacaagattcccggacgggtcggcgactcccccattccgggtgctggcgcttatgcagacaacgaggtgggtgcagccgtggcaaccggagatggagatgtgatgatgcgcttcctgccctccctgctagcggtggagaccatgcgggcgggaaaacctccggctgaggcagctcaagagggccttcgccgcattctcaagcaccacaaggatttcatgggtgctctcatcgccgtagatcggctgggtaattatggcgctgcctgctacggcctggccgaattcccctttatggttagcagtccagccggagcggatgggcctacgcgcttggaaacggtcaaatgcataggtggtcaggacaaagtaaatatcgtggcgttgtgaggtggcgaaaactgtaacgtatttcaataaaatttaaatttcgtggagttctcatctgcaatataaattgcgttatttgtttgtccctatcggcagcaagatagacgggtagttttaccgtaaattagcggtattaagaattatcgatatgtaaggatccttacataaaataaataaataaagtatgagaatagaatagaaaaagacaaaacaaaaac

SEQ ID NO: 2529 - protein, 393 aa, DROSOPHILA
MRRHLRASLWILCLATMAFSILAAVNTSPKPTLTSAFSGKAGTTAVKANKTTGELLPMVINTWNFTAANVLAWRILKQSKGGLRQTRNAVVEGCSKCEKLQCDRTVGYGGSPDELGETTLDAMVMDGATMDVGAVAGLRRIKDAIKVARHVLEHTQHTMLVGDAASAFANAMGFESESLVTPESKDMWLQWTAENCQPNFWKNVHPDPKVSCGPYKPRPTPLTRWKEDRARNEYEIGRKNHDTIGMIAIDVESNIHAGTSTNGARHKIPGRVGDSPIPGAGAYADNEVGAAVATGDGDVMMRFLPSLLAVETMRAGKPPAEAAQEGLRRILKHHKDFMGALIAVDRLGNYGAACYGLAEFPFMVSSPAGADGPTRLETVKCIGGQDKVNIVAL

SEQ ID NO: 2530 - DNA, 8256 bp, DROSOPHILA
gcctttgagcaaaaacattcttatatatttagttataggagttagacttattctcgtcaatacaaaaaagtttgtttcttagcattgttaattattgttcttggaatgaggggacggggtgaatgggtcgagaatcgataaataataaattagatttaagcactaacatggaatacgtttatctatataattatggaatagatatacaaatacatttatatacgctgtttatcaaaaaatatttaaaccacaatttttctagttaaagttcttttcgttccttttgtcttttttttgcgggtgggatctccctctctcgaggattcttcagattcgttcgtttttcgcatcaacatcatggcacaagtttcttccttctctctttatccgtctttcgctatctctttcgcaatataactttatgtcagacaatagtgggttaaacaagtatttgcttagctttgcttctagttcagtttttttttttaggttagtcgagacagttgttaccctgtaatcttacatactataattattcgcttggtttatacaatccgtgtaaatattgcaacttattggtttttcattcctatcaggcacttaaccttcgttcagttgaaacttaaaatcaaatgttggaatcaaaaaaaaaataaacactttcgtcggaatgttgatcttgttatgtgcgtataacagttgcgtttataacagcggcacagttcactggttcttaatgttacattacactttaaaagtcattatgtatttaaaaaaaaaagtgcctctacatgtcgtggaaatttaattccgtacgatacaaatggcgaatggttggttatagaagttacaacagttatatccttcaaagatttacgctaattacgacagtttgtttgtagaacattaagctgcttacaacagcttcctgagtggaaccacaacaaactgcgcacaacacttgacaatcgttaatagagagtatggctacttcgtctagctagcagcgcgtattgaaatgcgtgcgaactggcggcgatggagctgctcgcctcctccgttcaccgaccgccgaattcggtgtgccggaggatccgatggtccgatgaccatttaagcttccagccgctgttcctgccgcacaaccggctcctccgacggacgaggccgtcgctgcggcctcctcgcgcattttctgcttctgatcggtgagtcgagcgcccaggcgatgcaccttttccggactcaggatattcaggcgcgtcgtcttcgaggattgttgctgatgctgctgctggtgagtggcggccgctgcaggtgcaaagtgtgtgtaagtcttgatttgtataaaattgttggttatgcgcttaccatttgtcagtcgctgcgccgtggcggctgtgtgcctctgggccagatgcttggtgggtgatccgggcctgctgctcctcgtcggcgagacgcaattgcttgcgggaatgccttgactgcccgtgcgacttggcagtggcttcagtgtcttccctttgttattgcacattggcaggcgatgattgctgctcgttcgctgctgttgggccgacggaagtggcaaagttagcttgtgcttcttcggcagccagtctgatgcggatggtggacaactactattggtattggtcgttgtggtcacatttccattgctatttaatgcgacacttatgttaaggctaggcggcaggaaaagtggcggattgctgctctggccgcctttggtcgttgctgtggctttgctgcgtttgggtgctggtgtggccagctgtttggcaactccgctggaggccaggtcctctagggactcagcatgctgtagtttttgcccgacgattgccactggcggattctttcgaccgaaaatgggcgtctgattgatgcgctgcgtacgtggtggtggcggtgggcaattgttgccaccattcagggctgcagcctcgtgctccaggcgctgaaacatcttaagggccaccggtggggttttgaaaaagttcttcatggagtgctgcgactggttgaagttccgccgactagcctcctccaaatgctcgaatttgctgcggcactgattcaggcgggtgcgcatatcatcgatggccagacgatggtgttgtgactcctggttgctgggtttatttgtgctctcctccaacagttcttccttgcccggtttcactgtattctcatcctcttgcgctgctggcagattatttacatcatggtaatttaggctagtatcgcaactggagtccacatcggaataggtgttcaaatccctgacatcctctagctgcaattcggcaccggcacgcagatccaccaggtaacctctttcgccaaacggacgacatttcttcagcgccttcttcaaagccctttccttggactccgtgtcgggcgtgagattacgacgctcctcctgggcgcccaagaaacgttggcgacgcctggcccgcatactgtcacgcagtctctcgccgctgggcgagaaatccttgccgagatgcggagatttcggtatatcctggggcttaatcaccatattctccttctctttttctaccggcgaaatttccgaatccaccgcactcttgaccaactcatcgagattatttaagctgcgctgggaggtgggtgacaaggcgtcctcagagctggcgtaccattcctgaaaggtctcaatctcgtgcagcagacgctctggcggcacacgatcggcggccagatcatcggcgagacgctgcagccaaacgtgcagagtttcgaaacacggacgcatatcgggattaagatcacagcacacgaaggccactttaacgaaaggctctggacactgagcgcagaacttctcgcgaaactcctgctgattgagactgaagtccgaattgcgaggcataaaatccggatcggcttccacgcgtccaatgatctgcaaggcaggtggcaaataagttaaagataaatcggtcaataaaatcatattatcttaatctcttacctcacacaacataatgccaaaggagaagacatccaccttttcgtcgtatttgagacctttcatcatctcgggtgccatccagtagggattcccgaccaccgtgtaacgttgccttcgctgcctgctcttgctgcgccttagtgttccactcggtgacatgggcgcatcgctgttagcgcctgatccatagccgcctggcgtcatattgccacttggcagccgcggcgcatccacactgcgagctagtccaaaatccgccactatgaccgagcgatcttcacggaccaggcaattcattgagttcaaatcgcgatggatgatgttcatcgagtgcagatagctcatgccgcacgcaatatccctggccaagcggacgcgctggggccaagggagtacttgggctggatcgtggatcagctccttgagacaaccaccggccacgtactccgtgaccatgtgcagtttcttatccttgtacagaacaccaatgaatttgagcacatgccgatggtccagcaaacggagaacggccacttccttgatgaaattcctttgcgcttcctcatccgcacgatgcagttctttgaggaccatcacctcgccgctctgacggtgggtcaccttgaaaaccttgccaaagaagccctcgcctagcttctctcctataaccagatcagttgcacgaaagattcgttgtggcttttggacgacacggcaggattgcgtcctggacagatcatagagctgaggatgcgccgaatgctgttgtgcctgatgctgttcatccagcaacttggacagactggaacaacgctccttctcctttagttgcgtcattgcggtggctccagctgccggtggtattgtcgtagaggcattggtggcttgtcgcagtttcctggccttcgtgccctgttcgccgggtgtcttgtacagacgctccctgcccacctcgacactggaggccgatgtgctgagcggcaggattaacgtggacgctgacatggcccgctggatgtccgcttggctgcaggagcggcacacttgcaccggatcatgctccacggtcagctgaagcatcttctcattactccgtatcaatttgtcgatctgttccacggacgaatcactaactggtgtgccgttcacctccaatatcctatctccaatatgcagatttgtaagattcacatcaattctggataataggaaataaatcaataattagcaaagtgttactactagcttagttgttgcttttaattcaactcaggcacatttgttacctataaggcgccccacagcactgttccgccatcgaggttagccacaagaagaagttacagaacaagctattttttttttttgggcaagcatgtattagggaaatgcagaaagagtcgaaggacgaacgcccagcgaaattagttggcaattaggactagacctagttagctaatgtgcaaactttaacaaatggcaaccaaaagtgagtcagattgaagcaataaattatatacaatcaaataatagttatcatttcacaatacgtacttcgtagatttgagccatggtaaaatttttttcagtacaaaatgtaaccaaaaagacattcttctttaaattcatataaaaaaaatgttgtgacttgtgtgtaaaaagtgagaagacggcttggtttgtataacatatgtacattaaacgcaaaggcaacttagaagttcaaaaaagagtacaatctgatctttgaaaaagatcttaaaaaaaacaacaagaaacaaatgtaacaataaagttaataaataatgcaaatgcatgcatctcaatgagttcattgatgtaaattatagtaatttcagttaatttcttactctgtaatgcggaccgtgggacaaccatcgtcgagggccactccgtcgaccctcaggccgggcgtggcgtccttgggtatctcgaccagacggatggagtgcatcggcttgccggccgttgtgatccgcgccttcgcatccgccggctggcaggaacgtttgccatagcactggccacaatagagcttcgaacgctcgacaagggcgtacgattcgccctcgccgatgaaggagccgcatgccgtgcagcagaagcactccggatggaatttgtgctcgccggcgaccattacgggtccggtgataacggccatacactgctgacaggcatcgccgaatcggccgtagtaatcctcacgacagtacagtaagccctcccgttcgaagtaccagttatgcagatggccctcgcaaacggagcagcgaaagcaatcgcagtgccattgctggccgagagccatcacgattggctcctctggatgtggcagtagttgaccccgacaatgggcgcacaatggtgagtgtcctccggacacaggtcctgatcctgcgcccaatccagtgcctcctcgtccgccatttgcccgcaggcgctgctgatgatgcatggaatgtttttgtgccttggcccgatcacgttagcactgtgggtaaagagcaggggggcgggaggttaaaaaaaaggtattagtcgatgacggaataggtattaaatatagtaaatatagaccagcagtcacggaacttggccaattatcgtcaacaggtcgatatgaaccagtggaaactaagcaaatatcatataggcaatgtaggtctataaataagctatctttacccattatcattaacgttgagaaaaaagatatctacaatgatatcatacatgaaatgcatttattatcaactaatatagtattatattagtttttctaactgatttaagtgttaatgataggaaggtttggcatttttcaaaaccaattgcattcaaaactctccgtgattttttatgatatactgggacagcaattcgaactttattgctaaagcgatagccatgtaaatatttttgcgtactaaacaaaatgaccgaacaaaacaaaataattgagtccggtagtcattagtttagggttcagtgataaagacttcgatcctgagtcagctgccccccatcggaattcgctataccgcctgatttccatcatcgatttgcatgcataatccatggatatatgcatatggacatacatatgtatatgcaaatacacatgaatgtttgtgtatttatggatatagctcaacattgaccgtgaaaactccggttgatgcaacaacaaacgcgactctttggatcaactgcaatcgcaattgcacttcagctgagctaactgtagttgttgtgcacgtccctcttccgaccgcataaacatgaccaatgaatgacgaatgcacacgcacacacttgcacgcgcgcacagtggtcacatgtgagccgtgcgttaagtgcagtccaagctccattaggggttaatgtgcctttaatcacctgcttaacccattgaacttttactttaaccaaccatatcacagtgctgtgattttgctttgaagagattggaaatgagtgggtgtgccaccctgactgaagtctataaaatagccaagacaagctaggtttacgaatggaacgaatggtaaaaaatcaagtaagtttgagtatttgtcgcactagtcccgctagaaactaattccgtttaatcaactatggttatcataacttgcggtccaatttttgttaattaagtcaattaattcactcaggcaatttgcatatttttggactccaaaattcaggaatgtgtccactgtgcggaggcagaagcacacacacacacgcgtacaggtgctgcacacacacacacacacacacacatgcacgcgctgttagaaaatgtgtgtgggggaacgggaacaacacgacattagcaaagccaatagcaacaacaactggttttttacttagattttattgttttttgctggacttgtacactaaactaaaccaaacacacacacacacttacataattgttcgtttgtattgctattgacttgacgcacattgcacatttgttggtttttcctcgccaatttcttattcgactgtaattcccgccaagcaattattaatcgcaactaccgaaatgccgcggattttgtttaaatgccgacgcgacgcacagctcgctaactcaaacaataaaaaagaaatgcataataaacaaaacaacaacaaaactacacaaaataaaatacaattcagccagtgtgaccgtaggactgtcattaaagaatctcaaaactatcgtctagctgccaatcaacttaaaaaatatataaactctttaatgaacaaattttttattataaacacgctgcttgtcactaacaagaaatattgaacagaattgaatattgaaatagtttttctttaatcttcgagtgaccgtatatgagtatggttgtagaaataatgcggtcccattgaatatattatttaacggaaattgggatttcaagtgttttatattcagtttttcaaactttaatttaagttcacgcatcccatctatttttaatgaacccggtgaatttagcgataatgacaatgaaatactttctgtttataacaaaaacaatactgtcttcagcgtttattttattgtatacttattgttagcgtctctcaccatttttgtttttggtcagttgaaaacaaaaaaaaaagtgaaaacattataagaatattaaattaagtgtatagggaatcattcaatttgcctaacatcgtcactatccttgcgctgcgtttgccctgccaccgaagctgctgctccccactgtcactgttgctgcggaagtttctgcggcagttgcaattgttgcggctgttgaagtttctgttgcagttgcctgctgctccttgacggccacaacgtcctccaccgcctggacttgctcctggatgtcccgtcgttcctgctgacgcaccagctcaaagtacaggccccgcttgcccatcagttcgtcatgtttgccggtctaaaacaagggaaaatataaatatttctgaagataccaatggtctaggacaactcacctccacgacgcgtccctgatcaaggacgacaatgaggtcagcgtttcgtatcgtggacaagcgatgggcaatcaccagagtggtgcgattctggaccactgtatcgagtgccttctgcacttccgcctcgctggtggcgtccaaggcactcgtcgcctcgtcgaggatgaggatgcgcggattcttga

SEQ ID NO: 2531 - DNA, 4031 bp, DROSOPHILA
aatgacagtcctacggtcacactggctgaattgtattttattttgtgtagttttgttgttgttttgtttattatgcatttcttttttattgtttgagttagcgagctgtgcgtcgcgtcggcatttaaacaaaatccgcggcatttcggtagttgcgattaataattgcttggcgggaattacagtcgaataagaaattggcgaggaaaaaccaacaaatgtgcaattgctaacgtgatcgggccaaggcacaaaaacattccatgcatcatcagcagcgcctgcgggcaaatggcggacgaggaggcactggattgggcgcaggatcaggacctgtgtccggaggacactcaccattgtgcgcccattgtcggggtcaactactgccacatccagaggagccaatcgtgatggctctcggccagcaatggcactgcgattgctttcgctgctccgtttgcgagggccatctgcataactggtacttcgaacgggagggcttactgtactgtcgtgaggattactacggccgattcggcgatgcctgtcagcagtgtatggccgttatcaccggacccgtaatggtcgccggcgagcacaaattccatccggagtgcttctgctgcacggcatgcggctccttcatcggcgagggcgaatcgtacgcccttgtcgagcgttcgaagctctattgtggccagtgctatggcaaacgttcctgccagccggcggatgcgaaggcgcggatcacaacggccggcaagccgatgcactccatccgtctggtcgagatacccaaggacgccacgcccggcctgagggtcgacggagtggccctcgacgatggttgtcccacggtccgcattacagaaattgatgtgaatcttacaaatctgcatattggagataggatattggaggtgaacggcacaccagttagtgattcgtccgtggaacagatcgacaaattgatacggagtaatgagaagatgcttcagctgaccgtggagcatgatccggtgcaagtgtgccgctcctgcagccaagcggacatccagcgggccatgtcagcgtccacgttaatcctgccgctcagcacatcggcctccagtgtcgaggtgggcagggagcgtctgtacaagacacccggcgaacagggcacgaaggccaggaaactgcgacaagccaccaatgcctctacgacaataccaccggcagctggagccaccgcaatgacgcaactaaaggagaaggagcgttgttccagtctgtccaagttgctggatgaacagcatcaggcacaacagcattcggcgcatcctcagctctatgatctgtccaggacgcaatcctgccgtgtcgtccaaaagccacaacgaatctttcgtgcaactgatctggttataggagagaagctaggcgagggcttctttggcaaggttttcaaggtgacccaccgtcagagcggcgaggtgatggtcctcaaagaactgcatcgtgcggatgaggaagcgcaaaggaatttcatcaaggaagtggccgttctccgtttgctggaccatcggcatgtgctcaaattcattggtgttctgtacaaggataagaaactgcacatggtcacggagtacgtggccggtggttgtctcaaggagctgatccacgatccagcccaagtactcccttggccccagcgcgtccgcttggccagggatattgcgtgcggcatgagctatctgcactcgatgaacatcatccatcgcgatttgaactcaatgaattgcctggtccgtgaagatcgctcggtcatagtggcggattttggactagctcgcagtgtggatgcgccgcggctgccaagtggcaatatgacgccaggcggctatggatcaggcgctaacagcgatgcgcccatgtcaccgagtggaacactaaggcgcagcaagagcaggcagcgaaggcaacgttacacggtggtcgggaatccctactggatggcacccgagatgatgaaaggtctcaaatacgacgaaaaggtggatgtcttctcctttggcattatgttgtgtgagatcattggacgcgtggaagccgatccggattttatgcctcgcaattcggacttcagtctcaatcagcaggagtttcgcgagaagttctgcgctcagtgtccagagcctttcgttaaagtggccttcgtgtgctgtgatcttaatcccgatatgcgtccgtgtttcgaaactctgcacgtttggctgcagcgtctcgccgatgatctggccgccgatcgtgtgccgccagagcgtctgctgcacgagattgagacctttcaggaatggtacgccagctctgaggacgccttgtcacccacctcccagcgcagcttaaataatctcgatgagttggtcaagagtgcggtggattcggaaatttcgccggtagaaaaagagaaggagaatatggtgattaagccccaggatataccgaaatctccgcatctcggcaaggatttctcgcccagcggcgagagactgcgtgacagtatgcgggccaggcgtcgccaacgtttcttgggcgcccaggaggagcgtcgtaatctcacgcccgacacggagtccaaggaaagggctttgaagaaggcgctgaagaaatgtcgtccgtttggcgaaagaggttacctggtggatctgcgtgccggtgccgaattgcagctagaggatgtcagggatttgaacacctattccgatgtggactccagttgcgatactagcctaaattaccatgatgtaaataatctgccagcagcgcaagaggatgagaatacagtgaaaccgggcaaggaagaactgttggaggagagcacaaataaacccagcaaccaggagtcacaacaccatcgtctggccatcgatgatatgcgcacccgcctgaatcagtgccgcagcaaattcgagcatttggaggaggctagtcggcggaacttcaaccagtcgcagcactccatgaagaactttttcaaaaccccaccggtggcccttaagatgtttcagcgcctggagcacgaggctgcagccctgaatggtggcaacaattgcccaccgccaccaccacgtacgcagcgcatcaatcagacgcccattttcggtcgaaagaatccgccagtggcaatcgtcgggcaaaaactacagcatgctgagtccctagaggacctggcctccagcggagttgccaaacagctggccacaccagcacccaaacgcagcaaagccacagcaacgaccaaaggcggccagagcagcaatccgccacttttcctgccgcctagccttaacataagtgtcgcattaaatagcaatggaaatgtgaccacaacgaccaataccaatagtagttgtccaccatccgcatcagactggctgccgaagaagcacaagctaactttgccacttccgtcggcccaacagcagcgaacgagcagcaatcatcgcctgccaatgtgcaataacaaagggaagacactgaagccactgccaagtcgcacgggcagtcaaggcattcccgcaagcaattgcgtctcgccgacgaggagcagcaggcccggatcacccaccaagcatctggcccagaggcacacagccgccacggcgcagcgactgacaaatggtaagcgcataaccaacaattttatacaaatcaagacttacacacactttgcacctgcagcggccgccactcaccagcagcagcatcagcaacaatcctcgaagacgacgcgcctgaatatcctgagtccggaaaaggtgcatcgcctgggcgctcgactcaccgatcagaagcagaaaatgcgcgaggaggccgcagcgacggcctcgtccgtcggaggagccggttgtgcggcaggaacagcggctggaagcttaaatggtcatcggaccatcggatcctccggcacaccgaattcggcggtcggtgaacggaggaggcgagcagctccatcgccgccagttcgcacgcatttcaatacgcgctgctag

SEQ ID NO: 2532 - protein, 1255 aa, DROSOPHILA
MHHQQRLRANGGRGGTGLGAGSGPVSGGHSPLCAHCRGQLLPHPEEPIVMALGQQWHCDCFRCSVCEGHLHNWYFEREGLLYCREDYYGRFGDACQQCMAVITGPVMVAGEHKFHPECFCCTACGSFIGEGESYALVERSKLYCGQCYGKRSCQPADAKARITTAGKPMHSIRLVEIPKDATPGLRVDGVALDDGCPTVRITEIDVNLTNLHIGDRILEVNGTPVSDSSVEQIDKLIRSNEKMLQLTVEHDPVQVCRSCSQADIQRAMSASTLILPLSTSASSVEVGRERLYKTPGEQGTKARKLRQATNASTTIPPAAGATAMTQLKEKERCSSLSKLLDEQHQAQQHSAHPQLYDLSRTQSCRVVQKPQRIFRATDLVIGEKLGEGFFGKVFKVTHRQSGEVMVLKELHRADEEAQRNFIKEVAVLRLLDHRHVLKFIGVLYKDKKLHMVTEYVAGGCLKELIHDPAQVLPWPQRVRLARDIACGMSYLHSMNIIHRDLNSMNCLVREDRSVIVADFGLARSVDAPRLPSGNMTPGGYGSGANSDAPMSPSGTLRRSKSRQRRQRYTVVGNPYWMAPEMMKGLKYDEKVDVFSFGIMLCEIIGRVEADPDFMPRNSDFSLNQQEFREKFCAQCPEPFVKVAFVCCDLNPDMRPCFETLHVWLQRLADDLAADRVPPERLLHEIETFQEWYASSEDALSPTSQRSLNNLDELVKSAVDSEISPVEKEKENMVIKPQDIPKSPHLGKDFSPSGERLRDSMRARRRQRFLGAQEERRNLTPDTESKERALKKALKKCRPFGERGYLVDLRAGAELQLEDVRDLNTYSDVDSSCDTSLNYHDVNNLPAAQEDENTVKPGKEELLEESTNKPSNQESQHHRLAIDDMRTRLNQCRSKFEHLEEASRRNFNQSQHSMKNFFKTPPVALKMFQRLEHEAAALNGGNNCPPPPPRTQRINQTPIFGRKNPPVAIVGQKLQHAESLEDLASSGVAKQLATPAPKRSKATATTKGGQSSNPPLFLPPSLNISVALNSNGNVTTTTNTNSSCPPSASDWLPKKHKLTLPLPSAQQQRTSSNHRLPMCNNKGKTLKPLPSRTGSQGIPASNCVSPTRSSRPGSPTKHLAQRHTAATAQRLTNGKRITNNFIQIKTYTHFAPAAAATHQQQHQQQSSKTTRLNILSPEKVHRLGARLTDQKQKMREEAAATASSVGGAGCAAGTAAGSLNGHRTIGSSGTPNSAVGERRRRAAPSPPVRTHFNTRC

SEQ ID NO: 2533 - DNA, 6712 bp, DROSOPHILA
cggacctggatgacgatcctccggcgaaggactcttctgttccgggctcccttcaactgagacagggcactttcgaccaggatgactccgaccagaagagtctaaccaatctgctaaccgaatctgattgcgaagaggaggaacgcaccttaaatgaggctcgccagaagctaagggatgcctacaagaatctttacaagaccttggatccgaaacagcaagaaaccattgacaggttgacgggagccgaaactgaagtgcctttgccggcgccagcgcctgtggtggctgcagttgaagccgaagaggaggatgatctgtccatcattgtggccagctatattccagatgattttgagctcaacgagcagagcatttactacaagaaggaggagcccgatgaagtcagggattcgtgcaccacatgtcccaaggcgacttccaagaccttcttcacttcgcgcagttttagctttcgccgtcggcccaagcccacgcccactctatcctctgcctccgcttccacgacgtctccttcggtgcggatgaactacaagatctgctgcgagcaccggcattcgattcagggcaagctacccaggtacacgggctacatgtccgagtacggactgactgcccagcaactgcagcggcgcgaccagcaactgcggcggaagcagcgcttctccatggagcagaccatcaatcgcaacgagcaggagctgaagaagatgcaggacaacgagcgcgccttcaccacctggctgaagaacaagatgcgctatccgatcaacaagacccgcaacatgttcgatgcgcacaaaaggcggggtagtgtggccgccgccggaagtccgcgccagcatccccaagctcatccgcatctgcaccaggagcaggagcagcgcggcggacggcgaaggcggcggcgcgacagcggggaagtggaggtgcacgcctatcggcatctgctcggcagctggaacaagtaggagtaatgtagttcttacattagtttattatattaatgtatcgtattatatttaatttgtaatacaacttttgaagcgtgacaaaaatgagtgacgggggattggggtggcgggtcctttaacagatagacaatggtaacaggagagctagattacgaacggagtgccacacaggcttggcgacaggaacagctccctaatgtcgcgacttcttcgacttgtgcccattgtcgcgactgtcatcccgcgagcgcttgcgatccttgtccttgctgctgctcttgtttccggacgatgaggaggaatgatgcttgtcccggctgttgtacttgtccttcgacgacttcgacgggctttaaaataatcaagggaatttggaaatgtgttaaaagaaatttcacaaataattactcctctgtggttatcaattttgagcaagcgagttatgatgctgttctttttttttctttctttttatcaattttgccagactgaacaatcataaataattcaacataaacccaaacagaaagtggttgtaaacggatggaatttggggtatccctatccaaaacttgccaagccaacaccagaaataaataatatcaacaaaaaataactcttaaaaacgtccaattgcttggttttttgttccaccaaagaagaaaatcaaatttataacgaaacttccagtgtgtaatggtttgtgagtgaaaaatgatatgtgaaatgcacttgcgttaggccgtatggttgggtattaagtgttcggggctttcgataacaaacctagatgagctgccatgtttggagctggaggactttaaatgcgaagaggacgaggaggagttcgacttgtgctttttactgtgcgacgacgatcgagcctcctcgcggtcgcggcgactgtggtggacgtaaaatgttgtagaacgattgatatagataagagaaaggagatctcggataaggtaacccttaatggaaacccgtccatgatgggatcgtggctcatacctgtgctttgaactcttgccgtgcttcttcgaatcgaatttgccgttgcgtggtttgtcatctgcggcataatcgtggttgcggtcttcctcagcagcctcgcgctccagatcggaccaatccttgccagattcctcatcagagccaaggtcctctgtaaattatgatgaaaatattaaccaactagaagatatggaatgttttgggtttgtgcataccatcgctttcctcgctgtcttctgatgcctctgagtactcggaatcttcgtccgactcctcatccgattcggcgtcggtgggattgtaggcctcgtcctcttcggattcggcggtttcgttttcgccttcgctgcccgattccgggtccaagaatgtccagccgccttgttcaaagaatccctcaggatcgtcggtgatggtcttcatgatcttttgccagttcagggattgaacaccctccgaatagcggatgtcgcaggagctacaggatactcattagtaaaagtgcattttgcaaatgggcagatgaacttacttgagccactccttcacgtgatccagcatgttcataggaatggcgttcaccatggcaaccttcttattgtactccttgaacacaaatatcatatcgaagttgcgcaagtggaactgaacgcgctcgaagtgcaccaactccacatcgtccagcgtgatgacaaatggtggccattccgtcagattgaccagggagcccgaggtgggttgcagcgtcaccgtgctgcggaagggtgctccagggaatcccaactcacggaacggcgtgtcgaactccactaccgacttggtcatggtttccaccttctcgcagaagctcttgaaggcagtcttgagcttgtgccgcagctcacgttctgcctgctcagcagccaagtcgtcgcggtcgtgcatgtgctggtgcttgcccagatccgtggtgatctctcccacttccgtgtagaactgtacatccacgtgcttctttttgccaaacataatggcgtacttcaggtggaaatgcagaagaatgatcatctcgccatcgcagggctggaaaaacgcgcttttgatgttgttgtacaagatgtccaccttgtcgccgcgcacggagatgtagcggaatccattgctgtgcgcttccaggctgcccgtcatgcgcttggtcacgatgttgggccgaatgtataggtccttcagcttgggattacccttgttctgggacagaatgagtgtgtcttgcttcacaagatcctccttttcgcgctcctcagcctcgcgggtcttgaagcgcttctgcacctccttgatcagccggaaagcattgtttagatttgcggatggagctcccacctccccgtgttccttaacattagagctgcggtatgtactgcaggaaaagtgtctagttagtgcattccttaagcagatttcgcactatacttacacttccttgacaaatgtggcctctggctgaggatagagtccgccttcgttgcgacccattgtggcgccgggatgaaagaagttgatacgcaagtacgtgtactcgccctccaccgactgcgagatgttcttgatggtggatatatggaacggcacctggatgccgaacactggcatgatgacggtctcgtacttcttatccacgtaaagcttgagctccttgacttccggctcgcgcggcatttggctgatggacttgtaggagacggtgttcttgcgcactttctcgacctccttcgagtttccctgcctggccagccgatccttggcgcgctcgttcagctgctgagccagctcgcgctggtgctccttgcgcttctcctccgtgttgatctcgtttcgcagctttgactccagcaccgcgttgcgcttgctgcggcccaggatctcggtgccctgatcttctttagcggtcttcttgtcgtccacatcttcctcgtcgctgtcgtccttgataaagatgccgacgttcttgatcttcttcttggacggagtcatcacactggctggggattgttcgcctactagcacagtgtctccgatgaagagggcgtagttcttgccctctttgtcggtggcttcgggattggtcagattcgagatgcccacgtgcaaattaaagaccatattcttcttgagtagcgcctggcatttgggtccgatgacaatggagttctcccggaactctaggcccatggcgaaaccaaagcttttgggcagattgtccaccatactcggcttctccttcttcacgaagtccagggtcttttcgtagacgtcgcacagctttgtgcccggaaccagcagcttgagaatctcctcctgcacacttaccagaaatgtgtagttctcctgcatggcctcggtgggattcaccagaaaggtgcgcgatatatttgagcaatacgacttgtagcgggcgcccaaggagcacacaatcacaccgaagtgcaagggatttttgtccgccaccgcggagaacttcaggctgtaggctcctcccgattggatgatgggtgggtaggccatatcgaggagtctgggatccagaccactggtgtacttcttctcgccaatggcagcctcgcagccatctgagagcttgttgtgtttgactttctaaaaaggaggttaaaaaggttaatatattaggaaaacacataatattatagccgccaggtgctcaccctatccgaatcaataatgtccatgatctcatctttcaaatacttgttgaaaatgtccattgacactagcgatgccttgcgtatgttgttgatctccgactcatccttgggacacatgaggtaggcgataatagtgctaatgtccacatgctcgaacttggacgccgtcagggatttcttccatgcttcgctgaactccccgggataggcgtccttggcgaagacgcccaaacgcttgcccttcttcgagttttgcagggctttgatgagcttctcgaagttgccctggtccttgtccgtcttctcgaagtcaagatcagaaaggattagagaacttttggcctggagcagaaatcgaaactcacccgatccctaacaagcagattgatttccggaaaaccttcttcggtgatgttctgcgtctgcttcaggaattctattttctttttgctagtgagaaaatacacggcatccgagcaaaacactgagatggtgtccgtcagctcgtagcccagcagccagagctgcagggccatggacttggagtacatgacatcctcttcgacgcccacgatgctcatgatgcagtccagattcctgagcgcgtcatcgtgtccgatgctgggagcctgcgaaagacaaagagtccgatattattatgcagtaatcctcttttccccaaacaacctggtctatgggtaattaatttcaccacatctcccaatctttcattatcgtgacccgtctgcagagtctccacgtgctccccggtgctcctgcggccccaaaaacacgcagatcgccgaccggcggacagactcaccctccattccgtgtagaggcgtttcacgcggcgcacgaacgcctccttgtccagcacaaagctcgacatattgccgccggatttgttactgtgtatgcgttaactccgcttaaaatgcgctaaacgccagaaattgcatttgcaaattccgccggataaaaaaattgcgcggcgaccagatgaagaagaagcagaataagcgtcagctcgacgtgagtgagaccgctctcaaaaataccgtaatataccagttgtcaatgtaaaaatagtgtaaccaagcaacagtacagacacgtctagcagggactcgaaccatatatgaacattttacgcgctaaaaattggtgcactgaaaaaaatgtttaaaactggatttaattaaaaatgtgtctcgccaaaaatacatttttacattaaataaaagactttggcacaggcttcgtttaaatatagctaattttattattgttttcttcagtattatcaacatttgcaattacgtactgtgacggctaatatgtgagttcgttgaacttgattcattggtttttagcaaagtctaagaattcagagctagtttaattctttgtgcccgccggactttcggcctcatccggccgggcaacctgcagatactcctggatatcgtagtcgaacagctcgaagtcgtatctgtggggaggaattttaacttgtaagtatgctaccataatctaaaaatttaaatggatgacccacttgtaatactcgtagagctccagcatttcctggcgtgtcagctgcgcatagaactgctgctggagctcgtgcgtcttgcggcccttgcccatgttgcgccacacgggcgctatcacccgcttgaggccagtcttttcgattagatataattgatcctccgccagcgattcgaacttcagtatcatgtcgaaccggatgaggcagggtgtgcagaacgaggtggccgccacgaagtgcatgtcgatgaagctgccgcgcttcacctggtcgagcagccagtgcacgaattccggaaacgatgggaactttgtgttggccgcacgggcagccagtgacggctattggataaaatacaatgtattagatgcattcgatgcgtatacttgatattgctattgcaacaatatcgtgtatacgcagtgggttacagtcgaaat

SEQ ID NO: 2534 - DNA, 3615 bp, DROSOPHILA
tcgccgcgcaatttttttatccggcggaatttgcaaatgcaatttctggcgtttagcgcattttaagcggagttaacgcatacacagtaacaaatccggcggcaatatgtcgagctttgtgctggacaaggaggcgttcgtgcgccgcgtgaaacgcctctacacggaatggaggatgagcatcgtgggcgtcgaagaggatgtcatgtactccaagtccatggccctgcagctctggctgctgggctacgagctgacggacaccatctcagtgttttgctcggatgccgtgtattttctcactagcaaaaagaaaatagaattcctgaagcagacgcagaacatcaccgaagaaggttttccggaaatcaatctgcttgttagggatcggacggacaaggaccagggcaacttcgagaagctcatcaaagccctgcaaaactcgaagaagggcaagcgtttgggcgtcttcgccaaggacgcctatcccggggagttcagcgaagcatggaagaaatccctgacggcgtccaagttcgagcatgtggacattagcactattatcgcctacctcatgtgtcccaaggatgagtcggagatcaacaacatacgcaaggcatcgctagtgtcaatggacattttcaacaagtatttgaaagatgagatcatggacattattgattcggataggaaagtcaaacacaacaagctctcagatggctgcgaggctgccattggcgagaagaagtacaccagtggtctggatcccagactcctcgatatggcctacccacccatcatccaatcgggaggagcctacagcctgaagttctccgcggtggcggacaaaaatcccttgcacttcggtgtgattgtgtgctccttgggcgcccgctacaagtcgtattgctcaaatatatcgcgcacctttctggtgaatcccaccgaggccatgcaggagaactacacatttctggtaagtgtgcaggaggagattctcaagctgctggttccgggcacaaagctgtgcgacgtctacgaaaagaccctggacttcgtgaagaaggagaagccgagtatggtggacaatctgcccaaaagctttggtttcgccatgggcctagagttccgggagaactccattgtcatcggacccaaatgccaggcgctactcaagaagaatatggtctttaatttgcacgtgggcatctcgaatctgaccaatcccgaagccaccgacaaagagggcaagaactacgccctcttcatcggagacactgtgctagtaggcgaacaatccccagccagtgtgatgactccgtccaagaagaagatcaagaacgtcggcatctttatcaaggacgacagcgacgaggaagatgtggacgacaagaagaccgctaaagaagatcagggcaccgagatcctgggccgcagcaagcgcaacgcggtgctggagtcaaagctgcgaaacgagatcaacacggaggagaagcgcaaggagcaccagcgcgagctggctcagcagctgaacgagcgcgccaaggatcggctggccaggcagggaaactcgaaggaggtcgagaaagtgcgcaagaacaccgtctcctacaagtccatcagccaaatgccgcgcgagccggaagtcaaggagctcaagctttacgtggataagaagtacgagaccgtcatcatgccagtgttcggcatccaggtgccgttccatatatccaccatcaagaacatctcgcagtcggtggagggcgagtacacgtacttgcgtatcaacttctttcatcccggcgccacaatgggtcgcaacgaaggcggactctatcctcagccagaggccacatttgtcaaggaagttacataccgcagctctaatgttaaggaacacggggaggtgggagctccatccgcaaatctaaacaatgctttccggctgatcaaggaggtgcagaagcgcttcaagacccgcgaggctgaggagcgcgaaaaggaggatcttgtgaagcaagacacactcattctgtcccagaacaagggtaatcccaagctgaaggacctatacattcggcccaacatcgtgaccaagcgcatgacgggcagcctggaagcgcacagcaatggattccgctacatctccgtgcgcggcgacaaggtggacatcttgtacaacaacatcaaaagcgcgtttttccagccctgcgatggcgagatgatcattcttctgcatttccacctgaagtacgccattatgtttggcaaaaagaagcacgtggatgtacagttctacacggaagtgggagagatcaccacggatctgggcaagcaccagcacatgcacgaccgcgacgacttggctgctgagcaggcagaacgtgagctgcggcacaagctcaagactgccttcaagagcttctgcgagaaggtggaaaccatgaccaagtcggtagtggagttcgacacgccgttccgtgagttgggattccctggagcacccttccgcagcacggtgacgctgcaacccacctcgggctccctggtcaatctgacggaatggccaccatttgtcatcacgctggacgatgtggagttggtgcacttcgagcgcgttcagttccacttgcgcaacttcgatatgatatttgtgttcaaggagtacaataagaaggttgccatggtgaacgccattcctatgaacatgctggatcacgtgaaggagtggctcaactcctgcgacatccgctattcggagggtgttcaatccctgaactggcaaaagatcatgaagaccatcaccgacgatcctgagggattctttgaacaaggcggctggacattcttggacccggaatcgggcagcgaaggcgaaaacgaaaccgccgaatccgaagaggacgaggcctacaatcccaccgacgccgaatcggatgaggagtcggacgaagattccgagtactcagaggcatcagaagacagcgaggaaagcgatgaggaccttggctctgatgaggaatctggcaaggattggtccgatctggagcgcgaggctgctgaggaagaccgcaaccacgattatgccgcagatgacaaaccacgcaacggcaaattcgattcgaagaagcacggcaagagttcaaagcacagtcgccgcgaccgcgaggaggctcgatcgtcgtcgcacagtaaaaagcacaagtcgaactcctcctcgtcctcttcgcatttaaagtcctccagctccaaacatggcagctcatctagcccgtcgaagtcgtcgaaggacaagtacaacagccgggacaagcatcattcctcctcatcgtccggaaacaagagcagcagcaaggacaaggatcgcaagcgctcgcgggatgacagtcgcgacaatgggcacaagtcgaagaagtcgcgacattagggagctgttcctgtcgccaagcctgtgtggcactccgttcgtaatctagctctcctgttaccattgtctatctgttaaaggacccgccaccccaatcccccgtcactcatttttgtcacgcttcaaaagttgtattacaaattaaatataatacgatacattaatataataaactaatgtaagaacta

SEQ ID NO: 2535 - protein, 1083 aa, DROSOPHILA
MSIVGVEEDVMYSKSMALQLWLLGYELTDTISVFCSDAVYFLTSKKKIEFLKQTQNITEEGFPEINLLVRDRTDKDQGNFEKLIKALQNSKKGKRLGVFAKDAYPGEFSEAWKKSLTASKFEHVDISTIIAYLMCPKDESEINNIRKASLVSMDIFNKYLKDEIMDIIDSDRKVKHNKLSDGCEAAIGEKKYTSGLDPRLLDMAYPPIIQSGGAYSLKFSAVADKNPLHFGVIVCSLGARYKSYCSNISRTFLVNPTEAMQENYTFLVSVQEEILKLLVPGTKLCDVYEKTLDFVKKEKPSMVDNLPKSFGFAMGLEFRENSIVIGPKCQALLKKNMVFNLHVGISNLTNPEATDKEGKNYALFIGDTVLVGEQSPASVMTPSKKKIKNVGIFIKDDSDEEDVDDKKTAKEDQGTEILGRSKRNAVLESKLRNEINTEEKRKEHQRELAQQLNERAKDRLARQGNSKEVEKVRKNTVSYKSISQMPREPEVKELKLYVDKKYETVIMPVFGIQVPFHISTIKNISQSVEGEYTYLRINFFHPGATMGRNEGGLYPQPEATFVKEVTYRSSNVKEHGEVGAPSANLNNAFRLIKEVQKRFKTREAEEREKEDLVKQDTLILSQNKGNPKLKDLYIRPNIVTKRMTGSLEAHSNGFRYISVRGDKVDILYNNIKSAFFQPCDGEMIILLHFHLKYAIMFGKKKHVDVQFYTEVGEITTDLGKHQHMHDRDDLAAEQAERELRHKLKTAFKSFCEKVETMTKSVVEFDTPFRELGFPGAPFRSTVTLQPTSGSLVNLTEWPPFVITLDDVELVHFERVQFHLRNFDMIFVFKEYNKKVAMVNAIPMNMLDHVKEWLNSCDIRYSEGVQSLNWQKIMKTITDDPEGFFEQGGWTFLDPESGSEGENETAESEEDEAYNPTDAESDEESDEDSEYSEASEDSEESDEDLGSDEESGKDWSDLEREAAEEDRNHDYAADDKPRNGKFDSKKHGKSSKHSRRDREEARSSSHSKKHKSNSSSSSSHLKSSSSKHGSSSSPSKSSKDKYNSRDKHHSSSSSGNKSSSKDKDRKRSRDDSRDNGHKSKKSRH

SEQ ID NO: 2536 - DNA, 12860 bp, DROSOPHILA
ctgtacccaaaatgatattgccatcccatcccattctatggggaatccgagaagggcgggcaaatatataagttcaaaataatcaggtggtggtaagaagtcagataaaatataccaatgatcaataaaattaaatgctgtagccttgcttttgtcataaccgaaagcttatcgatttcacttatcggaatctcagttcaaacagcgatatgtcaaccagtcatcaagaaccacaaagcgtttatctcgaccagataaacacattacccttaccccatttatgaagaaggcaaccccaagtaataccatttatgttttagttataccgacatttaaacaaattcgctttaatttattaacgcactcaacatggggtctacagtacattgtcacatttaaatatagtcatttaactatgtatgtattatccataaatatagagatgcatgtatatgtatgtgtaaactagtatcaaaaattagtaaaaacgacacttaaccaactgaaaaattatccaaaatatatatgtatgctcatgtaccgtatttataaaagtatgcgataaaatcaaagccaacaacaacttagcacgcaagtagaagacgttgaagatttcatcatgaaaatgcattatgggatcatggtagaatgaatcgttcgaccggacgttagaatgtgtataagtatgtgcgtggataaggacagcaataaattaaaatcgacaaacttgtgaggtttttgtgccatttgatggcgatccatttgcttcttatttcgttttagtgtgcacttgtcgtctataatattgttcaatttgcttttagtttcgatgttcctcccttatggtttcatttataaaatatcaggttctgctatgaccaaagatcgctttagcgctgtagtgtctatacattccagtgtgtatatatcgggctgtgtgttaaatgggtgttctataggatgtgcatcagaatatacaactaactgcccgatcattgactcaatcgaagttaatcattcggaaggttccgtcgttcggaacgtcggttactaacggagcacccctttcctgatccttctcactggcttcccgcaatttctcatccacgccatatcgctcgtcttccgtgaagtacggggaaaagcttagcagctgggtctcgtagcgcgtcattgcatcagacaaagatccattatcgccgcccatttccacgggtaaatactccaatccaattgcctttcgcagagacgcgacggtggagtgaatgtgcaactgtaggaagggtagcaaagagttagtggttctgcatcgattttccctttgaactcaccagctccttttgcttcatgacattccgaaccagtccaaggacaaactgcgtctccctggatgcattgacaatgtgcgtggccactaaattcgctggaattccatgctctaggaatgcattcatccgcttgaacatgccaggatcgaactgcagtagcagagagtagggtatcttggtgaagtcgatgatctccaccacgccggctatgttccagttgtcgtccgtgttgatctcgatctcagcgcgaaaagcgtggaagcggaaaatgtcgctgacactgtgcttggaaggttcaatgtgacccattcgtgtgtagtggatgcgggggccaccagggccaataggtttgggcaatgtggcgaatattctgcaaaagaacaagtttttctataacacccacctccagaaaatgaggggggtccccgccttaccctgaacgagccagttctatcagcttatcgtccacctggcgacccttgagcagttctctttcctttgatttgtaggtgtagtagaagagtaccctcttcttggcctcctctacgtcccagcggcagaagcgcagaaaggccaccaagaactgatcgtcggtccgcgcctccaggtagatctgtttgtcgatccaggtccttagcgcctcgatcttcgcaaccgtcgaggacggatcctcgcagagctgcgttcgagccacctctgccagctccggctccagcgatcgtatcttggccatggtcacagggaatctgcaaatcgatcgatacttgtcttaattttgagatacgataccgaaggcttggagtgtgctaaggtgtgtgtgttctctcgccaggtgcgaacacgactaacagaaaagtttgcgcccgcctgcttggactgggttaccgattctgatcggttcgggaaccctcccggattcgatagcgggcacactggtgcagaagaacgcgaaaaacactacggcacggagcaaactcacaatgacaaaccatttgagcaccagattatgtgatatcagtggccgatagagcaaacacaaatagcaatgttatgtgaatatgataagtgcactggaaaatacatttgcaccttactggtttcgtattggtaatctcaattttgtaatgctagtataaagtttaaaaaattttatttatataggatgatatatatttggatatttttagtatacttcttaagcaatccagccttaaaattgcgatttcattgcgatttaaagatgataatcgattttttacacccccgataaataataaattgttcaatcaacttatatctttaaaaaaaaatacacccacttgatatgtcattaacttttaaaccccataattgggtaattcctgccaactgtgcttttccgatccggtgataagatacgatctgcatactcacaaccgtttgaattgtggcgtatttctatccacagagtcaactgcttcttcgccagctgcacgcttacacgccatagatgcagtggagccgtaatcttatctcctccgaggagagacttcgaccgcctacacccaaaagatcgggttggatttgatgggccgtcggagcaaaagagagtggtggaaatggtcgtgtccgctatcaactgaatgagtggccataaaggcagctcagattagcttttaacggttccgtttcggcccggggattttggccgccgtgcgattaggaagagcgtttagtagccgtccagccgccacgaagcaagcgacttcccaaaaatggccaatctgcgtcccctgagcgccgaacttcgtcgcattgctgaaacggagctaaacgaagtggaggagcgagtgcccgcggatctgaaagctcttcgggattggttggccaagcaacctcatctgagggcccgccaggatgaccagttcctagttggcttcttgcgaggctgcaagtttagcctggagaagaccaagtccaagctggatcacttttatactattaagacgcttatgcctgagctcttcggcaaaagattggtggacgaaaggaacctaatcttgtgcagatctgggtgagttaaaaggcgctcatcaaggatatttaaaaacttaagaaacttaaatttctatttagaacctatgttcgattgcccaaaccttggggaaccgatggcccccgcctgcagcttacgaactatgagaaattcgaccctaaggaattcaagttattggatctcttccgctaccaaaccatgataacggaacagtcaatccgtgaggatgaccacagcaacattagcggctacgtcgagatcgttgacatggccaaaatgagcctcagttttctggcccaactggatttcacgctcatcaaaaggatgggaatattcgctgagaaggcacagcccactcgcttgaaaggagtccatctgatcaattgccccaaggagggagtggcgttactgaatttggccaagagcctaatgcccagcaagctccagcagcgggtgagtaggcaagaataattgaatagtcgtagccactctagctaatttattttcgttcccttatcggacacttcaacgagattatcagctggtctagcaggcagctgataggcgttgaagagctgtggcactctctcacccctgaactattaattaatatttcacaaatcagagccactaactttcgagctgggtccgcatactgtgaaatactgtgtgtggagcagcattgcctaaggtcagttgaccacgcacatgggctcttatcattgaaacactgggccgagttttaagatacggggggaaggtgcaagtagatatatcagcgaataggagaataatctatttccctgactcatcacacacatggctctctactttttcagtttcacgtgtataaaaatctcgagcaattaaacgaggtgataccacgcgaatacctgccggaagaatatggtggcaacaatggacgtatagccgacattcaggcggaagcggagaagaaattgctgtcctatgagagctattttgctgaggattcccagtacggagtggatgagcagctgcggcctggaaagcgtgttaatgcggattcaatttttggcgctgagggatccttccgaaaactcgacatcgattaaagtcggaacgtgttttaattagtattcaataaaaggcaaaaacaatcctcaaaacaactaactagacttctcatgagaatcgccgagagcgacgcgacagatggccaaatcgcagagccattagcttttagcgagcactatctgtgacacttgttaatagcattgtcaatcacctaactaactaaatgaagtgggatcaagtgttggtcatgttaatttgacgaacgcttaggcagttcctctgcaaaaggcgtcgaagcaggaatccaacggaatggcttcggtttccagcagcgacgatgttagtaatgagtaagattttcatttcaccgtagttatacctttttcatttagtttgacttcggcaaatgggacttcccagccgagcgcatctggctgcacaagcccaatggggagatcacctggaagatctgcacttttctaccactgattgcttttggtctgtatggaaacttcagcatggtttatgtgatagccaccaaccgttctttgcgctcgcccaccaacttgattattgcaaatatggccgttgcggatctactgaccctggccatttgtcctgccatgttcatggtgaacgacttctatcagaactaccagttgggatgcgtgggctgcaagctggagggctttttggtggtggtcttcctcatcacagccgtgctcaatctctcggtagtcagctacgatcgtctcacggccatcgtgctgccaatggagacgcgcctcaccataaggggcgtccagatagtggtggtctgcacctgggtctcgggtatcctattggcatcaccattggctttctatcgctcttacagggtgcgagtgtggaagaactttacggagcgatattgcaaggagaacacctctgtgctgcccaagtactggtatgttctgatcaccattctggtgtggctgccattaggcatcatgcttatctgctacatagccatattttataaggtaagcaaagaaagtgtgctcatcctggatttttaactaataagccaactcaaaaacagcttgatcggtatgaaaagcgggtcctaagtcgcgagaacccgctgacagtgagctataaacgcagcgtggccaagacactgttcattgtggtcgttgtctttgcagctctacgactgccctttacaatcctggttgtactacgggaaaaatacttcggtgaagatgtctctgtcagcagtggaatgcagctattctggtacatatcacagtatttgatgtttctgaacgccgccgtcaatccgctgatctatggcttcaacaatgagaactttagaagggcctactaccaaatttcttgggttcgccgatggcgagacgccacccaaatgaagaagttttctcgatcaccagaccactgctgctactgtgcctttatgaagaatggaaaacgaacctcagaggcagcacaaaaggcaggaaatttagaaaaagacataagcaaggatatgtcgtcggcacaacaatcggccaagtcaacgaagatagttgaaaatgaatttgtatcagaaatcgaggcagacggatttatataaaagaaatttaagagaaacaaataatacatttaaaagccaatgtaccaaaatacgaacttctctctgctctaatacacccactatgatatagggtaccaaacatatgacaatcatactaaataaagctttaagaaccgtaaaatatcatggccggtagtaaaagttattttgcaaccagtgcacgtgttacagtttgaatgtttcgttttgtatagtttacacaaaataaatatatgtatcaaatctgttgcaatttgttgatctttgcggctgtgatcgcccgcgtgatcagttttgaagtaaacttccgggaatcctatcccacacacttcctgaactcagatcaggaatcgatgctccacaaacgggcgactgctgtgcctcagtttttcgaccaaggtttgaaatgatataacaaactttattaacatgttaaattttgatgggaaatccagtgctcaggctaaaccaaacaattccgacttcatgtagccaaatccgtgggcttcgaggaatcgaatgaactggcccatgttcatgacgccttcttcggcattaaaaagctgttcgctgaagtcctcgaatccccgcttgcgctgccgaggctccgtccgcaccacgctgatcttctgccagcgcagggccttgatggtgcgccagaattcctgtacatttgccgaatcaccttccacgcatatgatgcccggtttaccgggtctactgaatcctgtgagctccaactgtcgggcctgccgaatcagctcctgccgcttggcactggatttgatgtgatgcgaataaatccaaattctctgaagttccgtagctggtggctgttgcgggtctgatgatgctacctgctgcacttcaaactcggaagctggtcgttttaacagatcctcgatgcggtcctgcagccagctcagcagctggaagatgtacggctcggcgtcctcctcccgcctttcaccatgatactgctccaaatcattctttaagcgctgctccttggattttcccagtagcgtagtgtgtacactgacgcgtgcctgctccaaaagcggatataggtgcggcagttccactcgcacttccacgcactgtttgcctggtagagtcaatttgaccacatactccaaatgggatagaaggctagtagcgggttttgtcttatcatccttgagaaactcattgaaatcagccactacgccggcatcgagcatatgcagctctccgggcgcgcagtatatggagctcagcagctccagctcctccagctgcaggccaacgcagcgacggtaggtttgcagctcctcatcggccatggctaacgaagagttagaaagaattgtttggtttagtcagcggcgacggattacctacggctctatcctaaagatgaaagtacaaaaagctgaagaggaatcttttgtgattagtgtttgtgcaacttattgtctaaaacactttatgcctcttccagctagctttagtttcgatggactagaacgagtggcctccgtgccggtgtcttttccccttgacatttgcatcctccaactgcccacggtcaagtacgctacggccttgcataaaaatgccgcaggagtgcgtcactttgccgtctatacctggcgtccagctgagcaggactaccagctcctcgtggagttggaaacacctaaggcagtggctctggattgcctggccttcgctgggcgtggctacgtagcagtgagctacaatctaacagagcccgtaagccaggcccgtgaaggatcacccatctatgagatttccccggaaacggggatacggacagtgcaatacttttcgggaacacatctgcgtggaatgtaccttcggatcagcagccaggaacttactctactgcatgccttcgaatcgaatgcgcagtgtccctacttcaagtggatgggcaagagtttccagagactgggcgcgattcactgcagcaaagctcgaagaatggaggccttcggcattgactacaccgactatgtggccgtagccaactacgcagatgcggagggacgaactgccacccactcagagatctttcgatgggatgccaagtcccagagattccaactcttccagcgactgcgcagcaatggagccgtggacgtaaagtacttcagtctcccagtaaacgaggtcagccgcaggcactttctcatcctgggcaacacaattggcggaactggcgccgaggtgggcgatgcggacaccgtgatctatgtcttcgaaaaggggcagtttgtgccgtatcagcgattgagtttctatgccttggaaagggttttgccagttcaggtaatttcggatcaaacttttcatggcattcataaaatgtggaatcctttagcactcaatatcggagaagtttctactcctggttgcttgtaataaacaggatgtcaagatctataaccttaacgactggcgattcgaggaatccaaggtgcagttcaccgagggagctttaagtcgtggtgtggcacgtatgcgaagctatgaggagggagatcaaagctatttgggtaagtatctttgggtttttatacatcgtatgctgaaatttgcctatatccagtgattgcgaatgagaatatggctgccaacgagacaaacatctttcagccactctacaaacaagatgagcatgccaacatacttcgccagcaaatcattgactgggctcgggagcaaagaaagcgattggagcaaatgaatttagatcatctattaataagattgaaagtaagttttgtgttctaaaagattcaagtaagtaaagaattcatatgtaatatgtaggacaagttaaagcaccgtgaggagaaactgaaagtgtcgattatcaagcaagtgaacgccaaatcggtaagaagtagcaggaaagtcaaaatattttgataaaaacctcatattttcagttcgaggataagcacatgaaactcacacctaattactggaaggctttgaagctaaccaagcaggccttggataaaatcgaacaaaaaacaaccctcgcaggttccagacatcccaataagagatccgttgatcaaccaaatgaagaacccaatttcgatgaggtcacggtggacacgctggtggtgcacggcgcagttaaagcagaccatatcaatggagttgatacgaggaaccctgtttatgattccgtcactgccaataaggtttatgttagcgcaaaatacaccgaacccgccggaaaagaaagaaaacttctgctggatgagctaatagtaaaggatctgcagcttgatgggcgactaaatgggctcaagtgggcagacctgtttgatctgactttaaaacgcagcaacaaagatgtgcagtttataaaggcagctgctgacttcgatcatctggaatccgacgctgcccaagtcaacaacaacgaggttaacgatagaccgttgggtctgctaatcccagtggatggtggagactttattgtccaacaagatgttcagttttcccaaccaattcaggtgaatcggctgctcatcaatcagcggctaaatcatatccacgtcgatcgtcagcgcttcgatgtcctgaccaagcaggcaaatcacacacaggtcatcgagggttccatgcgattcgagaatgttcgagtcatggaaccgattaccattgcggtgggtagccacagatatattattctaggacatattataaacttatttttcttcagggtcaaattatgggggccgaactgagagcgatgtcaccggcaaaggttacccacaagtcgcttcaacttaatggggatttcgtagttgacggcgatgtgaccattggacggctgctgcaaatgaaagattttgtggacgaatctactcagaaatctgcagcagaagcattgactcggggcctgcgattggatcaacctttggaggatgtgaatctcaactttgtggaaccacttattgccaacaataccgagctaagctttatcaacacgcaagatctacaaaacctggttaagctgaacgtgggtgaagtgcagttggtgcaggcaagtaaaatatttcctcaaaatgtagagatacgcgatggattcggtgagatcaagtggctaaatgggattgatacggaaagactcccggaaattatgctcaccaagagtggcaaccaaactatttcgagttcaattcaattacaaggcgtagaactgaaccatgtcaattcatcacagatcttattgaatgatttgggagttgaggattatcttcaaacaggtcaggatcaaaagtcaaatggaacactgtatatagacaacatggatgtgagggaaatgagcgtgaatgatctgcacctaaatggccatctctttggccaaacaatgtcctccatctacgaacatggaagcaagtccctggacagctggcatctgccacccgacttcaatggcaccattcacgcccagaatctgtggcttagtggccatattaacaaagtgaaggtggtccaattggagcagcagctgcagcaactggcgggcaatgtcaaatacgttggcgactttacgtttgagcatgatgtaaacatcagttccctcagctttgaaaactctctaaatggaattgaggccaataaatttggtagctgttggttggagaccgacagggaccagactttcacagccccgcagaagctggcttccctggacagccagcaaggtctctggctaagagggcaactgaacaaccacaccttgcaagatctggagaaccgtagctacaggctcaactcaccggagcacctgcaatcagtgcgatttggtgggttttataagaacggctacacgttatcaattataacaacattacctttcagcgaatcccattgtgttgcaatcggagctacagttggatcgcttaaatggactccgcgtcccagaggacgttatttaccataatggtggagcttacatctctgctcccgttagcgtagatggtgacctggaggctttaaaattgtccaacataaccaacctgaatggttatcctctggaggcgttggagatctatttaagtgggcaaaatgtgcgcacctttgtggcggagaatgttaagtttggcggagaaccctcttatcagctcctgaatggccacaatctaggaaaccttcttgatcaggtgtggctggacaacgagcagattgagttgagagaaataaaactggaatctgggcaattcgaaggcctgctggaattccaggtgagtgggtattgcacagtagaaacctatgttgtttacaagaacacctttccccatagggacccatcaacgggcaccaagtggatcatataactcacaactacttcagccggacgcgtagcaatctgctgaaaactcccctgagcttccagcatgacgtcacgttcgcacagcctccagttgccaaatacgtaaaactacgacgtggcagcagcggcgttttaatggagggcaccagtaggtaagtgaaattgaccaaatgatcaaggggcagggggcaatgaacaggggtaaagttggtatcacgtttcactttcgcaattgtttacgcgctaacagttttagagtcactgcatccgcagaagtcagctgtgcattccgtttggcaggtgaaatttctgtacacgtttgtacgtagcgcggggcgggggttgcacttaattcgaacactcgcaggtgtgcttaattaccttgtcaattggtcgctgattgggtttggttaaatgcactttttacggtcgggcagtttcggcagagcagaggtttgtgatttgaaacaacaaaaacgtcttcgctagaatcccaaacgcctggcagctggggatggcagaagcatcggtatatcgatgttttcacaactattatcgatctctacaataatcgttgaatttaaatataaatcgaatttatagaacttgggattaaaagattaattataaatcattttcggatcataaatataagtactactctataaaacattttttaaatttatacatggctttactctcgcctggaattttgtgaggaataccatgctaccaaatggttaatactatattaaaataaatctttttcatttcttagcaacttctccctagattttgatgattttgtaactcactcgttgaaaacagccggctctcacgctataagtggatattggaaactgcctgaggcctttatttcgggaaatctaaacgatatttacataaataatttaaaccttgctaatgatgtcgttagaatgcctcttcaaaatgacagtatcaatcttcccttgatagtcgaagcattgaaaactgtccagggcggcactataaatcgtctccatacaacccctgaaagccaggtggcggatgtgcctgtggccaagtggatccatggagcagcctacctttacgggaaccacagtatttctggcattactcatctgaataatgtcaatctctacaacgatcttaccgtgaacgggtctgtaaatggtgtcccctggcaggcggacaagctcattttgatggacaatgagcaggatataccgggctccctgctggtggcgaatagtcttcccgaacagaagcgagttatgagcaataatgtgaagaatctctgggtggatttcgtcaacgatctgcccgttaacgagttactggtcagcaaggcagaaaaccgtcccaatcttcacgtggaaagccaactgatcttcacccagcccctcactgtgggtcactacgaagcgggcaacggaaatgggctgctggataaat

SEQ ID NO: 2537 - DNA, 1029 bp, DROSOPHILA
caaacctctgctctgccgaaactgcccgaccgtaaaaagtgcatttaaccaaacccaatcagcgaccaattgacaagattccctgtgaccatggccaagatacgatcgctggagccggagctggcagaggtggctcgaacgcagctctgcgaggatccgtcctcgacggttgcgaagatcgaggcgctaaggacctggatcgacaaacagatctacctggaggcgcggaccgacgatcagttcttggtggcctttctgcgcttctgccgctgggacgtagaggaggccaagaagagggtactcttctactacacctacaaatcaaaggaaagagaactgctcaagggtcgccaggtggacgataagctgatagaactggctcgttcaggaatattcgccacattgcccaaacctattggccctggtggcccccgcatccactacacacgaatgggtcacattgaaccttccaagcacagtgtcagcgacattttccgcttccacgcttttcgcgctgagatcgagatcaacacggacgacaactggaacatagccggcgtggtggagatcatcgacttcaccaagataccctactctctgctactgcagttcgatcctggcatgttcaagcggatgaatgcattcctagagcatggaattccagcgaatttagtggccacgcacattgtcaatgcatccagggagacgcagtttgtccttggactggttcggaatgtcatgaagcaaaaggagctgttgcacattcactccaccgtcgcgtctctgcgaaaggcaattggattggagtatttacccgtggaaatgggcggcgataatggatctttgtctgatgcaatgacgcgctacgagacccagctgctaagcttttccccgtacttcacggaagacgagcgatatggcgtggatgagaaattgcgggaagccagtgagaaggatcaggaaaggggtgctccgttagtaaccgacgttccgaacgacggaaccttccgaatgattaacttcgattga

SEQ ID NO: 2538 - protein, 312 aa, DROSOPHILA
MAKIRSLEPELAEVARTQLCEDPSSTVAKIEALRTWIDKQIYLEARTDDQFLVAFLRFCRWDVEEAKKRVLFYYTYKSKERELLKGRQVDDKLIELARSGIFATLPKPIGPGGPRIHYTRMGHIEPSKHSVSDIFRFHAFRAEIEINTDDNWNIAGVVEIIDFTKIPYSLLLQFDPGMFKRMNAFLEHGIPANLVATHIVNASRETQFVLGLVRNVMKQKELLHIHSTVASLRKAIGLEYLPVEMGGDNGSLSDAMTRYETQLLSFSPYFTEDERYGVDEKLREASEKDQERGAPLVTDVPNDGTFRMINFD

SEQ ID NO: 2539 - DNA, 3967 bp, DROSOPHILA
cctagtgaagttcatagttcagaagatgcaaagcagtgtatgtatagtgtatgtagtgaaaaatggaccaaattgcattgcagaaaaaaaagtgccacttcttaacatacattttggaaagattacgttctcgagtgactaatgtcaaactgcacgtaagcacaccagtttttcaattacaactgcatttagtttttctttattcaacccttctcttaaggactacgactaaaattaaactatgcattaatatttacaactctcggtctttctgtgagagttttcccctctgttttttggttctttttttttctgaattttctgcagtgcatagactgtgaaaaggtaagccagataaggcaagatattgcccatttgaagggggattttttttcttttgttttagtagcgaatattttttcacaacttggcgaaacaggaacttgcacaatgacgcacttgatagagttaattacaacagatccggatgcaatcatcacaatcgcaatggtcttgcggccgcgtaatccgtttttaaagctaatgtcagtcgcgcgacttgcattcatttcaacatgacgtattcaaagtgaaaccgaatcaaaaattaagaagttaagaatccaaaaatgttgctgcttttagctaaaatcctaattgtggcgtaaaatgatcctacgaataaattaacgagaccgaagatcgctaagtaaaaatgttgcttcggcttaagtaaatggtttggtttggcgagtgttaagtgtcccaggcgagtgttaagtattaggctgctgttgctggttgcacattgctgtggctggttggtaattggtttctagttgctggttgcctgggcgagcaccttggcggctaacggggtcgagggccgggcgggcagcagcttttcaagctcgaatacaccaaatccgcactcgacgacgacgactatcacaaggttcagttttgaggcgcaggtggatgtccgtccgtccgtcgcgccctagtacaggtcatcctccatgttgtggatgagtatcttcttgtcctccttgcagctggacttggacagcgtctgctccaccagcttgggatcgaaacagggctgcaaaatgggaagctagttaatgcaatttcctcacaaacatgcccagtatgcttacagtttcgcagatgttcatgttgcagcagttctctatcgtgatctcgcactgctcggtggccagtgggcgattggtgagcggagtgtctcctgccgagttggttctggcctgcttccgaaccacaaaggtcttcctgatgcgtgggcgcttcggtttgtacaggcgacggattccttgaacgatcacagccactagcagcaagctagaaacgatgcccacgacgagaatgatgatcacgctgctagtccacactctgggcgtaaggcacacctccaaatgctggtactgcggaatagcaatgttggtgctattgtcttgcgccagttcctcacagctgacaggatggaaagatgaaaaattagctagagccgcctgggaattcattagtatagcatacttacatgctgtgacaaccgaagggcacatacatctccggctcgtgcttcaacagacgacagaaaagggagcatatctccgtggagttctgctcgcagcgagctcctccaaacttggctggacactcacagctgggcgcttcgttctcgtccttggacacccgacagtgaccaccattgaggcacagtccggagcacacgctcaactcacaacgctcgcccttgaatcccggctggcagtagcacttggggtaggccaactccgacatctggcatgtgccgtggacgcagtagttgtggcactcgcggatctcgcaacgcgatcccttaaagccagtcgggcagatgcacagatccgtggcagccctgtactcgccgtcgttcatgcaacgctcgtcttcgagcacctttatcttctggtccagcagtgagcgtatttcaaacttcctgctctgctcgtccacgcgctccttcaccttccgcacaatgctggcgcaatggtggtccttctgcagtctctggtagaagccggtgcgggccacaattcctcgcgcttcctcgctaagattggcaacgcgcaccagcggacagtcctcggccaccggctcggggtccttgaagtccgtggaatcagtggaatcctcctcgtctggcttgctagtggtggtaaccttgatcaccggcactttcgggtgactccaaacggccctggtagtacgatccgtccagtagatggcatcgttggtcacggccaggttgaggggctcatggtgcttgtccttcagcaccacctgacgatcggaaccgtccagtttggagctctctaccgagaagaacacgcccttcaggtcgtcaatccagaagaggcgatccgacagctgatccaccacgattcccctgggcatatcgatgttggagctgatgatcacggtcctattgctgccatccagattgatcctctccacagtgggatgcgtgacgttcgagttcgtccagtacagcttgcggcggcacacatcgactgccacgccatctggtcgtccaccctccgcgctcagatccaccagaacctggggcgtcgcagagccgtgaatgggtgcaaagaagatctttctctgctcggtgtccgaccagaagaggttcatgttcagtgggtcgtaggctagtcctcccaccgactcattacccgtgcgtgcgatcgtttgctccgccacgtggttggcggcaatgagatcccgtttcagggagaatatgctgccattgcggtgcttcaggtcattgaagtagatcagctcctccgactcatcaaaggtcagggcggacagctcgtcgaactcatgggcggcggtggctatcgtctgccaggaactgtccatgaactggatcttcgtcctcagcgtgacggcaaagtctgcaagaagataacaacattatttagcatgttaaacgatagcccactgtttgtttggtgtttgaattgaatcgatcgctggtggtgtgctcaataagggaaaccaactagtttttttcagccggacttatttaccgaccgatcactttgatgacagctacgtgataaatatggtggattcaatgcctcgtttgccatgaggcgtggtcttcgtagcgtagatcattaataatgtaaggataatcgactatatacatatatagtgacatattcacatacaaaaccacataacgtagagtaaacatattgaaaagccgcatacgtaaacaataagtgaccaccatgctaatgtggatcaaataacaaaaatatccactctgcattttgacacccccatactgtatgccatctgcgcagtatgcattctaataaacaaattctttgacagcgggcacttagccattcttgtaaacaaatcttaaagtctgcctgctctctctgaggcttctcctccacttaagaatccaagagcaatgctctcccaaaaacactaacatattctttaagcaagcacagaggcttctcctcattttcactttcatttgattttcagtcttaagctgaacgttaatcaataaacaacaaaatcgatcccgaaattttgattcgttttattttggcaaaactcaattttcagcgttggtcttagttcatattcggaacggtccatttaatagactcaaaactatttattgcaaccatttatttgcaattggcgcagtcgatgtgatcagtgttaaagttccttgatgcggtaaccagatttgccaattcctgtgttctttttgttctctgacaaaagccccacgctaacgggcacccacgtgacggttaatatcgctttaagtttttaattaaacctcgacaataaagtgaaaccgaaaaatcacaatttgcctaaacaaacctgaatttattatcaggaagacgctattgaattt

SEQ ID NO: 2540 - DNA, 1842 bp, DROSOPHILA
gactttgccgtcacgctgaggacgaagatccagttcatggacagttcctggcagacgatagccaccgccgcccatgagttcgacgagctgtccgccctgacctttgatgagtcggaggagctgatctacttcaatgacctgaagcaccgcaatggcagcatattctccctgaaacgggatctcattgccgccaaccacgtggcggagcaaacgatcgcacgcacgggtaatgagtcggtgggaggactagcctacgacccactgaacatgaacctcttctggtcggacaccgagcagagaaagatcttctttgcacccattcacggctctgcgacgccccaggttctggtggatctgagcgcggagggtggacgaccagatggcgtggcagtcgatgtgtgccgccgcaagctgtactggacgaactcgaacgtcacgcatcccactgtggagaggatcaatctggatggcagcaataggaccgtgatcatcagctccaacatcgatatgcccaggggaatcgtggtggatcagctgtcggatcgcctcttctggattgacgacctgaagggcgtgttcttctcggtagagagctccaaactggacggttccgatcgtcaggtggtgctgaaggacaagcaccatgagcccctcaacctggccgtgaccaacgatgccatctactggacggatcgtactaccagggccgtttggagtcacccgaaagtgccggtgatcaaggttaccaccactagcaagccagacgaggaggattccactgattccacggacttcaaggaccccgagccggtggccgaggactgtccgctggtgcgcgttgccaatcttagcgaggaagcgcgaggaattgtggcccgcaccggcttctaccagagactgcagaaggaccaccattgcgccagcattgtgcggaaggtgaaggagcgcgtggacgagcagagcaggaagtttgaaatacgctcactgctggaccagaagataaaggtgctcgaagacgagcgttgcatgaacgacggcgagtacagggctgccacggatctgtgcatctgcccgactggctttaagggatcgcgttgcgagatccgcgagtgccacaactactgcgtccacggcacatgccagatgtcggagttggcctaccccaagtgctactgccagccgggattcaagggcgagcgttgtgagttgagcgtgtgctccggactgtgcctcaatggtggtcactgtcgggtgtccaaggacgagaacgaagcgcccagctgtgagtgtccagccaagtttggaggagctcgctgcgagcagaactccacggagatatgctcccttttctgtcgtctgttgaagcacgagccggagatgtatgtgcccttcggttgtcacagcatctgtgaggaactggcgcaagacaatagcaccaacattgctattccgcagtaccagcatttggaggtgtgccttacgcccagagtgtggactagcagcgtgatcatcattctcgtcgtgggcatcgtttctagcttgctgctagtggctgtgatcgttcaaggaatccgtcgcctgtacaaaccgaagcgcccacgcatcaggaagacctttgtggttcggaagcaggccagaaccaactcggcaggagacactccgctcaccaatcgcccactggccaccgagcagtgcgagatcacgatagagaactgctgcaacatgaacatctgcgaaactccctgtttcgatcccaagctggtggagcagacgctgtccaagtccagctgcaaggaggacaagaagatactcatccacaacatggaggatgacctgtactag

SEQ ID NO: 2541 - protein, 601 aa, DROSOPHILA
MDSSWQTIATAAHEFDELSALTFDESEELIYFNDLKHRNGSIFSLKRDLIAANHVAEQTIARTGNESVGGLAYDPLNMNLFWSDTEQRKIFFAPIHGSATPQVLVDLSAEGGRPDGVAVDVCRRKLYWTNSNVTHPTVERINLDGSNRTVIISSNIDMPRGIVVDQLSDRLFWIDDLKGVFFSVESSKLDGSDRQVVLKDKHHEPLNLAVTNDAIYWTDRTTRAVWSHPKVPVIKVTTTSKPDEEDSTDSTDFKDPEPVAEDCPLVRVANLSEEARGIVARTGFYQRLQKDHHCASIVRKVKERVDEQSRKFEIRSLLDQKIKVLEDERCMNDGEYRAATDLCICPTGFKGSRCEIRECHNYCVHGTCQMSELAYPKCYCQPGFKGERCELSVCSGLCLNGGHCRVSKDENEAPSCECPAKFGGARCEQNSTEICSLFCRLLKHEPEMYVPFGCHSICEELAQDNSTNIAIPQYQHLEVCLTPRVWTSSVIIILVVGIVSSLLLVAVIVQGIRRLYKPKRPRIRKTFVVRKQARTNSAGDTPLTNRPLATEQCEITIENCCNMNICETPCFDPKLVEQTLSKSSCKEDKKILIHNMEDDLY

SEQ ID NO: 2542 - DNA, 4198 bp, DROSOPHILA
tgtcaaggaaagaagtattaacgagtgcttctctttccacttacctgcgttctaccaaatctaccaataattcttgtgtctttgaatctacattgagtcaggaaagatttataattgtagcaacattatagaggggaccatagccatacatgaaactattagagatttattaatattaaagtgtagaattctttgcattaataatgcatattacaatgttcgagttttatatttgtcgtattaattggcaagcagaaaagtatcataagtccaaatgttctacagttttgtatatttgtaaattaatgataatctaagtactgtaaaactggagaacatttattcctgtaaaaataagcaataaaaaatatttataaaaattttaattagttttttcgtgagtaaagggtatctgatagtcgaggcactcgactatagaattgttatgaatgtcatgcaattaatgaaattgttttatttctccgactcatcctgaaaggaatcaccaaagagacgccacagcttattagggcataattgcggacattatttacaataaaaaaacacgaaatttatgtaatacaatgattaatatattttagtcatatgtccaacatccaggacgacaaaaagtactttatgtgttaagtgacttaattgtggactcccactagtcaaaaaaatattttataaatcaaccaagataaggaaagaataaatcataagacttctttagcttaatacgaccttaaaataattaatgtgtgtattgcatatacactagaaatacacacactagaaatatactttgccatccattaggtgaaggcctaatccaaggcctccctaccatggattggcacagataaatttgtagacatttgcagtcttatgctgaagacaatgtcgtggtgaaatatttagtaaaaatgacatcgtaactctattttacccatggctgcaatttttaacaaataacaagtacaatacgccgacggtattaaaagaatataaaagaatttttatgatcgacattttacatttaatttaagaacatctaactttaaatgtaacgcttccggtgttatttgcataacttcttacattttgtcatcctaatcatcgaagctagacgatagcaaaaaattagctgcttgttcctcgttcttttcacaagcgaagtacgcttgcagtacaagggcctctgggaatccaagagcttttagctagaagaagaatatattaagtaactcgacagtccatatataattattcactcctatatacccgttctattgcgtccttatcttggcgatttaaacgaatggttgatactcctaaaggttgttccaagtcttcgttatccgctgcgctaccgctttgatgtgctgcacttgtacccgcggctgatctttgtgctgaagtagctacttctaaatctggagaaaagaggtcaacattgtccaaagttgaaggaatccgcgcattcgaaacgggaggaacggtggcgcctgactccgattcgcggtcaatcggttgattaagcatattgagaaacgcatcttggttctccgaaataagttgtaaaagggctgggtttgtctgaccaatctatacgtaaaaaaaattatcatttacgtgtcatgtaattattattataagtgtacttacctgctgcaatactgcatgcaaaagatgagggttttgataaattaaagatcgcatttgaagaaactgtggctggctacgtaaaaattcaaaggggtctgaaacgtaaatataaataattaaataataattaaattaactaaaaacatatagtgatgccctgtccttgaagagaatagtgacaaaaattcgtgaattatcgctcctttagtgtctgttgacatatatatgtaaatgatactgcgggacaacgagctcacaaacattttagtgaatctttaacagctgcatatatttccagtactaagagaactcttttattatttattaacgaatgtgcaacataagttttgatcaacaatatttcttgaccaggaaaactaacgcaattatgttaaggccgtataatttcattaaagagcgagagccaaatcgggtttattaatttcactatgttttgaagtgtgcaaatttagtacttctgggtagaaattatatattttcgtttcatacaagaatacataaattgactgctgattgaaatcccatcaagttacctgaatttgattctgttgaacgctcggcagaggttgccgacgcaggttgcggtccggaggggattagactaggattcgttgattcattcagcctattgtaaaaagtaccttcctctgcaggtatgccattaatgagatattcaacggctctttccgggttgttataactagcagccatcgcacgttcaacctgctctcttgggtaacccatttccaccattgataggactgtttggttgtattcgtcacccataagcaaattagattcagcgcgcgattgtaaggaagcctgggccaactcgccaatcaattcgtcactagataaaggtctggtttcacgtgataaaactgaatcttctgtatttgtggaactaggcgaattggtatggttggcttcttcgcaaggcatagattgctttgaatcgtcggtgctagtcaatttattactttcttttacactaagttgattacgatttgaactagacgaatcgcgtgtcaacattaccacaatgaactttttttcatcaacgttgtatgaaccaacggtgcggtcatccgtcaatatgacgccagcgtagatcagtttttgtttttcggcgacgtactctggaccgcgctcctcgaatattttcttcttcagttccaaaaccttttgtaatcagaatccctgcttattatggtacaacaaattaattgtaagaaatacctgtataagcacacatatgcatttgcaataattgtatataccatacatgtgaatatactagtatttgactatttgtacacataccgttttttccggggcaaactcaatagtaaaagtttgctgttgaagatttttaattgtaataatcatcttgtgtatcagacaaaaccaaaacttaattaaatatacatatgcatacacatatgcaaactcgaaagttagttcccaatatcgcttgataaaaacgatttgtcatcagtgtgaccgcacatggactggcaaattataccttctcgcttaaaagacacaaaatcgcagcacaaaccaaagagttcaatagtccttataacattttcacacatcaagaaagatgtaaagatttgtaatgaaatttataatgaaatatgaaatattgaagtcataatgaacgtaacaaataaacaattgtccgtggtttgactgtagttagtatttcattatatcaacgatttagatcatactatatacaggttatacctgtagtatataagtctatttataatataccatcggttgatgatcaataaatttcaaagaaatttaatttttaattccgtttaagtagttcggtatttctttaaaaatactttagtttaaccaaagacactagaataacaagatgcgtaacggccatacattggtttggcactatgcagccacttctttggtgactgccaaaattactctctttccgctcactcccgctgagagcgtaagaaatctaaaaatataatttgattgcttgtgtgagtaaaaacaagagacgagaacgcgtataagtgtgcgtgttgtgctagaagacgattttcgggccgaaatcaattctgatcgaagaaacgaatttacatggtacatattagggtagtttttgccaatttcctagcaatatgataaaataaaaaaatttttaaaaattcgcgccctgactattataattttaaagctttttaaatttgtttgttaaaatcgccgctcgaattagctaccgtttacacatttatatttatgtttaattctaatttgtctctcatctgacaattttttaaaagagaaattatttttttaaaacacttttaatgttaatgttacatcatattaagtcaaatgatttaataaatatactaaataattaaatatgataactgtttattgcaaaagtaatatcaaagtaatatactagaataattctaatgctttgttcatatcttgaggcaccgaagtgcgggac

SEQ ID NO: 2543 - DNA, 1477 bp, DROSOPHILA
cggtcacactgatgacaaatcgtttttatcaagcgatattgggaactaactttcgagtttgcatatgtgtatgcatatgtatatttaattaagttttggttttgtctgatacacaagatgattattacaattaaaaatcttcaacagcaaacttttactattgagtttgccccggaaaaaacggttttggaactgaagaagaaaatattcgaggagcgcggtccagagtacgtcgccgaaaaacaaaaactgatctacgctggcgtcatattgacggatgaccgcaccgttggttcatacaacgttgatgaaaaaaagttcattgtggtaatgttgacacgcgattcgtctagttcaaatcgtaatcaacttagtgtaaaagaaagtaataaattgactagcaccgacgattcaaagcaatctatgccttgcgaagaagccaaccataccaattcgcctagttccacaaatacagaagattcagttttatcacgtgaaaccagacctttatctagtgacgaattgattggcgagttggcccaggcttccttacaatcgcgcgctgaatctaatttgcttatgggtgacgaatacaaccaaacagtcctatcaatggtggaaatgggttacccaagagagcaggttgaacgtgcgatggctgctagttataacaacccggaaagagccgttgaatatctcattaatggcatacctgcagaggaaggtactttttacaataggctgaatgaatcaacgaatcctagtctaatcccctccggaccgcaacctgcgtcggcaacctctgccgagcgttcaacagaatcaaattcagacccctttgaatttttacgtagccagccacagtttcttcaaatgcgatctttaatttatcaaaaccctcatcttttgcatgcagtattgcagcagattggtcagacaaacccagcccttttacaacttatttcggagaaccaagatgcgtttctcaatatgcttaatcaaccgattgaccgcgaatcggagtcaggcgccaccgttcctcccgtttcgaatgcgcggattccttcaactttggacaatgttgacctcttttctccagatttagaagtagctacttcagcacaaagatcagccgcgggtacaagtgcagcacatcaaagcggtagcgcagcggataacgaagacttggaacaacctttaggagtatcaaccattcgtttaaatcgccaagataaggacgcaatagaacggctaaaagctcttggattcccagaggcccttgtactgcaagcgtacttcgcttgtgaaaagaacgaggaacaagcagctaattttttgctatcgtctagcttcgatgattaggatgacaaaatgtaagaagttatgcaaataacaccggaagcgttacatttaaagttagatgttcttaaattaaatgtaaaatgtcgatcataaaaattcttttatattcttttaa

SEQ ID NO: 2544 - protein, 414 aa, DROSOPHILA
MIITIKNLQQQTFTIEFAPEKTVLELKKKIFEERGPEYVAEKQKLIYAGVILTDDRTVGSYNVDEKKFIVVMLTRDSSSSNRNQLSVKESNKLTSTDDSKQSMPCEEANHTNSPSSTNTEDSVLSRETRPLSSDELIGELAQASLQSRAESNLLMGDEYNQTVLSMVEMGYPREQVERAMAASYNNPERAVEYLINGIPAEEGTFYNRLNESTNPSLIPSGPQPASATSAERSTESNSDPFEFLRSQPQFLQMRSLIYQNPHLLHAVLQQIGQTNPALLQLISENQDAFLNMLNQPIDRESESGATVPPVSNARIPSTLDNVDLFSPDLEVATSAQRSAAGTSAAHQSGSAADNEDLEQPLGVSTIRLNRQDKDAIERLKALGFPEALVLQAYFACEKNEEQAANFLLSSSFDD

SEQ ID NO: 2545 - DNA, 5470 bp, DROSOPHILA
attgttatgtacgaagacaggtttcttcacatcttttcaaacattacattctacaatccactcaaagtttgattgctgtatgttaacggttcgaaaactttagctcggggtcaccttttttttttaaatcggttaaaacttataaagggctactattatattgggacttgtttaaagtgccagtcaactaaacgatgttacgtgcaacttattgagcacttttgcggtccactctaatccactagaactctagacgcccagaaacctgaactttgcttccgaagctctccagtgtgcgatggcagtgacgtaggcggccagcccatcgaatctgagaccgaaatacgaaactgaatccgaatcagaatagaagcgatcaggccaccgggcaaaggcctccgagacccggctgactgataagttatcagcaatacgaaacgaaacgaaacggaacgcaatggaccctcccccgtcgaccccctgccaataaatataaattcgagttcgctgaggtggcatgtggagaaaatcgggaccataaaaaataaaagcaagatcgggggcactgctccctctcaatggagtccgatgatcctccactattcccccacaacacctttggaataatggcgaacgagatgagagcgatattaacccatgaaatgaggttaatatgatgcatatggagcatttttaaattcgagtgggaggagaaaatacttttgagaataatttgcaaatttttttctactgctaatatctctaaagagaattcatagtactgcacacaccttataataataaatagctctatgtacttctaaaattcgcaaatagatcataaaacaagccagctgtattaatgattagaaaaaaaagatcgtagcaaagtttatttgaggcatgccgaaatatttacaaaaacaatgacgatggggctctgctcccgcccttcaggaacccatagcgtaatgctgctgatattggatgggatcggcggctataagcagtcgaccttgaggtatatgcgttgctcactggctagcagcgcgaacttggcgtcgaattgaatccgctccacggtgcggtcgcaaatctcgacgcgatgttggtgcaagaagtaaacgaggcccagctttatctgcagcagtccgatttgcatcccgatgcaattgcgcggccccgccccaaagggcatgtaggacatgggcgcctgcagcgccttgttcgccgcactaaagcgctccgggtcgaatcggtccgggtccggccagtactgcaaaggaaatagcccaatgaataacgctcttctagacagaaatattactttaactactctttatgattaaacataaatcattcccccaatttgttcatgttaaatatccgatacaagttaaaagcttctttggtataaggatatgtttcatgcatattatgcatagaaataggaactcgttaggaactaatacagatacttgtctgttcgatatcagaatgcccgaaactttcctagctcgatcgctctatgaatcaaactactgattgagctgaacaacacttgcagttttgcagttatgggaatgtgttaaatgcaactgcgcactcaccttaggatcgtgatgtatggccagattggatatgaacacgggcatcccacggcgggtgtagcactcggcgtgtggcctcagcgagtagaagcgcttcttgttaatcggcgtgcactcgcgctccaagagtggcacaattggatacttgcgcagagtctcctccacgaccatgtcgagaaactccatgcgggcgacggcctcgtaggtgagcctcccattgggattgctggcgaaagcctcacgtatttcgcggcgcaggcgcgactgcatcaggggttgtttggccaactcgtagagggcgaaggacatgctcgccgagcaggtctcaatgccggccacctcaaaggatgccgcctgagcggccaagaagtcccgatggtgcgtgaagtgcgacttgtcctgctgcagatccgcctccttcttgagcgtcagcagcatctcgatgagatcgttgcgcagatcaccgccacgctcccgctcctcgatcaccagctggatgactcggcgcaggaattccgcatgcggctccgtgaaaagtttgggccgcagcagcggcaccagttttggcaggtaaaagatcacaaacaagtcgattattcgacgcacattcggccgaaacaggtcctgacaatgtgagccgatctccgattgcgtgttcctcaggctgtacgatctcagtccgaatgcgatgctggctatcatgtcggtgttgtacagatcacacacgtccttgatgctcacaatcgcccctcgctccgcgtcgccgcgtctaagatctcgagtcagacgcttcagataccactccaagtcgcagccgatctacggagatatagaacatcccacaaggagcacagagcaaacggattgttaatcaataaataggtatccaaatgttgctgctagagctaatcagtgtttcattaagtgtttgtttcattagtgcctcgatgtgattcttgatatttgcataacagatatacaacagaaaaaccttagagacttgtcaaccgtttggacatgagtttcagctttgtcatgggaatttgcattatcacaatgattagtaaattcgatttgttttactgaaacgcacacagtttgtgatttcttagcattaatttgcatagaacttttggttcgactaggcaacaaactaagcagaggagagctaaagtcttgagctataaacgttatggtttttttttcgtagtaatgccgtagttggtggtgacctttgataagatacaacaagtcagtaacaataaacaggttcgatttgataagccccagatagcaacatggcccgttagagaggttcttttatcattaataatcaataatataagatatgccatttcgtaactcattgatcaaaattggaaacattacaatcagaagaggaaatttaatggaacctaaaaaattgaatttaataattttacccagtagcttggtgtaagtgccgcacctcgaaatattaaaatatagctatgatccaaaacgatatgccggcgaaacacttcgattgtaagggaatggaattcgatttgaataacaggcagttcctatctttaaatggaatcggtgtaattacaagtcaaaccagagtaaaatagtattgttggttatttttttcttcaatcgggccccgcgattaagcgtggaaatgtgtgttgtgttggtcggtgtaagagttccgaacgtgtgtcgtggacctgggagcgggagtttgcaacttggacccggctggttgagtgactcacctcctccatcagcgagaacatctgtttcagcttggcgccagcgaaggctggtgctaaacgggtgcggatctcgcgccattcgggttgtttggccaaaaatagcgataaggcgcccattttatcgctgcgcccgtcgcacttggcgaatcggttggagaagctgacgaaatcctcaaccagaacggtgcggaccagctggagatcgcggataagcagggctggctggtggaacagatagatacccacgacgggctcgttgcgaaaccgctcgtcgaagtagaagcggcgcaactggagagcaaaggactcctccagtcggagcacccggctcaggttgcccagcaggtgggtcggctggacgaacttcacccgccggcgctgccagtagacgtaggtgcgccgggaccagatgaacacgcccgtcaggatcgtcactatcgccagcaggatgttcgtggagtacaccatctcgcactcgggatccgcagtcaggtccagcggtggctgaatcgtggagggatatgcggatagtgccttggattgaccgatctaagatttcagattattccagcagttgtgacctcttcgcttttgttttgatcgtctgtttgttgtaagacacaatgactccggatatggtattttttatacgaccgtagttaacttgctatgttttttaagctaaagttattagttgttctctgatttcatatatatataaagtactaaagagcttttaaatgtatttattcagtgaaaattcaatagtattttttttttttttttgtaatgatgcttctttgatttcttcgtatttctgatgtgttttttagttgcacagagatctttaatttatccaattcatttctaactcctgttggaaatctatttgaacttcgctgatttcatttctcttaagagcgttctattttcccagcaatatttcttcttcgaagatcgtccgatagtctttcttcaagttttgttttcaatttatttagtcggggctttcgaacaatgtggttgacaaattttattttatctgcgcggtttaataatattctgcattttccgttgttttatggttgtttctgtttctgcttttgctttagctctacttttttcttatcgttttggcgctcctccgcgtggggctttgccgttatttgttgattctctttgtctttgttgtttttgtagctcctttgcgttgctctcttttccgccaatcgttgtagttgttgttttgttagcaatcctcaatgtccctttatcgggctttctggcttttctcggcgtcgcgtgttttataaataaatacttaactaattatatcacatttgaaacgacaactacaaaaaaatatgtaaaaaaaatgactaaaacagaccacaatgaagaattaaatgcacaacaacgcgacgtcaacaacaaatggaagaggcgaaagaagaaatagccacgccgaacgaaaagaagaagagcaccgcgcagaaagacacagagagagggatagaaagagaagtcgcaagagaaatgcgaaaaaaccgcgaatacaatttacaaatagcgaattacagaaaataagtctaaaaatataaataaaatcgcttgctagctccaccaagcgacgctttttaactgacgctacgtcaacgaccaaagccccacgaaggcagcgacgtcgacagagcggcgacgacgcccccatcaacgtatgctgttcttttgtgctttattttattaaccgcaagtttgcgggagacaaaagagagagggagagatctttcggcgggatagtacacagatacagaagagagcgcaaaaagagagctttgcgaagaatttgaacagtcatgtcatgaggcacatgttctagttcgcacagtgaaactcattttagcgaggggtggtcaaatgcggtttcgtccaggtaatcgaatgcacagcgaccccacagcaactacatacatgacaaaaatccatattttttaaattaattttaaaaagtcttaaaataattgaatttgtatgtgatgcgatcaatgtgatggtcaaatgtgatttcgtccaattaataacatcccacagcaatgc

SEQ ID NO: 2546 - DNA, 2192 bp, DROSOPHILA
aaacagaaacaaccataaaacaacggaaaatgcagaatattattaaaccgcgcagataaaataaaatttgtcaaccacattgttcgaaagccccgactaaataaattgaaaacaaaacttgaagaaagactatcggacgatcttcgaagaagaaatattgctgggaaaatagaacgctcttaagagaaatgaaatcagcgaagttcaaatagatttccaacaggagttagaaatgaattggataaattaaagatctctgtgcaactaaaaaacacatcagaaatacgaagaaatcaaagaagcatcattacaaaaaaaaaaaaaaaatactattgaattttcactgaataaatacatttaaaagctctttagtactttatatatatatgaaatcagagaacaactaataactttagcttaaaaaacatagcaagttaactacggtcgtataaaaaataccatatccggagtcattgtgtcttacaacaaacagacgatcaaaacaaaagcgaagaggtcacaactgctggaataatctgaaatcttagatcggtcaatccaaggcactatccgcatatccctccacgattcagccaccgctggacctgactgcggatcccgagtgcgagatggtgtactccacgaacatcctgctggcgatagtgacgatcctgacgggcgtgttcatctggtcccggcgcacctacgtctactggcagcgccggcgggtgaagttcgtccagccgacccacctgctgggcaacctgagccgggtgctccgactggaggagtcctttgctctccagttgcgccgcttctacttcgacgagcggtttcgcaacgagcccgtcgtgggtatctatctgttccaccagccagccctgcttatccgcgatctccagctggtccgcaccgttctggttgaggatttcgtcagcttctccaaccgattcgccaagtgcgacgggcgcagcgataaaatgggcgccttatcgctatttttggccaaacaacccgaatggcgcgagatccgcacccgtttagcaccagccttcgctggcgccaagctgaaacagatgttctcgctgatggaggagatcggctgcgacttggagtggtatctgaagcgtctgactcgagatcttagacgcggcgacgcggagcgaggggcgattgtgagcatcaaggacgtgtgtgatctgtacaacaccgacatgatagccagcatcgcattcggactgagatcgtacagcctgaggaacacgcaatcggagatcggctcacattgtcaggacctgtttcggccgaatgtgcgtcgaataatcgacttgtttgtgatcttttacctgccaaaactggtgccgctgctgcggcccaaacttttcacggagccgcatgcggaattcctgcgccgagtcatccagctggtgatcgaggagcgggagcgtggcggtgatctgcgcaacgatctcatcgagatgctgctgacgctcaagaaggaggcggatctgcagcaggacaagtcgcacttcacgcaccatcgggacttcttggccgctcaggcggcatcctttgaggtggccggcattgagacctgctcggcgagcatgtccttcgccctctacgagttggccaaacaacccctgatgcagtcgcgcctgcgccgcgaaatacgtgaggctttcgccagcaatcccaatgggaggctcacctacgaggccgtcgcccgcatggagtttctcgacatggtcgtggaggagactctgcgcaagtatccaattgtgccactcttggagcgcgagtgcacgccgattaacaagaagcgcttctactcgctgaggccacacgccgagtgctacacccgccgtgggatgcccgtgttcatatccaatctggccatacatcacgatcctaagtactggccggacccggaccgattcgacccggagcgctttagtgcggcgaacaaggcgctgcaggcgcccatgtcctacatgccctttggggcggggccgcgcaattgcatcgggatgcaaatcggactgctgcagataaagctgggcctcgtttacttcttgcaccaacatcgcgtcgagatttgcgaccgcaccgtggagcggattcaattcgacgccaagttcgcgctgctagccagtgagcaacgcatatacctcaaggtcgactgcttatag

SEQ ID NO: 2547 - protein, 520 aa, DROSOPHILA
MVYSTNILLAIVTILTGVFIWSRRTYVYWQRRRVKFVQPTHLLGNLSRVLRLEESFALQLRRFYFDERFRNEPVVGIYLFHQPALLIRDLQLVRTVLVEDFVSFSNRFAKCDGRSDKMGALSLFLAKQPEWREIRTRLAPAFAGAKLKQMFSLMEEIGCDLEWYLKRLTRDLRRGDAERGAIVSIKDVCDLYNTDMIASIAFGLRSYSLRNTQSEIGSHCQDLFRPNVRRIIDLFVIFYLPKLVPLLRPKLFTEPHAEFLRRVIQLVIEERERGGDLRNDLIEMLLTLKKEADLQQDKSHFTHHRDFLAAQAASFEVAGIETCSASMSFALYELAKQPLMQSRLRREIREAFASNPNGRLTYEAVARMEFLDMVVEETLRKYPIVPLLERECTPINKKRFYSLRPHAECYTRRGMPVFISNLAIHHDPKYWPDPDRFDPERFSAANKALQAPMSYMPFGAGPRNCIGMQIGLLQIKLGLVYFLHQHRVEICDRTVERIQFDAKFALLASEQRIYLKVDCL

SEQ ID NO: 2548 - DNA, 5702 bp, DROSOPHILA
cctcatccgagctctgtttctccccatctctcatcattcagatctgcgcgttacgaccgaaactttggcggaggagggcggcaaacacggcaagccggcggacaaggcccagcaccagatgcacaatacgaaccaaagtcagaattcggatgtcaatgtctacagggagcaccagctggacgcctggaagctggagcgcagctacacgctggccgtggagtcgcgtcacggcatcattggtacattgccttacatttattactatatttactaaaaaaaaaatccccaaaattattaccaaagtatagggtctcgccataaatattttattcacttttgataggaaaatccgctacttgaattatttgaaaaaatttctgtctgtcagttaacaaaagtagctgaatcaaaactgaagccacttgagcgctacagaaaaatttttgctgacctctgctgcctataaaaaaaaggattcaaattgtaaaattctgtgccatcatccacttgtttgaacataaatccctttattttttaaatctacccctgtagatattgaatgttgtgcaagtacctgtgtgtgggaaatatatatttgaccgggcatttgtatagtccatcgttttttgttagcctgattccgaataactggatccacttgaactcgtattttaatcgcttttatccgcagagtacgagggctcgcccagacgcattggtgtaactaccaccagcaatttgggggcaactggagcggcggcggcatcagcagcagcggacgaaagcgaaccaccagcagcggcagaaggtgcagctgcagcaacagcaacatcgcaaccacaacagcaggtgcccatggccactgtaccaccgctgagctccacggctacctcgctccagaagacggccgcccgcgcagcattggctgctctggcccagagccatccacacagctcccacaatatactcagcaccctgcttccgcactctcctaatccagtgaatcccggccagatgcacgcggcgcagcagtccatccagaactatcccgtgcgtcctggatttccgcaggttcgtttcttcaattatttttcatttttttcattttttatttataaataattgattgatttcagcgcattatctcgccgcccagtcgtgacccgaggagcagctcccctcctctgcagcagcagcaatatcagcagcaacaacagcaacagctgcaacatcagcagcagcactttgccagtctgatgagcagtcacagtaacaacaactccaataccaacaaacagccgctgagcagcgacaataatgcggaggacaccagcaacgatgtgtccgagattggcaccatatccgacctgaccactccggaggcagtgggtctgtctattggaatcgctgcaggcgagatggccagccgggcgagcactccaccgcaaacggcacaagcaccaccgacagcagtggcgggcagcactgccaacggaaccggaagcggaaacggaacagcaaccggaaatgcaacagcagcgggcagcggattgggtcccttgagcctgcacacgaaatcatcgaccttcgattatctctacgagttctcggagacgcgcaaggtgctggaggagtttttcaaatgcccctccaccgacgagcagcccatcatggaaaatggtagcgatgtggacagcattgtgagtaggatgaagatgattgttgtttttacaacacacaattttcatagaattatttttctgaattttatacaatctatatatatatattatttttcaaggacatccagtacgagttccacagcaactttgagcgcgacgaggaggatttggccgaggaggaagaagccgaagacgacgaggaggtcgacgacgatgccgacgaggaaaacgatgaggccgaggatgaggacgagccgttggaacaggatcgtgaccagaactaccgcgcacaggcgcctccccaatccggccacatcgattccgagcgccttgtttacagtggttatggacagcagccgcaattgcaggcacagctcaccgctcagccgatgagcggggcgagacgacactatagcggcagtccgctaatgcgggactttgacttcttcctggactcgaccagtcggagcagcggcgagcgggatgccgaccaggatgggctaaatcacaaccagctgctgagcacgagcagcggacatggcggaggcgtgggcgtgagcggtggattaggcgtgggaccgggtggaggtcacaattaccgctattcgccggaaaccaccgactacgattccaactgcggcgatctggacagtaagtgcggcaatttgaaatacccgaaatttttagcaaatccctttcgattttccaggtctctcaggggagatgaatggcggggtgtcgacctcctgctcaaactacgcaaagttctatgcctcggccatgccggtcctggaggatggcctctcctccggtcacaccagtgacaccgagaacaacaacaacaaccagaagaacctgcagcagtcgacggtcaaccagggtggccagtgcccaaccagcttaagcggtagcactagcattggtggcagtggaggcatctccatgctgatggacatgaagcgcatctcgacgaaccacagcctcaacagcatgaataaccagaccaccaccgcctccacgacaacggatagcaatggcggcgtcggcggagtgggtcaccacctggtggccacactggtggccagtcccaacaatgagcaggcgaagtcgcagtgtcaaacgcagctgcaatcccatccgccaaagacattgtcactagatcagagtcccagcaaccacagtaaagtgttcaagaacattgatccagagttggattcgctctactcgatcggtaagtggtttgaccacattggtgtcacatttgttatccctctcacatataatatatttatttatccttatttacttctaggagtcttccaccgtccagacacggtgcagatgacgccacctccgcccgctccggcgccacatcgaaagcccaacaataatggctgctccagtggcgttgtgaacactaatggcagtctagccggtggcagcaacgacgtggatttgctgcagccaagcagcaagcacactccattggcggcggccattagttccacgctgcagcgcagttcgcccacttcgacgataaccggcaatggaattggaaacggaagtggaaagaccagaagcgccggcagcaattgcagcagcagcgccaacggcggcatgccaccgcccattccggagcgtaccaacctcgtatccgcagtgcaaagatctccatcgcctggccccaactcacccgtatggctatcgcgccatttggacggcggtgctggaaaggatctgctggaatccggctcggataaccactcaaagaaccacagtgccgacgaggaggacgtggacaccgatctggagacggaccgcctgctaggccaccagaggctggacgaccagggctactacgatgagaacaagagctgggatcgtaaaccgcgctcgctgctctcgaagatctcgcccaagcagcagataccgagcactaagacgcgcaacggctacaatgccctgctcagctccacgccggagctaccgcccccgattccgccaaagggtcagtccggattgggattgggtctcactctgggtgccggtaatggtggcaagctgctcgacttggttggcggcatggtccagcgcagtttatcgcggagttcgtcggagcacagtgagaaatcgctcagtaaaatgccaatttctggcggggatctgtgtgccggcggcgtggatgtggtagcctcaactgtggcggccacctcggcaacggtggtggccagtacgccggcgttgggaagtccaggcaacgggggtggctcggagagatcagctgcagaaatggccaatccgggtggagccgttaagctgagcgagcaggagattggaaccattaacggtggcagtgttatgccattgggatcaggatcgggcactggatctggagcaggatcgggagccggatctggaacgggaaccaatgcagctgtggtggccaatagcaacgccaacaacaacgtcggcggcggcggcggcggcggaaacaacagcagcggcagtggcgccggcagcaacagcaacagcggcgagaaaaaagtgaaaaagagtaagagcaaagaaggtaaatgcgttgggtttatccttcgtttgattgttcctatatataaccaaataaccatatatccgtatatccatatgcatatatatactatttatatatatatatatatactcttgtggcctgccatgttgtcggtgtgcattagatgttgtcgttgtcaattgtcgcaaacaacgaaacgctaaatttcgaaagcgtagcagagcaaattcaaaattcaatcgtggctgcgtaaatacgaaattgtattgtataatgtgtaatttgataatcctattatctgcaatccaatttttgatcaagataatccgtattaatcgtatatatattttttacctatcatttctctgtattctttcgcatatttatttgcgtatttttgcatgcgtcgttcgttcgttcaaccaaatcaataaaccaaactctactcttcattttactgtgtctgtgtgtgtgtacaatactttgtaagataaagttccattatgtaatagtatctaagatacaacactaacaatatcacacgaaacaaggagtcattttttttcgcttggttctgtctttataatatataaatagttaggaattttggcttttaggtgataaaactaaagtattaaaatacccattccgaaagtcctctatattgtttttaaagattagtgataagggcttgaaaatacaaaaaagttttgttaaactatttcatttatagttctgagtaatggattaagcgatcgatatatattaccaacgcaataagttaggcttagtattccaaattataaaggatcagtttctatacaaaattgctagcccacacatgcacatacacactaatcaactaacactggacatgtactctatgactatcgattcctgtccaactgagtttctaactatgtcattcatcttctcatccgtctcaccaactgcaggcggtgcagtgctcatcgagggcgttctcttcagggccaagtacttgggctccacgcagctggtctgcgaaggtcagcccacgaaatcaacgcgaatgatgcaggcggaggaagccgtctccaggataaaggtagagtatcctccgacatttcctaaccaataatgctcgcccgactcgatcgattgcttcgatcagctagagtttcttttgtgccgtgatccgttctgtgtttgtagtgggtagaaatcctgtgatccctaaagaaaatccagatcagagattgccacagatcttaaaaatattgctttccttatttttttttaacatatttgtttaacaccttgaaatgaaaaatctctagcatgacaatttcaaaatattatttaatattcaacattcttaacattgacaattgaaatttttatgattttttttattgtttttaattttcaagattaaattatatttgagtaaatattagattgtgacaatcgcctgaattgctcctcta

SEQ ID NO: 2549 - DNA, 3088 bp, DROSOPHILA
tgaatcccggccagatgcacgcggcgcagcagtccatccagaactatcccgtgcgtcctggatttccgcagccgctgagcagcgacaataatgcggaggacaccagcaacgatgtgtccgagattggcaccatatccgacctgaccactccggaggcagtgggtctgtctattggaatcgctgcaggcgagatggccagccgggcgagcactccaccgcaaacggcacaagcaccaccgacagcagtggcgggcagcactgccaacggaaccggaagcggaaacggaacagcaaccggaaatgcaacagcagcgggcagcggattgggtcccttgagcctgcacacgaaatcatcgaccttcgattatctctacgagttctcggagacgcgcaaggtgctggaggagtttttcaaatgcccctccaccgacgagcagcccatcatggaaaatggtagcgatgtggacagcattgatcgtgaccagaactaccgcgcacaggcgcctccccaatccggccacatcgattccgagcgccttgtttacagtggttatggacagcagccgcaattgcaggcacagctcaccgctcagccgatgagcggggcgagacgacactatagcggcagtccgctaatgcgggactttgacttcttcctggactcgaccagtcggagcagcggcgagcgggatgccgaccaggatgggctaaatcacaaccagctgctgagcacgagcagcggacatggcggaggcgtgggcgtgagcggtggattaggcgtgggaccgggtggaggtcacaattaccgctattcgccggaaaccaccgactacgattccaactgcggcgatctggacagtctctcaggggagatgaatggcggggtgtcgacctcctgctcaaactacgcaaagttctatgcctcggccatgccggtcctggaggatggcctctcctccggtcacaccagtgacaccgagaacaacaacaacaaccagaagaacctgcagcagtcgacggtcaaccagggtggccagtgcccaaccagcttaagcggtagcactagcattggtggcagtggaggcatctccatgctgatggacatgaagcgcatctcgacgaaccacagcctcaacagcatgaataaccagaccaccaccgcctccacgacaacggatagcaatggcggcgtcggcggagtgggtcaccacctggtggccacactggtggccagtcccaacaatgagcaggcgaagtcgcagtgtcaaacgcagctgcaatcccatccgccaaagacattgtcactagatcagagtcccagcaaccacagtaaagtgttcaagaacattgatccagagttggattcgctctactcgatcggagtcttccaccgtccagacacggtgcagatgacgccacctccgcccgctccggcgccacatcgaaagcccaacaataatggctgctccagtggcgttgtgaacactaatggcagtctagccggtggcagcaacgacgtggatttgctgcagccaagcagcaagcacactccattggcggcggccattagttccacgctgcagcgcagttcgcccacttcgacgataaccggcaatggaattggaaacggaagtggaaagaccagaagcgccggcagcaattgcagcagcagcgccaacggcggcatgccaccgcccattccggagcgtaccaacctcgtatccgcagtgcaaagatctccatcgcctggccccaactcacccgtatggctatcgcgccatttggacggcggtgctggaaaggatctgctggaatccggctcggataaccactcaaagaaccacagtgccgacgaggaggacgtggacaccgatctggagacggaccgcctgctaggccaccagaggctggacgaccagggctactacgatgagaacaagagctgggatcgtaaaccgcgctcgctgctctcgaagatctcgcccaagcagcagataccgagcactaagacgcgcaacggctacaatgccctgctcagctccacgccggagctaccgcccccgattccgccaaagggtcagtccggattgggattgggtctcactctgggtgccggtaatggtggcaagctgctcgacttggttggcggcatggtccagcgcagtttatcgcggagttcgtcggagcacagtgagaaatcgctcagtaaaatgccaatttctggcggggatctgtgtgccggcggcgtggatgtggtagcctcaactgtggcggccacctcggcaacggtggtggccagtacgccggcgttgggaagtccaggcaacgggggtggctcggagagatcagctgcagaaatggccaatccgggtggagccgttaagctgagcgagcaggagattggaaccattaacggtggcagtgttatgccattgggatcaggatcgggcactggatctggagcaggatcgggagccggatctggaacgggaaccaatgcagctgtggtggccaatagcaacgccaacaacaacgtcggcggcggcggcggcggcggaaacaacagcagcggcagtggcgccggcagcaacagcaacagcggcgagaaaaaagtgaaaaagagtaagagcaaagaaggtaaatgcgttgggtttatccttcgtttgattgttcctatatataaccaaataaccatatatccgtatatccatatgcatatatatactatttatatatatatatatatactcttgtggcctgccatgttgtcggtgtgcattagatgttgtcgttgtcaattgtcgcaaacaacgaaacgctaaatttcgaaagcgtagcagagcaaattcaaaattcaatcgtggctgcgtaaatacgaaattgtattgtataatgtgtaatttgataatcctattatctgcaatccaatttttgatcaagataatccgtattaatcgtatatatattttttacctatcatttctctgtattctttcgcatatttatttgcgtatttttgcatgcgtcgttcgttcgttcaaccaaatcaataaaccaaactctactcttcattttactgtgtctgtgt

SEQ ID NO: 2550 - protein, 876 aa, DROSOPHILA
MASRASTPPQTAQAPPTAVAGSTANGTGSGNGTATGNATAAGSGLGPLSLHTKSSTFDYLYEFSETRKVLEEFFKCPSTDEQPIMENGSDVDSIDRDQNYRAQAPPQSGHIDSERLVYSGYGQQPQLQAQLTAQPMSGARRHYSGSPLMRDFDFFLDSTSRSSGERDADQDGLNHNQLLSTSSGHGGGVGVSGGLGVGPGGGHNYRYSPETTDYDSNCGDLDSLSGEMNGGVSTSCSNYAKFYASAMPVLEDGLSSGHTSDTENNNNNQKNLQQSTVNQGGQCPTSLSGSTSIGGSGGISMLMDMKRISTNHSLNSMNNQTTTASTTTDSNGGVGGVGHHLVATLVASPNNEQAKSQCQTQLQSHPPKTLSLDQSPSNHSKVFKNIDPELDSLYSIGVFHRPDTVQMTPPPPAPAPHRKPNNNGCSSGVVNTNGSLAGGSNDVDLLQPSSKHTPLAAAISSTLQRSSPTSTITGNGIGNGSGKTRSAGSNCSSSANGGMPPPIPERTNLVSAVQRSPSPGPNSPVWLSRHLDGGAGKDLLESGSDNHSKNHSADEEDVDTDLETDRLLGHQRLDDQGYYDENKSWDRKPRSLLSKISPKQQIPSTKTRNGYNALLSSTPELPPPIPPKGQSGLGLGLTLGAGNGGKLLDLVGGMVQRSLSRSSSEHSEKSLSKMPISGGDLCAGGVDVVASTVAATSATVVASTPALGSPGNGGGSERSAAEMANPGGAVKLSEQEIGTINGGSVMPLGSGSGTGSGAGSGAGSGTGTNAAVVANSNANNNVGGGGGGGNNSSGSGAGSNSNSGEKKVKKSKSKEGKCVGFILRLIVPIYNQITIYPYIHMHIYTIYIYIYILLWPAMLSVCIRCCRCQLSQTTKR

SEQ ID NO: 2551 - DNA, 3347 bp, DROSOPHILA
ttaagtgtgactcttcggaggcatagcgaaagaaaaaaaaaaacccggaatgggagcaaatcacaccagatccagactcgatcctgacttgttggaccccattacaggactctcttttaattgtgacttttcggaaaagcgaactaaatcttataaatattatttataccatttctagaagatatatttttggataaatctaataaaaaaaaaacacacactttttaaagaaaaatatatttggatttatatctacagacttaaggaaaattacacgcatttcctttgccttaaaaccatctcttttgcttatgccagctatttattttcccgctcggttatgacccaagcactgggcaccggtgttcttaggggtcttgcatcagagtcacctgaagggaatagacaggattgatcaatataagctttcttctgatttcgaaactaagttccagactcgatcctgacttgtagcattggtggaccccattacaggactctcttttaattgtgacctttcggaaaagcgaactaaatcttataaatattatttataccatttctagaagatatatttttggataaatctaataaaaaaaaaacacacactttttaaagaaaaatatatttggatttatatctacagacttaagtaaaattacacgcatttccttgccttaaaaccatctcttctgcttatgccagctatttattttcccgctcggttatggcccaagcactgggcaccggtgttcttagggtcttgcatcagagtcacctgaagggaatagacaggattgatcagatataagctttcttctgatttcgaaactaagttccagtctcgatcctgacttgtagcattggcggaccccattacatgactctcttttaaatgtgacttttcggaaaagcgaactaaatcttataaatattatttataccatttctagaagatatatttttggataaatctaataaaaaaaacacacactttttaaggaaaaatatatttggatatatatctacagacttaagtaaaattacacgcatttacacgcatttccttgccttaaaaccatctcttctgcttatgccagctatttattttcccgctcggttatggcccaagcactgggcaccggtgttcttaggggtcttgcatcagagtcacctgaagggattagacaggattgatcaacataagctttcttctgatttcgaaactaagttcctaccgatttttcctcgcatcatgggcttcctcaaaggcaagctccttagccgggcatttttatatagctttcgggcacttttggccaattcgttcatagacttttcgtatcgaatgaatgcggttttcacctcgttcctcgcggaatctgtcgaatttcgacggagcagactaacggctgttggaaggcggtcgcccgcttgggggccacgcccccattcgactgttgtctctactgccttcttttcggagacatcagacttccgattcctttgggcggacaaggactgcatggccagtaaatgtcgcctagtgccatagaaacacactgaaaaaaaaaaaaaacgaaaaccgtttcagattgaaaggtgaaatatataaaactctgtgcctgtatcaagccaacaataaataatggaatacaatgcacttaagaagtgaaatcatgttctatactcgtacaacattgcacagcttagtaacatttcatgagttcactaaatctgcaatacttttgtggatataagccattaactgggtaatcataccaaatacctaatcattatctatcagaacgcattattaaattatttgttctagttgtaaaagtgcatttaattaaatatatgtacatatgtacatagttgagacggtgtggaatgcattcttgtatgaaatttaaattgtcaccagatgtcgttcttttcgttccttcttgttttcatatgaatataatattacttatattttaactttgtctgctaaacgcagaaaaatttccaataaaaatggaatattcaaatgcctgatgggcttgtcttgtctttcaactatagtaaacgtattactttcgtttaatcttcgattgcgttatctttcgctaaagataatattgcattcaagccattcgcgaaatccttaagtgaatcgttgaaaaacttacattgctgcacacagggcgttatatagatcaaacacttgcttaatttatttcggggctgcatcgtttacttgcaataatttgaaatcaaaattgttaaacaaatactatgtagctgactgtaattttgtaagatttctgatcttactcgactggagaagaaaaacacaatgaagtttgcttaataaattgaactagttgaactggcccaaaaatcaaggcatactgcgatgaaaaaattgatgtacatcattttgaaattagaaaaaaagcaaacacatttaaaattaaaaattagtaacataatagtttaataacaattaatacggataaataataaggaagaaattattgaaaattcccttgcacgattaaaatttgtaaaatatacatatgtagtacttctatagagatgccattttggggaaagaatttggttgggcctagttccacgttgggaatcccctcgaaacgaccactaagctagtcgaggaccttccctatatatatatgtatgtataaatggctggaatggatgaaaatgtgccactagcctaaaatggaaacatctcactcaagtgatcccggactgcgaatccaatttacggggtctagtgccgtttgacacagctctcgatgaccttgcacggggtgtggatatggggaacaacccctaaaatcggccccggggccatataattagtgtaattacctcaacagcctactaaattcgagaaaaatgcaaacaaaaattaagaaatcacaacatttatatccccctgtcaacgagccccgttcgcccgttcgattccgtgtgtgattctaggacaaaagagtcctttggtccttcggcatatagagtcccttgtgcgccgggaccaaacaattgatgccgtctaatgacagggtggattgcagtttttcgttttcgtttttcgttttaatttcagtgccaacttctgttcgctcttccccccaaagagaaactaaaattgtttaaagtccgctttgcaactttgcagttgcattgtcaggacctccggatcgtctggttataaattacgtttggcgggcaacttcctttcggcatgccggtttctatttctgttccaccctttggtgtcctgatgattggcaaaaaaaaaaagcaagaagcgagccaaggatgcatac

SEQ ID NO: 2552 - DNA, 668 bp, DROSOPHILA
cattgtgtttttcttctccagtcgagtaagatcagaaatcttacaaaattacagtcagctacatagtatttgtttaacaattttgatttcaaattattgcaagtaaacgatgcagccccgaaataaattaagcaagtgtttgatctatataacgccctgtgtgcagcaattgtgtttctatggcactaggcgacatttactggccatgcagtccttgtccgcccaaaggaatcggaagtctgatgtctccgaaaagaaggcagtagagacaacagtcgaatgggggcgtggcccccaagcgggcgaccgccttccaacagccgttagtctgctccgtcgaaattcgacagattccgcgaggaacgaggtgaaaaccgcattcattcgatacgaaaagtctatgaacgaattggccaaaagtgcccgaaagctatataaaaatgcccggctaaggagcttgcctttgaggaagcccatgatgcgaggaaaaatcggtgactctgatgcaagacccctaagaacaccggtgcccagtgcttgggccataaccgagcgggaaaataaatagctggcataagcagaagagatggttttaaggcaaggaaatgcgtgtaaatgcgtgtaattttacttaagtctgtagatatatatccaaatatatttttcct

SEQ ID NO: 2553 - protein, 152 aa, DROSOPHILA
MQPRNKLSKCLIYITPCVQQLCFYGTRRHLLAMQSLSAQRNRKSDVSEKKAVETTVEWGRGPQAGDRLPTAVSLLRRNSTDSARNEVKTAFIRYEKSMNELAKSARKLYKNARLRSLPLRKPMMRGKIGDSDARPLRTPVPSAWAITERENK

SEQ ID NO: 2554 - DNA, 15819 bp, DROSOPHILA
acatgaatgatgtgatgctatcgctgaacaccggggttctcttcgacggacatcccataaacaccgactttggctacgtgaagtcgcagcccaacaaggagtacggcatcaacgagacggtgaaggtcacctacatatccggaaatccgcgtaacaacctcttcaccgagaaaacctacttcaccattgagcgaaagatcaacgaggatcgctggaaggtggcctatacggatgccagctgggagaccaagtaggaagcgccagcttgaggttataaatgttggtacttaataaaatcgttacttttcagaatggtctggcaccgaaccaatacgatcctgggcttcagcgaaatggacatctactgggacatcagtccgcagactcttcccggggaatatcgcattcgccattccggggagtacaagtacatcctgggcggaaagtatccctacgagggactcacgcattccttcaccgttaaggaggactaggattagatatccgtgtggagtgattttataaatattcctggccagacagttgtagggcccatcaaaaacaaaatcaacactgaatccatgtatttatttaccatttgtaagtgacgaaggaaaagctttatttttgcaaacgcgaataaaaaagatgccaaattatgttgaaactaaggagaagtgtttttaattttgatcgaaatggctgttctagtagtcttttgacattgcttcacctttttaccaattacaattcaaattgcccgccaccatatacgatccgcaaacagctgttcgaatgaaatccacaatgctgtacaagtttctctctttcaactctttttctcttttgtggtattaaattgaacttcgaaattcgaaattggtgctcttctcttaaattcgaaacagaaaccagaaattctctctctttctggatctggaagtcggtatttatctatattcgaggcggcagcaaaacaaaatcagttccagtcggtatttctcggcgcgcgcacgcgaattaaacagaaacacaaattatatttttgtagtcaaaactgtgaaaaagggaatttactcctcgggggaccagagaaaacaatccttaaattcgagtctaaacgaaaatatctaaaacaaacgtgatttgtgtgcttccagttagagtgcataaaatgtatctataagatacgaagtgcgggtgggcaatgcaatcgaggtgttctcgttgaattgtaaacaaagaaggcggccagtttcattgacatccattgagatccagcaacaagttcgcataagaaacacagggtaaattaaagaaattccacagatacattttctagaacttctgacgtgttcctcctgccggcatccgtcgtgcactgataacaataatcgagtctttttacttgaatgacgggaatgtgggccatctaaattgaatattcgattttgattagagagaaatgctctgctgcgctgtgacaaaaaaactaaactgatttgagtgttcacatactattctatatgcacttgttgtcaccacatggcgattcaattgaccgctttttgcccccacatattccccatttcctactgctgatgctcctccctcctcctccatctccgctggcgataagcctctaaatatctggactcgaaaaagtctgtgcggcataggcgtcaatgtgtatatgtactttttacgtccgtctgggtgtgtttatataatgatgatcagggggcgaaaagaaggaagtgccgcagtcacgtagtcaattgtaggcatttgttttggtctcgtttcccgtgcacttcatcttccaatgcaaagggtataaacactgcgttgccaactgtgcgaaaaaggatggcctagttcagcaaggaatcaatagatttgaaacaaattgttttcttcctttaactatacatttcagtagcaaattacatgaataagtaatattaggtagtcaatcagtgacttaaaaataaccagtttattaaactgttttcaaacctgtttgtaaagaggatacaattactttaaagggtaataaagttactctttatataacagaatccttttttaaatgtataacatatataacataatgtacctggtaaatgtctatgattaaaacccagttgaagtgactcctatttagcacggacacaaacctcatttagccgctcttattagcgggatatttcttgtctaattggaaatacttaaccaattagactctggtttggatgattaatggctaggcgtgtatttttgaaaatacaatcggattcaatagcttcaattaacttacgagcaaggtgtgttaatttatgaaatttataatttagccgcaatctggttcgttgctccccgcctgctttttcggcctttcgcctttacgtccatttgatcagtattatttgtttgctaattagttcggcaatgacgaccggttggcaataatagagttggatgcgaaaacgaaagtggctgccaagtggatcaccagttccatccatgtgcggaatgcaatgaaagtgaggacaatgtcgacaaggagctgctatttggcccacttccttgtctggtttttgcgcccatttcgctccagcctttttcccagctcatctttcgcttttataatgttcagcaaagtctttgaaccggtttggtattgcgatttccatcggggacgccttttatgcttacatttcaaggtgaattgtaaaatttatgtgtgcacacgctccatgacggcatctgactggcattaaagcacttcgccatgggttaatcatgggggccagccgggtgttaaggcagctggggatgagctgcgaacatttgtcattcattactaattagcaaactcgctgaatgcacttgaatcactcccgcgtcccgagtccttccttcctgcctactgaatatttaatgcgaatgccatttttccaacacagcgagaaattaaatgggatggattcgatccgagagatgacaccttattgttcgttagaattatcaaaattttatttagaacttctcgaaatatgtacgttatcaaaagtgctttctggaatttcctgaatatttctgatagtatgcaaagctaataatcagcgtgcgtagcaatgaatgcaaacgtgtttacatcacactcttctttacaacactttcataatccatcatcatttttctccagtgctgggtactttctttccgacaagttgtgacaatcaaattaacgcttatagaattgaaaagttcacgccctgcgagtggaacttttgctggcagacaaatcacattatctacgactttgaatccaagttcttggagcaattgcagcatgtggcctggaaactgaaacagaaattgccacacgctcttggcctggccaactcaattacacttaaccaaattgtttgcataatttgcacaaactaggcagaccgagaccatgatttttccacaaagaactcttcttttcgtctttttgacttttttttgcatcgtatcaacaaagtggagagacctcattcggtggttagggcaaagtttgtgctcatgatgatgatacttaaggcgataatgatgatgaagtggttatggcgaggcgcgtctaacgagtccattaagtcgctgaattaaggaaaaactcggagtcaaattacagtgccaacgacgaaatcgacggttcgattcgatgcgattttaattatgcattcgatcgacgagcagagccactcaaattggccaaattgaatggaaagggaagcttttggctaggaagccgtaccctcgccgaattccattacgaatgggcaaatgtcatagcagacatgggaaataagaagagctccgcctggggaaggtcagtccgcgggtccaggggggcctgacatttagcagatggaagacttcggtggcagcagtttggcgacttcgtgccacattaacagccactggcccatagagacaatgtggccaaaactgttcacgagcttgcttttgtcggcagctcacaaatgccagggctcaaagagcaggtgcacggagaaaatctctatatggacatggaaatatactagttgttccatgtacctaaaaactacagaaatatcttcattcaatttgaataacttaacttgcaaaactcctaattatttagtcatatctctttattatttgccagttctacaaatcatgcaattaatacgcttttaattaacctctttataatatagcatcaattataaagacacaattcatttataagcaaagtagctccacccaaaatcgattcaagtttaattctggctattttaaaacaagaaaactagtttcgaaaagacattcaaagaagaggtagaaaagtcctaagacaatgtcagtttctgataaatgttatgattaggtattctcagattagacaaatttatacttggtaaacgttagtttcatgcagctttcagaaatgataaattattgaccccgaaacaaaagaagtgttccaatgaaacatataatatttataatatttgatcacttctacccccacaagaatataaatatttatggactttaaagtgcttccaccaagattaagtcgaacgtcactatgtatatttgttttttagagtagtgtcatatataaattagtatttagatattctaagattattcatctctttagccaccacttgttttcctcagtgtagagtcaaaagcatcgtttcagctccaatttggctacggatgcacagttatgagtctgctttcggtggctcataaatgtcagtgggactactgggctgccggtggttgagttatggctctgggctctggtctcgtccatctcggagtcgcttcagcagcttcgtcgacttcaccgctcataaaattgatggacgatattgtggtggccacaatatgggtgatacctaacccagcaaactaactatgcatctgccagtcgaccttggcagcgtggctgccactcgagggggggtggtgtacctcccgctgcatttgcacctgaataatgatgtcgtccctgctcaaattgtcccgttgcattttatagaattggtgccgtttgctgacagtttcatttgagcgaaagtgtcgcagtttgttggcggctaaaaggaaggcaggctcccaggaaacaggtgcatatgccgttctcgataagcaaggtctcattgtgtgggacaggtggcatagtggcacagtgaaacaaccacaaagaggttgccatgtgtgatatgttccctagttgcagttgtaactttggtcacacaaatgtagaaatgtggtacttgggaagtctagccagaggcttcactgtcttgggccaatacaatatggccaaccgggtcaccgtttgaaactttttcctacgccaacaaggacactctttgccaggtaggaagcatttgctgactggccagatgcaatgcgagtaatgctagctcgctgtcacccggcacagaagtatctgtgtacctgtatccgtggagcagtcaagcatctccattttcattttcatttccatttcgattcccgtttcgtcacttttcgcagtcagtcagccagtgggtcgaatgcagagcttagtcagcgttttgcacacaaagtatttcataacttaattgcgccagggcgcaagataacaaattttgttgaacaaaagccgacagaaaattaattttcatttcgccgcgcgcctttcttcgaaaaagtgcagtaaaatcatgaaaaataagagccaacgaaaatgaaaattgttgccagattgcataaagcacagaatacacgcaagccaaaaccaaaagattgccgagctagcatttcagttgggccttatgctcagatgggcggactgtgaaatagaggcgtggccggcgaggaaaatgcaatccgatgacgaaagtccatttcgttgcaccacaattcgcaccgcaagaggtgcaaaaagcggcgatgatgatgaggcgtgaattgaaattgattgggagattagtttgcccaactaaccgactgaagtgaagatgtgatgatgaaagtgctggcaaatcgccgccttggccggtactgaaatcgaattttccgcagccatgcattaatttccgtaaccatatcaactttctgctctcttccactcggctgaagtttgtaatttgctgccaattagttgaacgtgaaatccaatttcagctttgtcccgggaatgaatcttctgccgaatttctggtcagtttgcaatttctggcgaccgcagtctatggtaattaaagctgcctgacatttcgcagtcatttatttcagctccctcttaatattaataattctgcattttgcatattttcaatatgcgcttcatttgtatgccgctccatcagtttgatcgaccagaaatgtgagaaattccgcgttaaatgaccagacaacttggcaggtgcttctgcataaaaaacatatcaatatgcatattgctttattacctttaatattttaacacaaaagcaaggataatcagctaactgtacatgaaaaagcccgatcgcaactcgtaaattttgtggcttaatgaattgaatttaatggccccgcattcattcaattttataagcattaccataaagatgtttaatttaatacggccaaataatagctaatacgctgacatttatagttgagattactttgagagccgacaatatgcgacagtcgtattaatcctgattatctatatgttttgttagatgtgagctttgttagatgtctttcaaatgtatctggctaattatatacatttatagaaagatagattgtattaatttcataaatatttgcagtctgtagtacgcctttaaagtatttatatctttatctttaggcagagtcataaatggctttggaatgttccgtatcaacgaacggccaagaactcctcctcacagtcatgaaacgcaccttagttctgcatacttcagcgtaggtggatgcttattcctgctgttttgttttatgtgcctgcaaatgtgcacctcatggcaacaaacattcccctgtgttgctttggaattttgcaaattaaagcgagtaatttggtccacactctataatgagagttcgatgaactggtcaaaagcagaaattccacgaactgcagatattctctgggtgaaataatatttgcatttcaataagtttgattgtgtaacgctgttcgggatgggattgtgtgaaccgttaaaggcctggccatcatcactcacaatgagcgatttctgttcggttaggttcggttgtccgctgcagcgacgcgtatctttcagatacatttgcataaataacggagttccttgaaccccaattaatttcccctgagatgcagggccaacttaaccagaaaaactgtatctggcatcaggaacatcgctccaaactggaaactagaaagttaaatgctattgaacggcatgtcgtaaaacttaatagctgttgccctcgttctgatcagagtgtcgaaactccacgacaagaaatggaaattcgaatagatagatttagaatttggtaaaggggacaaaccggtctgggcgagattatttaatatttgctgacagccgggttcgcttttaacacatgttagctgacataaatcgactcgttttgggacatccataattctggaccaaagtggccagaagtgttggccaaaatgccgcgtattaataaaagatcttatattctgctgactgattaatgtgagcaattacctgctcaagtgcgagacagcctctctgtctcgccttggcagaattaattactgctgattaattattcaacgcccaccgcctacaagagcatgcatcagccttaattcgtccttgtggtttgtcgaaggactttttgggccaccgcccaccgaatccgccgaatccagcgaaccaccgcagacaaacatcttctgtatgcaaattgagtgccgcatttatcttaaagatgcgaattaacagcgcgcagctaattaatatcaattaaaatttattggcacgttaactaagccgcaatctatgttgtcccgcctcaaaacggaactggaaacaaacttgaattcgctgttcctgtcatctgagactgatgggggtatattggcttaagtaaacttggagatacaccgatatacaatatatgaaacttgatacatcgcaagatacaaaggccacagggcaccgcaatgtgggtttacatgtgagtgagtgattaaacgggttgcttgtccatggaattaaaagctacacataaaaccttcaacagcagcaaaacgaatataaaaaccatcaaattgtagggcggaattttaagacatccctctgctaaaatcaaatggcatttggcaaagtcaaagctcgacgagcagcttgtgaggcaaagatatgtaaaactaaatattttcctcgttccactttcggctgtgacaaattgcacattttccaatagatatttgctgcggcaataagggaagtacatataaattgcaaattgtttctggcggaggaaaaacggccacttaaagagcatttctccattccgtggagggtcatcgaatgtttcggacccgttttattgtcgtcagtgcagtaaagtaaacgccataaaacaatccgctcgatggcaggtcaaattaaaaaacgctcattaaaataaattgccaagtgcccaaactcaagcagcagctgcccctcgaaacccaaattctgtatttctgctagctggcggcgatattaatcaatataaaagtcgatttcgggttcactgagcttagagcttccactttacacatggccggagatttaaggccaaatctcaggctatacctataccttaccttttggcaacaaactgtaaggcgcctaagctcacagcattccatctttttgcagagacttcaaaatggcagcggactggcgattgatgctcctgctgggaatcctgctacttgtgggcggtcctgctaacggggaggtgtacacggccttggccgagatggaggaacttctggagactgaatccgtactgattaccaacttggagggctacatacgcgtccaggaggacaagctgaactttctcaagaagtgagtataccttttcttgcatccacttgtttaattggacttaaaaacacagaaattgattgggaagccatttaatgttgcttatctgagccaataaactgcccggtatttatgaaatcccgcattctaggccgtaattaaatttgcaataacttaattgaaccgctgagagttaaaattgtttttatttgccaatagctaacgagcaaatacaattagtaattggtggctttgtttgctttccatttaattatctgtaatgaatatgaccttctgatttgaaacttattgctgcagttttcacttttttgttatatatttaataactttacaatatatgtttcagacgaacttgaattttgaaatagtttccgtcagataaataatactttgcttgattcatggcatgttacaatcagtaaatgcggagagttatttctatgttataccctacagatctgagttattcagtttgtaacttcggataattatccgaaccctagacctcaaaaaccagctccagtcggacccccgtgatacttagcataaataattcttatgcaaatggtgccaagatgttgctagtccgtaaatgggggacttgaatagacgttcaggtagtcgcttgcattctggtaattacttttgccacgtgcgagggcagctgttgcacgcacctatgctgttttactacaactgagtgtgtatctgtatctgtaaatgtatctgaggaggcgcccctcacacacatgactgcagatacatatctcttgcttatatgcgaaggggatctatgtggcgtatatatatgacaactggcagcggaaataatatgggggagagagcagggtgcaggatgcggtgagacaactcccctaatcaaataatgccagtcgcactcaggactcaggattcaggatctatctttgcggctgtttctctgctgttcagttcagttgagtttagttgagtttctgttcctgcatttgtaccttggttgtgtcacaacaaaggacgagacaggatcctcgcaaacagctgacagctgtgtgcctgccgtctctgtctgttatccttgtgcgctgtcattgcccctgcctttgagtatctgcatccgagtatccttcggatactgtgcagaaaccccgcactctagtcgcgtgccgtctgccggcgtttaactttatatgcatcttaaattttcccaccgaccagctgttggtgcctccaatttctggctaatccgcttgacaaatgcccccggctgcgctgatttgcttctggccaaaaggcaattaagttggccaccacaaaaggacaacacgcgtgcatccaacctgcgggctcaaaggcatgtacatatgtatgcacgtgggaggcgaaatccggataaagttgacccacgaactcttcgttttttatcgtttttctctgacaaccaaatgtaacggtcgcttgggcaacaaaaatccggggagggctgcctttagggaaggtttttggtctgcacaaacatcagagctgagcaaggattatttttaagaagcaagcgcgactgaagggtaccccttaaaataaataagcgaagtgaaataatttaatctcttaagttcttttgtttcatttctttctgactgaagctaagctctactttatggcttgacgcttttacgtcagaaatatgtgcatattaaactaaactgttttgtgaaagcattcattaaaagtttgttttaatggtgccgatatacggatgctaaccatatataataaaagcacgatatgttttcaacaaacaataaactattttaaatatttcggtcgagaaacaaagcagcggatgaacaaaaggaacaagaacaactagttcttatatgattataataaagaaaaaacacttttatgatagttaaattatgttgaattctcggtgatgacagtgtgctgatatgatctgctctacactggttatgttcgagtataatcttaggtggatttaaaacacattcatcatacccctcaactcgccaactaagtggtagcaaaacagaattaaagtcgcaagggagcgcatatgagttggtaaataagaattaaaaacgccgataaacgcgaaccgaataaaacgccggctgctcctgcaattcgccaggggtttttaggttttggttaggatcgcgttgagacgtctcagttggaagtgaaatgcgtttcaacccccgttcgttcgtcgagcagcaggagcagatgtttctgggttttcacattcggttcggttccaatggcctaatggaacgcgccaaacacagtcggtcattgtacgggtgtacgggtgtcttatgtacaagtaaatggtgttttatggggtggggactcgtatcggagcacgatccactcgactgcgcgccggcgcaggaagtggaggaagttgaggagctgccgtctggaacggctctctagatcagtcgagtcgcagttgccgaggcgagcggatcgtgaacagtgctacgaacccaaagaaaacccaaagtagtgaaagaacacccctaagaggttgtggaattgccaccagtacagtgccaacatgtcgcagcataactatacgaacccggccttctgccagaacagcgagtattacccggtgcccagcggcaactcgtcgcgagtggagtccatctacaacagaagcctccagatgaactttggagcggctcctccgcgcgccactcgagatccccgcgagggtccactgcgaatgcagcgtagcatgtccacgcgatcggtgacgcggaaacaacaccagcagcagcagcagcagcaacaccaacagcagatacaccagcaacacctggctcagcagcagcaacaccagccgcaatcctctagtggtcgctatgccttggttcccctagaggaactgaacagcagtagggccagtagatacgccatagttccaggacaggcggcacagagactggcccgatcacaggataatctggatcgctatggctccagacatggattgcacgaagaggaggagcctcactccttccacgaggaaccccatcaggagacccagtttgccagcttgccaccgatacttaatttgccgcccaagcccaggaatattaacaacaataccaatgccaatcaaacccagattaagcatgcttttagtagcgacttcggcagcaagaccttcttgatagtggataagaatagcaaccagaggtaccagatggtgcccaccgccgaggacgaggagctggtagacgagaaccaggagatcatacagatgcacaatggccgcgcccatcgatatgcagtggtgcccacggatgcggacgacgatgatctggcggaggagcaggagcagcaggaaacctgcctgagcaacatggaattgagcaggcagtacgcagcgaggacctcaacgccgcagcaaaagaatgcggctgccgctacgagggccctgcacgagctcctgaccacgcccaggaagatgcagccgcctccgcgattggcgcactcaacgccccggaacgccgcccaccacgagcagctgcagctggaaaggcgcttggagatctacaaaagccaacagatctaccaaagccaacaagttggagcggtagtaggagtccctccaaccttgccacttcgccagaatcgactctccccccagagacttcactacgagaccgtgaagccgcttcccatgcagatcgccgatcgatccatggccgtcatcagtcccagggtccaggagcaggggcaggagcaggaacgggaacaggacatgagcagcatccagggaaagggcaagaaaaacagctcctatccgcagaagatggccaatgccaccattaccttggccgttgtctccctgatgctcgtcttgggcagcaccatgaatgcggggctcatcatctacatgatagcacacgtaagtactctcaaatacttttaaagatattcattttgtccatggaaacatttgaataacactttttcttcgcctacagctcggaaagtccttttacctgcagtttagcctggtggcctccttctccggaatgggactcggcttcctgggattcaagtcgcgccactgcgagtggctgccgaacaggagctatagttccggctatatcctggtcaccgtattttgcctattcaagtcctgcggattgcttgtgatactcgtggtggaccccttccccggatttcctgtccacgatgtgaccactggcgtcatccttggactgtcgactttcaccatgttcttcatcggattgggagtgctgggcagcttgtggtgccaccgacctccgccagacaaccgcgtcaacgtggtctaataccctggaaatagttaatcctagactctaattagttgtacaccatccacttcgaattcaagaacttgacacaccgaacggctaaaagaccaaaaacaagaattagatttataatcagcggaagatcatcatcccccaaacgactgtatataacaagtgggttgtacctattgctaacacttagtttgcttaacttattgttcacctaagtataagtatgttatggaataagaataaaataaaggcacgtagataccagcacagcattttgtatcaataaggaaatggttaaagtgttcaattaggttagttctttaacaatcaaaaatatatatatggtgaataaacactttcaaatataggtcgagtgttaaaattatagattcagcgtcgtgatacttaacttaattgagtaaacaattatttttcagctttcagcaccttttaactattgaaatacggtgcatattttaaagcaatgtgttttgctcttctgtctactaagttttgccctctctttaaattgcagcaaaatggacgagtaccagagggagcactcggatgcctcccatgatataaccgcctatgtatccaatccaatcaatgcgtacctgctgactaagcggctaaccaccgattggcgtcaggtggagaacctcatggagcacgacgtgggcacggatttcctgcagaacatcacccagtatcgcagcctcctgaagttcccctccgacgaggacctcaatggcgcggcggtggccttgctccgcctgcaagacacctaccaactggacacttcgagtgtggcgaggggcaagctgaatggcattcagtacaggtaagtttttgtccaactaaatgcatgcgagaagtaaggaagtaagctagagctatacaaagctgagcacagtcatcgattttctggttaccaaaaaaataaacttctcgaagtggagcggccaagtccctgggatactcactgaccaaatttattatcccgcagcacggaaatgtcctcggatgactgcttcgagttgggtagacaatcgtacgtgaaccacgactactaccacacggtgctctggatgaacgaggcgatggcccgcatgctggaggagccgaccaaccacacccagagcttcaccaaggccgacatcctcgagtacctggccttctccacctacaaggagggtgagtgcaagtccgagtccagtgcgactccccgacatccgtccgcaaagtgcccccggttgcacttgcaaaaaccgctgcttaaattgaaatatcgttttctaatgaaatttatttaaatacttcactggctcctttgacaagaaatattcaagcgttgcatgcttcagaccgtgaaattatttaaaactttcgctaaaagctatgcgtttacctttatgtacaaccataactatgttagcatacgctcatggcagtgctgcttcaataacttataaaatctagaaattttcacagccccctaaacccgaaaatgtccttaaatttcggtaattaaattctcagagtgtgctcgccactccatctcgttgttgtcctggctcgtttgcatggcactttcgaggtccatttggttgcaggaaattgcactcagtcgccggccacttgcctcctgttgtcctgccactttccatactttccacctggagccgctctcagggttctccattaagtgcgaataagtgttggccatctgccgccagtgcgactttgttgtggaaaggagggaagtcatcacgtagagcagggcaggatcggcacgtcctctggctagggagttgtatgctttattaacgtcttattacaccggttagtgtcccctatccgttcatcaacgggctggcttcacacacgcatctgtatccccagtgggtgctccttgcctctaggaggctccacacagtaagaaattcattttttttttttttttttttttatgatgtttttattatttgatcaacgcactgttacccatgcggcaacttaatttgatctgcttaaattattttattttacaatgtgtcttggttacttaagactaacagatttttaatcctaaaaatgatagggagaattataatagttgatataacatagtaattattatttatttgattattctaatgaattttaaaactaagactttctaggtcaaaaccaggttagggaggtcatgagggtggtgtcgcttgagtcttcttttgactctagtccgagggtcagcattgaccacagctgcagttcctagcttccttgctaggctgttg

SEQ ID NO: 2555 - DNA, 1016 bp, DROSOPHILA
tctcggcgcgcgcacgcgaattaaacagaaacacaaattatatttttgtagtcaaaactgtgaaaaagggaatttactcctcgggggaccagagaaaacaatccttaaattcgagtctaaacgaaaatatctaaaacaaacgtgatttgtgtgcttccagttagagtgcataaaatgtatctataagatacgaagtgcgggtgggcaatgcaatcgaggtgttctcgttgaattgtaaacaaagaaggcggccagtttcattgacatccattgagatccagcaacaagttcgcataagaaacacaggagacttcaaaatggcagcggactggcgattgatgctcctgctgggaatcctgctacttgtgggcggtcctgctaacggggaggtgtacacggccttggccgagatggaggaacttctggagactgaatccgtactgattaccaacttggagggctacatacgcgtccaggaggacaagctgaactttctcaagaacaaaatggacgagtaccagagggagcactcggatgcctcccatgatataaccgcctatgtatccaatccaatcaatgcgtacctgctgactaagcggctaaccaccgattggcgtcaggtggagaacctcatggagcacgacgtgggcacggatttcctgcagaacatcacccagtatcgcagcctcctgaagttcccctccgacgaggacctcaatggcgcggcggtggccttgctccgcctgcaagacacctaccaactggacacttcgagtgtggcgaggggcaagctgaatggcattcagtacagcacggaaatgtcctcggatgactgcttcgagttgggtagacaatcgtacgtgaaccacgactactaccacacggtgctctggatgaacgaggcgatggcccgcatgctggaggagccgaccaaccacacccagagcttcaccaaggccgacatcctcgagtacctggccttctccacctacaaggaggaccgtgaaattatttaa

SEQ ID NO: 2556 - protein, 225 aa, DROSOPHILA
MLLLGILLLVGGPANGEVYTALAEMEELLETESVLITNLEGYIRVQEDKLNFLKNKMDEYQREHSDASHDITAYVSNPINAYLLTKRLTTDWRQVENLMEHDVGTDFLQNITQYRSLLKFPSDEDLNGAAVALLRLQDTYQLDTSSVARGKLNGIQYSTEMSSDDCFELGRQSYVNHDYYHTVLWMNEAMARMLEEPTNHTQSFTKADILEYLAFSTYKEDREII

SEQ ID NO: 2557 - DNA, 4857 bp, DROSOPHILA
gccatcattcgctgttgccgtttttaccctattcgtcgagcaacatacatagcagctgcaattttgctgtttctgtttgtggcttccatgtgcctgccattcgttcattatacccttgtatagagcattatcactttttcagatagcggcaatcctatctaatacattatcaatatgatcaattatatggtttcatatgtacttcagtgcgattggctttccaatttgatgatctactgaaataagcttttatcaattgctgcaaaatcgatcaagcgaaatttaatttattagaaaatattccactatagagcatcaaaacgtcggctagacccagatagcttccttttctcgcggcgatatgcgtgcgatatatcgcatcgatactcgatgcggatgcccatctgttttgcgacattttcccgctttccctgttgcaaaacccgtttttcgaattataaattcgagtattttttaaaacttataatgattcattttctaaaatccccactggagagcgacattcgaattcgtagtggttgaatttgtattctctctttgccatgacacagctgtatgtattaatcattcggtatacaagcaactttttcgcacaggcccctttccaaatcaactacgtctctgtgtgtgcgactcgctcgtttttgtattttgccattctcgctgttcacgcaccaatacacacaagtggttgttcaaagttgccagattaaccttttaccggtgccagactgttttaaacttgaagaggatgatgtacttgtacttatatattttttgtgactaaaaattaaattcttaaaaaaaaacgaacataattccatttcattgttatttattaatatatagttccccttaacaacatgtgtatatttttttaaatcgatgatcagctggccttgcctgtctatcgattgccctttttggcatctctagtcctattcatcgaaattttattttgtatccggacgtggtcccccaacactttcagatctctccaagcgttccgtgcatcatgttgaccaggtccattttatccgttgccgtgtgtggcctcctcctgtcgcccctcctgcccatcacccgtgcgtcccaggaggaggacaccggcaaacaggacaagcagttcaccgtggaactggacccagaaaccttcgacactgcgattgccggcggcaatgtcttcgtcaagttctttgctccatggtgagttgcaattcgatttgggttcctcaacccctccattccgccctgcgcttacaacctgaacgaaataaaaaatcgccgtcccaaattggccaacttttgccggcgaatcgcggcggtccacataggtcgtctattttatgtgaccaagccacgcacacataattatcagtgggtgttttggttttcactttcattcaatttctggcaattttcttgtaatgaaacagattagcctatgcctgttaaaaatcaacaagtatttacataaatgaaatttagctcaccaaaaatggtctaaatggtcttaaaaagcgtgaataagtatttatttagcaattttacaattgccaactttatttgtagtattaataatatgaactgctaatcctaaaaaaacaattatttccaatagagaaattcatattattgcaaaaatagcgaaatatgtaccctcataaatcctaaagaattggaatctgaaaaccagaacatacattttgttaaaatttgtatatttcggcgtgttagaaatttacctgacgatcgtgagtgacataaattcgcgaccccggcaatttggtcaaaaactaaagatccggagaattgaagattcgtcatgtctgtcgagcaaatcgcacgttcgccgataagacgatcaaaggggctttggtgtcccccttgattgacaaactaaatactccagatttcggcaactattatagttttcatagcgcccggctctcacgtcttatcaagaagccatcgcaatgcctatgagctaatttgattaggttcaattatgatgctagaaagtgccctgcgattagaggagggagtttaaggaagctcgaaatgcgattcggcggctctagcaaccagatgataaactctttgttcgggacaaagcgccaagtcttatcgctgttcattgttttgtgttcctttgtatttggacggggaaaacaatgtgagtttgaccgatttatcgattcctatttcaaaatcaatttaatcgcaatagattaggtgttgaatatggtttgttagatgtgcgtcatacagaattcgtatccatttcatatggcatcttttaatcgtaggtgcggccattgcaagcgtattcagccgctgtgggaacagctggccgagatcatgaatgtggataaccccaaggtgatcatcgccaaggtggactgcaccaagcaccagggactctgcgccacgcaccaggttaccggctatcccacactgcgcctctttaagctgggcgaagaggaatcggtcaagtttaagggcactcgcgacttgcccgccattaccgatttcatcaataaggaactgagcgcacccgctgaggcggatctgggcgaggtcaagcgcgagcaggtcgagaaccttaatattggcaaggtggttgaccttaccgaagacacctttgccaagcacgtgtccaccggcaatcactttgtcaaattctttgcaccctggtgcagtcattgtcaggtaagccgaatacaatgccttctcgcctaaaatgcctaactgtggcatccttttcgtacagcgtttggcacccacgtgggaggacctggccaaggagctgattaaagagcctaccgtaactatctcgaagatcgactgcacccagttccgttccatctgccaggactttgaggtcaaggggtatcccactcttctctggatcgaggatggcaaaaagattgaaaagtactcgggtgctcgcgatctgtccacgctgaaaacgtacgtggagaaaatggtgggcgtgccactggagaagaccgctggcgaggccggcgatgagaaggtggttatcgaggaggttgccggcgaggaggacgcagccaagaagctgactccacaacagctgactggcgaggacgagttcgaccaagccattgccgagggcgttgccttcattaagttctatgctccgtggtgtggacactgccagaagctgcaacccacctgggagcagctggccacggaaacgcaccaggctcagagttccgtgaaaattgccaaggttgactgcacggcgccggagaacaagcaagtgtgcatcgaccagcaggtggagggctatccaactctcttcctttacaagaatggtcagcgccagaacgagtacgaaggcagccgctcactgccggagctgcaggcctatctgaagaagttcctcggccacgacgagctctaaagcatctgccggttcacagggaatcagcagtagtcgaatgatcaaataatcgcccgccaaattaattgtaatcgtaatttttctttctccagcataaacctctgtgaggagtccgcatttaatcaatatatccaacaacacccaaacgacaacgcgctagctgaaattgataaattcaatctgagttccttttacttttttttcgtttttgtccctcttccttagctgtttttgtagaattttttttatacttatttgtttagtgtttacgtaaatggggcacgggactgtgtgcgcgatgataagccatttagcgaacttacatttcaattttaaagtcattttgagtagcctacgttttaggaaaatttgtcaacacaaagctaataaatatcaattggaaaacaataggctgctgtttaaagtattttattattatctgtacaatatggtttatttgaataattgtttgggaaaaaccactatataatgttctgagaagagctaaaaaacagatgtttgtgggtttttcgaataaataggagtatgcaaatttttaagctgacttattggcgttctttaaatatttgtttaacacactttaaaatccatttagattttgatgccacttaatagtggagcagacaggtttttttgatttgaaattttagcagcgcgcgctgttgtcgataacaatttatcgattacagatctagtcgagtcatcgaaaacgggaagtttcaagtattttaatttgggctgccagatctacgtaatggataaatgtatttatatggcacttaattaaatgttgtgttatttttatctaaaattgcggaacccgggaaaatacaactgaaaatgaaattgcatttgtcggatccacaagaatacaattattacggatgcgacgaatccatccatatatcgcatatgaagtgccatcggtctgccctgctgtttgcaatccatgcctggcacactgctgctgcgatataaatcgtatcgtgtctgcatctgtctgtcgttgtttttgcatttgaagtgagactttttgccgtgtctttggctcgtccttacgaagccgtcccgtaggttgtccttgtgcacgttgtcagcgcagaacaaatccctagccgggtgccagtctatacctaatatccccgtttcccgatgaacgacaacggtaacggcggagcagcgccagtctccggtggagtgtgcggtgttggtggtgcgcacggagcggctggtggcgctgatggtgctggtggtgctggcggtggcggcggatgcggggctggcggtggaggtgctggtgcaggtccgggcgggggtcccgggggcggagcagctgctgcggacctggctggcgaggcagctggaggagcagcaggtggtgatgc

SEQ ID NO: 2558 - DNA, 1693 bp, DROSOPHILA
caacactttcagatctctccaagcgttccgtgcatcatgttgaccaggtccattttatccgttgccgtgtgtggcctcctcctgtcgcccctcctgcccatcacccgtgcgtcccaggaggaggacaccggcaaacaggacaagcagttcaccgtggaactggacccagaaaccttcgacactgcgattgccggcggcaatgtcttcgtcaagttctttgctccatggtgcggccattgcaagcgtattcagccgctgtgggaacagctggccgagatcatgaatgtggataaccccaaggtgatcatcgccaaggtggactgcaccaagcaccagggactctgcgccacgcaccaggttaccggctatcccacactgcgcctctttaagctgggcgaagaggaatcggtcaagtttaagggcactcgcgacttgcccgccattaccgatttcatcaataaggaactgagcgcacccgctgaggcggatctgggcgaggtcaagcgcgagcaggtcgagaaccttaatattggcaaggtggttgaccttaccgaagacacctttgccaagcacgtgtccaccggcaatcactttgtcaaattctttgcaccctggtgcagtcattgtcagcgtttggcacccacgtgggaggacctggccaaggagctgattaaagagcctaccgtaactatctcgaagatcgactgcacccagttccgttccatctgccaggactttgaggtcaaggggtatcccactcttctctggatcgaggatggcaaaaagattgaaaagtactcgggtgctcgcgatctgtccacgctgaaaacgtacgtggagaaaatggtgggcgtgccactggagaagaccgctggcgaggccggcgatgagaaggtggttatcgaggaggttgccggcgaggaggacgcagccaagaagctgactccacaacagctgactggcgaggacgagttcgaccaagccattgccgagggcgttgccttcattaagttctatgctccgtggtgtggacactgccagaagctgcaacccacctgggagcagctggccacggaaacgcaccaggctcagagttccgtgaaaattgccaaggttgactgcacggcgccggagaacaagcaagtgtgcatcgaccagcaggtggagggctatccaactctcttcctttacaagaatggtcagcgccagaacgagtacgaaggcagccgctcactgccggagctgcaggcctatctgaagaagttcctcggccacgacgagctctaaagcatctgccggttcacagggaatcagcagtagtcgaatgatcaaataatcgcccgccaaattaattgtaatcgtaatttttctttctccagcataaacctctgtgaggagtccgcatttaatcaatatatccaacaacacccaaacgacaacgcgctagctgaaattgataaattcaatctgagttccttttacttttttttcgtttttgtccctcttccttagctgtttttgtagaattttttttatacttatttgtttagtgtttacgtaaatggggcacgggactgtgtgcgcgatgataagccatttagcgaacttacatttcaattttaaagtcattttgagtagcctacgttttaggaaaatttgtcaacacaaagctaataaatatcaattggaaaac

SEQ ID NO: 2559 - protein, 416 aa, DROSOPHILA
MLTRSILSVAVCGLLLSPLLPITRASQEEDTGKQDKQFTVELDPETFDTAIAGGNVFVKFFAPWCGHCKRIQPLWEQLAEIMNVDNPKVIIAKVDCTKHQGLCATHQVTGYPTLRLFKLGEEESVKFKGTRDLPAITDFINKELSAPAEADLGEVKREQVENLNIGKVVDLTEDTFAKHVSTGNHFVKFFAPWCSHCQRLAPTWEDLAKELIKEPTVTISKIDCTQFRSICQDFEVKGYPTLLWIEDGKKIEKYSGARDLSTLKTYVEKMVGVPLEKTAGEAGDEKVVIEEVAGEEDAAKKLTPQQLTGEDEFDQAIAEGVAFIKFYAPWCGHCQKLQPTWEQLATETHQAQSSVKIAKVDCTAPENKQVCIDQQVEGYPTLFLYKNGQRQNEYEGSRSLPELQAYLKKFLGHDEL

SEQ ID NO: 2560 - DNA, 6783 bp, DROSOPHILA
gaagtcttctccatttgaattgctattcttaagtaaaacaacagaattgctgatacaaagcaataaaaataagttagtacagtgtgaacacctatcgttttcttccatatcgataggaaactcataaatgtatgtgtggaaaggcttaaacatctgtacgggcgtcgatatatcgacagctaatctggaaaacactagacatcgcggtaattgtccctaccctttttatggagttcccagattgccttcttacacaaccatattaatgggcaataattatataagaagactgcggaacaaaggggacccgcacgaatatgtacttgatttaatataagtttcttttatacacataaaattatttttgcatacttatgtaagtgcgttgggtactttttattaattccagagtaacgacatttttgccgttaatttaaaacacgaaatgttaggacaagaatgcggaacttcggttaaattttaaaaattcctttgtatcaatatagtcattccagtagtacaaattaatacgcatgtaatttttgttgtataatagcactcaattttgtgtaataaaaaaaaacaactagggaaccaaaattatagagacaaatcaaatcctgctaataaaaatatatcttatatagtttcttcgggtctatttgaaatctttgaaatgtaaaaatgtctacactcataacttataagagttaaaacggcttaaggattaaattgatttacaatagaaagtgattattagcgacagtggaaatataaataaaatgttttctagaattgtaaaaaaaaaagtaggagtatattcaataaatatttcattttaatataatgctattttgctcgataaaaatgttaatatgaattaaagtttactcttgcaatgcgtttcagcagatacatttttaaaagcggcctgttatgccaactaaaacgaaattgccggtgagccgtatgtatccgatcgcatctgatcagctgctttcagttctacttcgtcgctcaatcgcacagcagtacagaatctctgcgggttttcaaatattggttctctatgagaaataaattattattatttagtgcgcaattgaatacacaattttttcaaactatgtgtttttggacaatgaataataaatttaacaaaagcggattgcaaaagaataatgttcgaaaccgtaggcccactgttacttcaatataaaacatttaataatatatactatacatatattaaaacacacaattgcctagtttcaaaatagattttggttgtacaagtgtataaaaataaaataaataccgatagataagtatatatctacttatgtacaattggtaggtgtttaaaaagtttgttatcgctaaatgtacataactttgtacatacacagctttaaaaatgtacatatgtgcttatatgcatgctatttattctgtatgtatgtataatttacgtatgtacatacatatgatatatctcatttacgttgttctgcttgtaaaaggggaataatgcactttcagcgatgaactgaagttcaagagcacaataatttattatgtttataaatggttttaattgaatacaatagtggtcataaagaggactcatgtgaaacgtttatgaacgggctttgcatatgtgcatgtacatatgtagcttgaactaacttttacgactgtgtgcacattagggtggtcattttctgctggcgcatcgcgcttccaaggcggatcaaacaatgcagatatgatttttaatttttaaaaatcattatatccggtgctgcaggattttatacttctactatattcaaagtaagttttttcgtagcctgaaacaagtttttgaaggttattattccgttattccgagttttagaatattcacgagcacacaaatcaagtgacgatcgcagcctcaccgtgccgatttgtgacgaaaaatggttttacaattgtcagtgttttttcctaagctttatagccatagagccatttttccctatggcaggtatataagtgtatggtcgtctgattttgatcgattaaaaacctaaattatatattttcaaaaaaatgtgcatactgaagaagaactctttttatttgaaaacaacgagtctataatttttttcaacagttagctatatgatatgatcgtcaaaagtctatcaatttaaaaccgaaatattatattgtccaaattttgccaataattttaatatttttgaagttagagatcgtcagtggcgtaagctattcaatttttttttttttttttttttgtattgactcgcgaaggggaatcattgacttccgtgctaatgctttaatagggtttaaaggggtgcgctcttcttttttctctgcacagctgtttaaggtattaccttgggaatccgacttaatcgaatacagcaggggattatctaacagcttgtatttcgcgatttgatttttaaaaaaattgtaaaataaggccaacaagagccaagttgattggatgacaagatcaccagccgctgtctccaaaaataaataataattattatttttattttttcttattttaaaatatatcaagtatatttataaatacaagtccttttcagcattcatcaacggtttgatcaaaaatcatgctggccaactcatgctgcggttggagaaaatataaaacccatgatcagcatcatagaaccctaaagaaaaaaactcgacagaacacatcagatacaacagttcacatagaagtgaactccaacgaaatccagtttccaggttcttacagatttaatcttgactcaaaaaaaataaatatcgggcgaatgaatattcttggacataagagaggtaatttccgtgtaactcgatatgtcacggtcaccgtactcttaattttatcgactgcagtcaatgcttatgctcagccagaaaataaaagcttcagtaattcttccaacaacgatagtccggaaatggttatgttgagtaacgaaacaaacaatagtgcaaaagtactatcagaaaaaaatggttcttcttcaatatcggcggatgataaaataaatgaaaatatgggaatattccaaatgaaagtacaaagtaaaccggggaaaaaaagtacccctttagcaaaggtatcagagcatggagatttatcaagagttcaaagtgtatctttgtatcgcaataccttaataaatatagaaagtatgctacagcgtcagttgcgtgagaaagccaaagtggatagtatagaatcgattaaaatgcacatacttatgcgcttgaatttaaaaaaacttcccaatataacaaaaccaatttcagtaccacaaaatataatagataacttttatagagattataatgcatcttcaaaaactactgtttggaatcgcatggaaagcattgacgaatctcatttgtctataaatgacacttatggcgaccacataatgactgatttttttgatgaaagttcatcctcccaaatgcagggagatgatgctaacactgttaatgaatttctgatagatttgaataaaaatcaagctaaaaagtcggacattcctattaataccaacgatgaggagtacgagagtattttgtctcacatcagcagtatatacatatttcccgagggtaagtaaacagcattcttaaagtagatatagatataggaagatattgaataagagaagatattatatataagagtaggtatagataaagggaggaaaagacaaggagagcttaagagaagtaaaaagcatatataacgtcactaaaatctgtgtaaatatatttctagactttttgtaagtaagaagcataatcatttatcttatatttatatcttttttgggcccgatttggttataggtttagatttcgaacttttttcctttaataagagaaagcaagcaaaaatacatatgacttcttctctatctttagaaattgttttcccaaaattcattggcgtagtgtattttcaaaaaagaatcgacacatttcctaaaatcttgacgaggtaaaagacaagtggcattgacccctttaacatacaaaaaatgaactgtttacaacaaacattaatcaatacccaatttttgcttttaagaaatcaaatttcaatgaaaaaattaataattttcgtttatattttcgttcttttagaaattcaacctcatgttcggcacaatcgcaaggtcgatgtttttcggtttcaaattgacagtagctactcagacttgtcttacgctacccttcatctatatttacgtggttgggattggataagtgctcatcaacctggacttcttgaagaaattaaaaaacagccacgtaaagatattgttgtgactattcaccgcgctattagggttgcaaatacaacaagctttaatcctaaagtcaaaatgtttgagtttcgacatagtattccgtcaggacttggacaatgggttgctgtggacttaaagtctctgcttggtaatcttgggtctaatatgacgcaagaaattctaataaagggcgcagaaacctggatgaagtcattagtggtgaccacagacaacacatcgaaaaatccattggttagaagccatttataatgaagttgaatacacttactctactaaatatatttttaatatttcagactgttcacatagaaattgggtcgcaaaaaaagcatcgaagaaagcgcagcgtatatatggactgcacagaaaatgatcatgacatgcgctgttgtcgatatcccctcaaagttaatttcaccagctttggatggcatttcgttgtagcaccaacgtcctttgacgcatacttctgcagtggtgactgcaaagttggttacctagagcaatatccccatacacatttagcagccttaacgacatcggccacaccgtgttgctcgccgacaaaaatgagttccttaagtttgttatattttgacgataaccataatctggttttaagtgttataccaaatatgtctgtcgagggttgcagctgttcttagcgaacaaaattcgaaagtgttctttgaaaatagaactaatacatatgctatgtaaataaattaacgcaaaggaatatggatctgtttgagaaggctagtttaaagtacaattcccaaatttgatataaaatttacatttttaaaatgtaaaataggtcagattgcatgctgatgattcccaaattaataaatagatcgcaattaaaaacagtaaaaaattaaaaaatatttaaaaatgaattcctacattaccgtataagataagtatagagcgaaacaatatattttaaactgtgcattacgaattacaaatgaaaagcaaacaaaaaataatcgttttaaataaaatgattgtatgacgcataaagaaatacacggttaaaataaactaagtaccttaagttttgataaaaattgagtgaataacaaatggcaccgtcagacaaatatagtctgaacggaggctacatgtggatcatttacggttgtgtgattacctaatttgaatacacagctaaatgtataaaggtgttcatatcccgtgcatcgtgagcatatagaatattttacagtgaacggctttgtgcgtgtgcaaacgagacttccatatgctgttcttttcaagacaagtaaggatttgtatgaataatgttgattagaacaaaggctaaccttacgtttcgcaaagcacacagaacttatttcataataattaaaagttaaataacgtgccagagaaatatagatatacaagtagcaatgcagcgcagtggcgttacagcgctcactttctctatctccatctacatagtgttaaaaaaaaatatgctagaattggttagttttgaaacttattccgattagttcctacgatataagctcgaatgcttggttgagtgccaaaaagaacttatttttcttatgcgttattttcgaatcttctattaacactacttgtcgcaggattggcttctaaacgtttgcaagagtacttaggagttgtcaataataataattttgacaagtgctccaacattagctgatgataggtaagcacttaaaggggatagtcgtgagatgattgtgtgacattccgaatatagagtgggtgaagataaaaactcttgaaaaaaattacggcattttgccaaaaacttaggctcgctaaggagtaccatcgccaaggagtcatacgatcttatctggattacacgtctaaagcgttctcttgtttttttttttttaatagaatatgggtttcgatatacctaagctttcggtataaactcataatggtcaaccccccccccccccccccttttactaataagccaaccaatttatttatttccgaaaaatttattatataaccatttagtgatacattagtatataagttgatatacttatatttccataaatatttctcatataaatttagggctctcggttcttaagttggccctttaatgtgaatactaatcagtaaaatgggaatgccgatctaagtcgatatatgaaatgtactttaagatatattactttttgtcgaacacaatacggatattttcatattgttaatattttgttttttgttgtttaatgtttgttattgggcgcttacttctcttttaattacttttgtattatacttataattataaattttaaattaggtgaacgtatttatattttacatctatattaattcttattgttgtttt

SEQ ID NO: 2561 - DNA, 3092 bp, DROSOPHILA
cagttctacttcgtcgctcaatcgcacagcagtacagaatctctgcgggttttcaaatattggttctctatgagaaataaattattattatttagtgcgcaattgaatacacaattttttcaaactatgtgtttttggacaatgaataataaatttaacaaaagcggattgcaaaagaataatgttcgaaaccgtaggcccactgttacttcaatataaaacatttaataatatatactatacatatattaaaacacacaattgcctagtttcaaaatagattttggttgtacaagtgtataaaaataaaataaataccgatagataagtatatatctacttatgtacaattgtggtcataaagaggactcatgtgaaacgtttatgaacgggctttgcatatgtgcatgtacatatgtagcttgaactaacttttacgactgtgtgcacattagggtggtcattttctgctggcgcatcgcgcttccaaggcggatcaaacaatgcagatatgatttttaatttttaaaaatcattatatccgcattcatcaacggtttgatcaaaaatcatgctggccaactcatgctgcggttggagaaaatataaaacccatgatcagcatcatagaaccctaaagaaaaaaactcgacagaacacatcagatacaacagttcacatagaagtgaactccaacgaaatccagtttccaggttcttacagatttaatcttgactcaaaaaaaataaatatcgggcgaatgaatattcttggacataagagaggtaatttccgtgtaactcgatatgtcacggtcaccgtactcttaattttatcgactgcagtcaatgcttatgctcagccagaaaataaaagcttcagtaattcttccaacaacgatagtccggaaatggttatgttgagtaacgaaacaaacaatagtgcaaaagtactatcagaaaaaaatggttcttcttcaatatcggcggatgataaaataaatgaaaatatgggaatattccaaatgaaagtacaaagtaaaccggggaaaaaaagtacccctttagcaaaggtatcagagcatggagatttatcaagagttcaaagtgtatctttgtatcgcaataccttaataaatatagaaagtatgctacagcgtcagttgcgtgagaaagccaaagtggatagtatagaatcgattaaaatgcacatacttatgcgcttgaatttaaaaaaacttcccaatataacaaaaccaatttcagtaccacaaaatataatagataacttttatagagattataatgcatcttcaaaaactactgtttggaatcgcatggaaagcattgacgaatctcatttgtctataaatgacacttatggcgaccacataatgactgatttttttgatgaaagttcatcctcccaaatgcagggagatgatgctaacactgttaatgaatttctgatagatttgaataaaaatcaagctaaaaagtcggacattcctattaataccaacgatgaggagtacgagagtattttgtctcacatcagcagtatatacatatttcccgaggaaattcaacctcatgttcggcacaatcgcaaggtcgatgtttttcggtttcaaattgacagtagctactcagacttgtcttacgctacccttcatctatatttacgtggttgggattggataagtgctcatcaacctggacttcttgaagaaattaaaaaacagccacgtaaagatattgttgtgactattcaccgcgctattagggttgcaaatacaacaagctttaatcctaaagtcaaaatgtttgagtttcgacatagtattccgtcaggacttggacaatgggttgctgtggacttaaagtctctgcttggtaatcttgggtctaatatgacgcaagaaattctaataaagggcgcagaaacctggatgaagtcattagtggtgaccacagacaacacatcgaaaaatccattgactgttcacatagaaattgggtcgcaaaaaaagcatcgaagaaagcgcagcgtatatatggactgcacagaaaatgatcatgacatgcgctgttgtcgatatcccctcaaagttaatttcaccagctttggatggcatttcgttgtagcaccaacgtcctttgacgcatacttctgcagtggtgactgcaaagttggttacctagagcaatatccccatacacatttagcagccttaacgacatcggccacaccgtgttgctcgccgacaaaaatgagttccttaagtttgttatattttgacgataaccataatctggttttaagtgttataccaaatatgtctgtcgagggttgcagctgttcttagcgaacaaaattcgaaagtgttctttgaaaatagaactaatacatatgctatgtaaataaattaacgcaaaggaatatggatctgtttgagaaggctagtttaaagtacaattcccaaatttgatataaaatttacatttttaaaatgtaaaataggtcagattgcatgctgatgattcccaaattaataaatagatcgcaattaaaaacagtaaaaaattaaaaaatatttaaaaatgaattcctacattaccgtataagataagtatagagcgaaacaatatattttaaactgtgcattacgaattacaaatgaaaagcaaacaaaaaataatcgttttaaataaaatgattgtatgacgcataaagaaatacacggttaaaataaactaagtaccttaagttttgataaaaattgagtgaataacaaatggcaccgtcagacaaatatagtctgaacggaggctacatgtggatcatttacggttgtgtgattacctaatttgaatacacagctaaatgtataaaggtgttcatatcccgtgcatcgtgagcatatagaatattttacagtgaacggctttgtgcgtgtgcaaacgagacttccatatgctgttcttttcaagacaagtaaggatttgtatgaataatgttgattagaacaaaggctaaccttacgtttcgcaaagcacacagaacttatttcataataattaaaagttaaa

SEQ ID NO: 2562 - protein, 598 aa, DROSOPHILA
MLANSCCGWRKYKTHDQHHRTLKKKTRQNTSDTTVHIEVNSNEIQFPGSYRFNLDSKKINIGRMNILGHKRGNFRVTRYVTVTVLLILSTAVNAYAQPENKSFSNSSNNDSPEMVMLSNETNNSAKVLSEKNGSSSISADDKINENMGIFQMKVQSKPGKKSTPLAKVSEHGDLSRVQSVSLYRNTLINIESMLQRQLREKAKVDSIESIKMHILMRLNLKKLPNITKPISVPQNIIDNFYRDYNASSKTTVWNRMESIDESHLSINDTYGDHIMTDFFDESSSSQMQGDDANTVNEFLIDLNKNQAKKSDIPINTNDEEYESILSHISSIYIFPEEIQPHVRHNRKVDVFRFQIDSSYSDLSYATLHLYLRGWDWISAHQPGLLEEIKKQPRKDIVVTIHRAIRVANTTSFNPKVKMFEFRHSIPSGLGQWVAVDLKSLLGNLGSNMTQEILIKGAETWMKSLVVTTDNTSKNPLTVHIEIGSQKKHRRKRSVYMDCTENDHDMRCCRYPLKVNFTSFGWHFVVAPTSFDAYFCSGDCKVGYLEQYPHTHLAALTTSATPCCSPTKMSSLSLLYFDDNHNLVLSVIPNMSVEGCSCS

SEQ ID NO: 2563 - DNA, 3131 bp, DROSOPHILA
cctactcactattaacttagtcacgctgagtggaccttcttcctcctcctcttcctgctgtgcctgaacattcgttagcttctccatttgacagtttcgaagttaaatttgactatttgttgtttcgagtttcgttatttaaattgcacgtcttgcgtgagagaatttcgacaaagactgcgcggcgcgcaattcactgcaaaatcagtttgccaatcgccccgaacgcacaaaactctatcactacagaggatcccgcttaaaaggaacgcgcaagatcaccatggcgaactattactatttcgacatcaaactgtgagtagaatgatgttctgcggtcattaatataaacttggttgttattaaattcagtaaatatattcatttatttaatagtaaacttcgggatccgactgcagttgctttgaccccatctctgtttcgaagctgcgttcttgacgccctggacagtttcttctgcgaggagaaacccacactggagatcgtgaagttctgcgcccagcaacatcgtgttatctttcgagtgccagagcaactgcacgacatgacccgcatatccattgagctcatcggtcactaccagcagataccctgtcattttgagatcttggaaacatccaaatcatcgctggactttgagaagagcattgaaaagactgtcgcggttgtgtccgatgattaggactagcgaattgtaatactcagtgtaatatacattataaccgtcatgaagaatttgaatttgaatcctaactgattttactgtgatctgatttttttgtcattcacaacgaactgaaatgatttctgtgatggctactaaatgagattaaaaagcggaaaaaccccataaacttgtaaccattttaataaaattgcatttaagtagttccaataacaatttaaatgttttaataaatggctataattttagctattttataactactcatgtccgttgtgagccgagctggcatctctggcggcgcacagctgtttgagaagcagaaagaaacagcaaaaaaggggagtaattacataaaaaaaacacactgaccggcaacttttggacgacttttcccgaagattccgccaaaaaaagaggggcactggcacttgcacccaaagcatgagtggttaccaatatctggacgtgaagatgtgagttccgggcactcagccccgctccttaaagccccgtatttcccacgtgcgcacgtgcatcatgcaaatataattaagataattcacgtttttaatcgccagaaaactccgtgatccagactccgtgactctgacgcccgtattcttctgtggctgcatccatagctccttggctagtatttttggcgaaataggtggccagaccatactggaaattgtgaaatttagttccagccaaaaacgctccattctccgggtgcccgagaacgtcctggatcgcgttcgcgtagctatagccctaataggatactaccaggaggtgccctgccattttcaggtgctcagcacatcccgaaagcccttggattttgaggaatcccccgaggagtttgtagcatttaactagcattaccgcatcaggatgtcattctcttactgcaaggagtacggcaaggacaaggtgatttttgtgaccaaggaggaccatgccacgcccagcaccatcgagctgccgccgccggaaaagccggagggcgtgatcaccaaggacggcaagatcaactggagttgtccctgcctcggcggcatggccaccggtccctgtggcgtcgatttccgtgaggcattttcctgcttccagaacagcaccgccgatcccaagggatcggactgctacgatgccttcaccaagatgcgcgactgtttccagaagtaccccaccgtgtacaacaaatctggcggtgatgacgacgacgatgatggcttgagcgaggccttggacacggatgccggttcagttggtggccagaacgcggatccgctggcggatgtgggcaacaacggaggcggcgatgagctggtgtcccccaatagcagttcagtggtgcccaaggcttaggtgggagtacataagataagagctaggtgtgacttcgtacaaaataaataaaacttgtcattaacttcaatccatccccacactatcgatcgtgactgggaaacatttatcagccagatagtctggaattaacagagatattgttgaaacagcatagtgcttatttcagaaataaaagatactcgttttctcaattaaattctcgctttttttacaaatagcgaaatacacaaataaaaaaatgtaaatgtatcttgtattcactgtagccaataggccgttatttccatatgttgtgtatttctggtatatactcgaagcgctcccacctcgttggcagtatttttccaccctgctgccacactgtttacgaagcagcaatcaaagaaaacggaaaaataaaagcgtattaagatttcgtgtggaaaggaaaaatgctgtaggcgcagtgtaaaatgcatatattgcggataaatcgcgtttgtgagatgcttaaacgcgaattcaacatcaagtcggtgcagaacttcaaggtgcaataacaaaaatatccgaattatcgaaaaaagcaaagtgcaattggccagttgagactacaaccacaataacaacgacaacaacagcaacagcagtgaaataataatataaccttgtgttttgttttttgtggctcaaaaatcagatatacacaaagttaatcgaggtgaacggtgtaaaagtgattaaataataacggtttaacaggaaaacagagttatagtgtgtgcgagtgtgtgtgtgcgtagtgacaacaatacaaacgcagaaaccaatacaagcgcacaatagttttcatacataggaaaacaacgaaagtaacagcgataaataatagaaaacaacaacgaagagtctcaaaaagtgctggaaaaactcgcgataaggaaaacaggaacctccacatcggcagatcttttgaatgctgccgcactttgaaatccggagacacaatggtttcattaattgacacaatcgaagcggcggccgagaaacagaagcagtcccaagc

SEQ ID NO: 2564 - DNA, 897 bp, DROSOPHILA
ctggcggcgcacagctgtttgagaagcagaaagaaacagcaaaaaaggggagtaattacataaaaaaaacacactgaccggcaacttttggacgacttttcccgaagattccgccaaaaaaagaggggcactggcacttgcacccaaagcatgagtggttaccaatatctggacgtgaagataaaactccgtgatccagactccgtgactctgacgcccgtattcttctgtggctgcatccatagctccttggctagtatttttggcgaaataggtggccagaccatactggaaattgtgaaatttagttccagccaaaaacgctccattctccgggtgcccgagaacgtcctggatcgcgttcgcgtagctatagccctaataggatactaccaggagcattaccgcatcaggatgtcattctcttactgcaaggagtacggcaaggacaaggtgatttttgtgaccaaggaggaccatgccacgcccagcaccatcgagctgccgccgccggaaaagccggagggcgtgatcaccaaggacggcaagatcaactggagttgtccctgcctcggcggcatggccaccggtccctgtggcgtcgatttccgtgaggcattttcctgcttccagaacagcaccgccgatcccaagggatcggactgctacgatgccttcaccaagatgcgcgactgtttccagaagtaccccaccgtgtacaacaaatctggcggtgatgacgacgacgatgatggcttgagcgaggccttggacacggatgccggttcagttggtggccagaacgcggatccgctggcggatgtgggcaacaacggaggcggcgatgagctggtgtcccccaatagcagttcagtggtgcccaaggcttagaataaa

SEQ ID NO: 2565 - protein, 246 aa, DROSOPHILA
MSGYQYLDVKIKLRDPDSVTLTPVFFCGCIHSSLASIFGEIGGQTILEIVKFSSSQKRSILRVPENVLDRVRVAIALIGYYQEHYRIRMSFSYCKEYGKDKVIFVTKEDHATPSTIELPPPEKPEGVITKDGKINWSCPCLGGMATGPCGVDFREAFSCFQNSTADPKGSDCYDAFTKMRDCFQKYPTVYNKSGGDDDDDDGLSEALDTDAGSVGGQNADPLADVGNNGGGDELVSPNSSSVVPKA

SEQ ID NO: 2566 - DNA, 33839 bp, DROSOPHILA
gggaaaatgcaatttttcacggctaacgtcaatgcagaaaacggccagcggagcacccaaacatatgtcagatctggagtttgaggtggcattcaggggtgccggcaaggtctatgcccccacgaccatagaaatcgatgaagaggaggaagcgaccgcaggaagcggtcgaggccacgagccacccaacacctgccgcatactgcagcgcaaactggagctgaaggtcgagcgggcccggcggaactacactcagtttcaggcggagcaggtgggttaaggtacaacccacaacggtcaatatgttatatatagtatgcaacctactcacaggctaccaagacgcagtcgtccactctgataccaatcaaccgtctacccattcctggcgagccggaacacaagccactggtggactacaaatccgagagtagcgacgaggccgaggagatctccttctttccggcccagctgaagcggtccaagcgccgccagcagaaccacgaactgactgacaccttcagcatacaggagatgaccattgactcggatctggagtcggacgacagtgctggcacccagaacctcgagctcctgctgccctccatgaagacgaccattctggacaagtttaagggatgcttcggatgctggcggcgcaggtaatgccaggcggaggagcggaggcatatcatcaggcggttcaggcacaaatcacgttattgacaggcactagcaacctacgaacttaataataaactccattgccactacaaagctgtaaacatagatttatttggcttagtaattccattcgataaatattaatcaatactaaaaagagaatagtctttcaattgaacaggagagcggggtaaagcctaaaattgtttactacttgaacgtaaaaattatgttattttcatggaagaactgctagaaatatattgcgtacgaataaataacaatagcttatcagtctttttataaaaccaaagttttaggtatctgtattgagggttagacagacgccctgcagaatccagtgactcagatcctccgaagtggccaaattagcctcaaagaccaggcccacacccatggcgttcctgcgcagcgatgtcgtgtataccggggcaaggtaggtattctataggaatatggaaaaaagttagtttagttagaaacaagctgaagaccaagttcatggtctcccccatttttaagtttcttgcttttgcggccaaaaagcgtgtagtgtttaaatacggaaacaattagcacaacagtttacacattagatggtggggggttttgcggaagctggctgtaatttagtgctatgcatttaaacaaatatcagcgtggccacgcccccgcaaccgtccaccgcccctggcatatttagatacaagcgcacattagttcttgtcactgccagacggtggctatcctgtgtatcctggctatccagggcagccagtcgggccaatcccataccattctactctgatccccaaattcacaccaacctgcagcttgagacggtgcgcctcaatgggctccacggcgagaatggccagctcctcaaccaggaccttgggatgggaacgcgccagctgattagtggccaagtcaaagcgcccgccctcgatgtacagaccgtgcaccaggcagccctgcaaaaagttgagcgattaaaatgcaaacagaattcctaattacgaaattagtgccagcccctgaaccagaatggagttgggtcatctttttccatttagaacacatcgtgtgggcagcaggagagaaaggaagcattgtccctactcaccgtcacagggcgctcctccacatcgtcggggtccgcaaacttggttacgtaggtgaaaagcgtggagcgatccaacggccaggcgttgcggcgacaggcaatctgaaaggttgggaaaatacactcagaaaagtggtacagttcaggagctttgagggatatgaaatggtggtgacaagcaattcgtagatggaaactggacatggaatgctctcctaaataagttgaatcagttgtacgatgacaacttttctcggagtttatgtgcggcgcaccatcagcgaaggcgcgacaatgcagactcacctgcaccagggccgtgagataactctgcggtatatgcagtcccgacagccacatgaccagtggctcccctgaaagcgtccagtatttgtattgcacggcccgaagctgtgcgaacgatagatagaagggctgattagtggacacgaactcaccttgattgattttgcgcttagctgattaatgagcggagcgcctgtgaaaggacttcggactgtgtggaaggactcgcccgactcgactcgactacagatctactcacccgcaagtgctccagccagctggccaactgtttgcatgtcgccggcgccaacttgctccacgcggctggcaggaggccattgaacaacgagttggcaatgttgtccagcacattgtccatgccgatttcgccggcaatggcctgcggagagcatgcaattaaattaaaaggcacaatggagaggcacatgtgtgggcgtgactgcagattccggggccaagacaaaagcccgcccgggttcatttgcatttgcgggatcacccaacgtcccatcctccagctccagcccatcgtgcacattcaaatttggacattgtttgcttggtcgccagccaagttggcaaatgcataaacaaatgcgaaatgcaaaacaaggctgaaggatttatgtgcggcctctattgacagccatataggacaaaatcccacataatctatccatgtatatatccttaacactgtaagttaccttgcgtagcagctccagcgtcttcttgatccgtacgaccagcagattaaagcggtccagctcctggagcagcaccaccccggttggtgacaggctcatctggatctgtttgcggatgcgccatgtctcgaaggcggggggcagcttcttcagtatgccggctgccaccgagtcgatgaagtcgtcgcggctgattccaccggttccctcacctggatgcaccatgcggcgaaaaaagagagagagaacgtcagtggaggattgtggtgctggcaggtgtccggacaaaggcaaggaaaatgccatgccgcagtaatatatgcagggcctgtggtttttccatttgcccttttttctgccacgtccattctcctccctgcatttctgttgattttattaatttcaccctttatcgggcacccaaatagaattttttcgcgtccgctttattttttgttgaagtgtcaattagcaaatactaaagctcatgaatatgcaaattatcggaatttttctgggagctactcaatagggtttcgagcatattgatgtttccccttttgggggttcaagttctgctttgactaacgaattaaaaatttactgatatgctcaacataagtctctaaaacaatggaattatataagagtcacaaggaatgaatttaattttcctattcatggtagcgttttaaacattccctgcagctgaacttttttggaaaatcgtatgtccttgcgtatctcgattgaaataaaatggttaaactcgatttttaatcagtggaaatatttgttcttattattacttttatttacactaaatggacaatggaggattggctcctctgtttacgctgaatactttaccaggattgacttcggtcgtcggtgtccacttggtcacttcgtgtgtgcgaatatattttaaaaaatattccaaattgtatatacaattatttacaaggccatacatataaaaaatatgcatgtttctgagtgggtggattaaattggggggctggcagttggaaagtgcacactgatggcggttttaacacgtttaagtccgtaacgcaaaattatcgacttttgtgtgacgtttttgccattttttggtacttctgatggcggttggtgcggtgaggtttgaactcgattcgctgcgatttgcggcaatccgatgaaagtgagtgaataccagtgggactgggagtgaggatatatacatgtgtgtgtgtacatatagggatatagatacatatggccgtgcactgccctccaatctgacccgacccatgtgggctacgtgtgcggttctattttaatttttaatgtgtgcattgctgttgtgcgccggcaataatggcgcatgcaataaagttaattgcaaaaccgcaactaattaattaaattaaattaaaaattcaacatgccaaaaatacaacattgcatagcagagagtgtgccggaatgaaaatcaacaagataaaatgtaataaacggctgacaattggcacacgttgcatgcaaattgaaccatttaccattgaccatttaccatttaccatgggtggccagtggtcatatctacattacattattatcattacttttttcggattccgcttcgaattatcggcggataggcaaaaggggcaaggcaagtgcgtttgataatcaggataatatgtggattttttgtgcggcatactgatgctatctctcgagcagttgtgcccgcggctgtacggcggttaaacactggattggatccgaccaggatctgactccatccacttacccgtctgtggctgcagctcaatcaaactgttccaaatgttgcgtgccgccattgtgtaataaccgatttccgcgttcggatgcaaaccaaatacatccggcttgttgaccagcggcagtttgtcgatgtgcgctgttatcaatgcattacatatgtaaatagctcggcaatgtgaccacccacttcccatcgctcacctatgtagtcctctttcagaatggtctcctcttccggcaggcagtagtccacgttgtcgtcctcatagaagtggaataccttaaactcgtcgaacaggaagtcacccatgtattcgttcatgtagcagttggttatccgtcggtcgaagtcatcgatgacccgccctccatacatcacctcgccaattaggtatttcaaactgttccacggtattttcccagtgccacatcgtgttaggtaagtgcgcaggatttcagtacacacatcgaagtccgtgtcgttgaaatcgtacgctatgttccagcccagcttgtcgtacttgcgacgttcctgcgaatggaaaatggttacacaaattaatcggagtgcctccaactggacgatcaatatcaatttgctgcaacagcttctgctgctgctccatcaattgtgcaacttcattctgaaaagctttcagctgctagaaattaagagattaataaataaacaactccacacactcgaccagctgggtttcgtctgtaaatagcgatatctacggttcactataactggtcgacttacttggacgacagcgtggaagaaggctagcacatagaccaatggacggaaagccacatgagagcagctctcgaggcgctcctgacgcactttgaagtacgttgagcgcagattgagctttagaccattgggtggctcagtgaccactgcgaaagtaaagataaattgtaagaatactcagaaagaaatatactatagtatactatagtagtaagatgtatacactttacccttcaacgacttttgcagaatgccaatggggaatgtgggcgtgggatctgttgttatccacagcctaaagtccggatgtggattctctatgcgatctagatgcttttccagttcccggacgaacctgatcagcaggtgtccgttctgcagcatcagccacattccctgtttgatggcaccatccaggagtcgcaaagcagccttctcctggccctgtcccagagatatgtgacaaaagttggacatgccgacaatcgtatccgccagtttgattagatcatttgtgggatctgacccggcactcagtacaaagcatacgggaatcgtgctggaggtctgttcgtatatggccgagaagctcaccactggcggcatgatatagaactcatccatcgtttcgacgatgtattgatttatactcctgaagatgcgatccacgcggaagcagcgcaggaacattaatttctgtgggggagatgggcgaaatccttgggctttagacattttaatacacactgatgacaatgagccgacgacagctcgtcatcagtcctccatagttggccagtagctgctctattgttgctattgctgttgctcttgggtgttgccaacggtttctgcggtttcgagctcaactcaagtgcaaattgggctcgcttcgcttggcgctggtttcaagtgcgactgcgggcgcaaattgccgctcatctaatggtttggaaaattgataaaatatggtaatgcacacagacacccaaagagacagccatatataggaatactgccaggcatgctggctgacaaaaacaggctgctaataacttgagaggaaaatgtgcgccaaagttgcaggacgtagcaaaagtcgagtaaaactaaacgccccccgaagtggtgtccttttgggcatggatatggatgagagcgtgggtatgggtatggagatgggtttgtgcctggtttgtacataataatccactagaagcgagcataaagtacgaaatccaataacgctcaatggcaaacgggcaagagcaacagcaactactcagaaggagcatctgagtaggagcctgagctggaggagcagctcctggccaggaccactcgaagctgaaagcatgcaaagcgagtggatgtatatacagcagcggcaggacgcagcacttgcctggaatgcattgcatttgatgttgtagtcgcccggacatggcacctcctcaggattctccaagtcgaaccactgtacgatgggcagagaacaggacacaggaccgaggaccgaggaccgagcaccaagagcaaaggaccaaaatccacagccgccagttcatgggcattgggatgacgatggcgatggcgataagtgcaggcaaaatgagcgtcggcaacggaacggaagtcagtgaatgccacatgccagtcagaatcagaatcagaagcagtttcgttcccatcgaccatccgagtccaagttgttggattgttgggatgttgggtcggtgagtcggtggttgtttattgttgttgggccatcatcgttgttgttgtgcattttatagcaccgtccacagagcagcagtagcagcaatttgataacggcatcggagttgacgttgacgttgaagatgatgcacccaagcgagcagcgggaaaatcggaaaagaaaatacaaaaatatggaaaacatgaacatttaacagcgtacggctgaactttcattgaggttcaaaagctgtgctttttgggtagttaaattacgtttaaactgtactttaaaggtggattggcccaagctgtaaaaaagcattttgagcatttgaatatggatcttaacactctacccttgactaatgtcactctaaaaaattatgtgtgcaaagcgctagaaaatagcaaatgtccaactcacttctttccattcggtaaggtaacgaccaaagtggtctggtaaggtgccgaaaatgtctgggaaatcgaaggccaacttgagcacatcctcccagctcttctcactcagccatttgcagggattggagcgttcgctcttggttagagcaatgctgcccttaatgaagaagtccagctcggattgcagcaaaatgccgtcccgctgggcgagtttagtggcgatttggaaggagaaaagcagcttatgccgttcaaagatgcccgtgcacccgtagcagtaaacgttttccgtaagcgttttgatgatgttgttcaaccgcttgttgagactagcatccggcacagcctttcgcagggagtaaacgaacacatccaaataggcggccagtgcatactggtacatgctattcactgtggccatgtccgatagggcaaagaaaagaacagctccacgtttggcagccggacggtaaccatttcgtagcacctcgatgtccgccgccgtatccgcggccagttttagctgttccatgacgacgcccgccttagtttttgtgttctcaagggtttcaatcagttcaacgttgtccaacatgttgcccgtcgaggtggacagctcgcggagcagtgaatcctccagttgctgcaacaactgcttattctcgctggtctgggcgatcaaggactcacgctgggcctcaagatccggacgctcggtgcccactacaacgcttagtaactggtcctccaatcctgtctgggttaccgtgtagttgataactagtgccttcgcatagactgccggatcgaatttgggattagagaacttggtggttaagtagactcggaagctgggatcccaatccacctccttgtcacccagcatgacgaacttgcgaccaccctgaatgcgaatattcttttgcagaatgtcgtcaatcactgggtctatataatcgtccacatcttcgaatagtacaggcgttccgtacataatggccatctccagttgcttgaggaagtcagagtcgctgaatgaaagaactttaaggttgtttttgaactcccttttgcgaatccactgcaacgcctgcagttgaggatcaatgcagagtgggaaccgagatgcgcgcatggtaaggatgccattttggattgaaagctcgtcgggcggcaagccctcgttgctccactgggagatctcgacgtcggtagtgaggtaaccatcgattttaaatggtagctgtataggaattcccagggacgcaatgtcttccagccaatcgtcgaagaccattgccttgcgaaactcccatgtaaaggcgcctgtgtaggccaaaaatgaggcactaatcaggcacccacccacgctgtcgataagctgctgtcccaggctagccatctctttgctccagcggattaactcagaggtcaagccactgatcaacttgtcggaggcaatcagacgacgctcggcctgctgcatcatttcagtaagggcacgcatctgtttcatggatgtagcataattctcgttcaactcgtttagcttctcctccaacttttggatttctccgttcaggtgattcagcagcttaatctgtacttcttgctcttccacaaggaagtccaagcgttccttcttgggcttgacctctttatatacatcgaagaagccgagcacagctctgacgaatctaagtaatccagctccagcaacggatatcttcgccatgtcctctaggttgccagtcttcatatgctgtcggcactgggttatttgcttctgggtcaaagcctcgcaatccatctccatcaagctctttagaaagtttacgtcgctcatcattcctttggcactcttccaatttatctccttatagccctttagaatagccacgcattcgcaaaccacttgcacggcggctgggggcgtggcaaaggatcggatctcagtgatctgcgccttttcgagttgggatagagccaatctggcctcctcgagagctggcatcgcctctgccagaatctcctcggcttcgtccttttcgatagcaatctgttttcccttaatctccacctcaacagacttttccgacgcctcggccttcttgacattagccttttgagtggaggactcgatagtgaccaacatagcctcgcactcctcggaggcgacagccacgttcttcttttgctccgtgacaataatacgcagttcgtcgatttgcacggaagcttcctcgatttttttgatgccctcgccgagacgcgaacgttgctgggtaatgaatttggccttttcctctgcataaagatattataatataaataaataaatataattattcctattgtcgtttcacgaacccaacaatcctctataggtgttaatatagtccaagtagtgtttgggggtgacaaaattgttacgccttagttttgccagatagtcctttgagtactgctgtatggaagtatggacatggactacatgctccactatggcctctcgatggctggccggaataaggcggtgctcggtcaggaaaagtttggccaccgcgtacaaagcctgtcggggccacgggaacacccaatcgatataggtactgccaatgagacccgggaagtttcgacaacgattgcgcagcgcatcgccagccggagacatacatagaaccacgtgcaggttttccgcacaggtgcggaggaagtaaccccaaacagcgtctctgtgattgagggaaaagggattaagccacaacaaatgatggttaatattctgtcactcacttggatgccgaaactccatcctcttcggcgaacttgcgcacttgattgacgataccatccttgtcttcatcggggaacagggctggtacttggcccactgtcaggatgttgttgatcaactccaagaagccctcttctgctacctgcgctcccgtaaacaagaacacgaccttctttcgcttcacgcccgctatggtgtaaaggacctttagatcttcgcggaacgcggcttcattgtaaccacgggaaatggtaatctcaaagacatcacattcggcggcaaaggcggccagacgagtaatgcacttcttgccgctgccaccgactccaatgagcagcacatgtccgcgattcatgcgcagcgtccgatggacgcgggtcagatgctccagacagtcctcaaacaggaccaatgtcatcttttgtttgcgttcacagtattcctctaggatctccgtgaatagaaagtatacagagttgtagtccaaaagatcctcatataaacgaggctcagattcattggtaaaattccggaaatctccaaagagcagcggatcgcgcaggacgtagtccttgagcgagagtatcacctgaggcgcctcctcgccctcctcttcctcttcgccctcttcctctcctccatcgatgtcagccttggatggctcatagagcaaacgagcctgtgcctctgcttccgctgctgctgcatcaataaatccatgctcctcctcgaaagttgggggaaaccgttcggccacttccactgccagatttcgacgaacatttgcgatgtcctggtatacaggaatacagtaatgagaattggcaataatattaagttacactcacgttatcggttatcaggcgatcgcatatgatcctggtgtactcgttgcgccacaccctaatcaggtccctcagccccttgaagcaagtgggttcgatgagcagcattccggcgaagatacgcgacagatccttcagattgaaaatgtagtggaacttggagggcgtcggtggcaggtccacaatcaccatctgggaatcaggaagcaattagcataagcgagcctaaccagacaatggaccatgtaaccggtcgagctcacacaccacagcctctcatacatatataggagcccccacacaaatcaattttatctcgactagcaatatgcgttcacaagggtcgcagcaaggactttctccgccccctttttggggacactgccaagttgctgaatttacagccattatcgagttgcagccgccgcaccagcagggcgcgcttctgagaaacggcaattctattcaaataattcatttcactccatttcgtggcgcattaatatccttgccctgagtgtgtaaagaagacatacgaactaggagctcctctggcccggtggcgggcagacggacaggggtagggcaggtgtaagtaaatcattttttcggatatggaagggtcatgctgccaggccaccaggctaccctggctgcttgtggcaattgcggcgacaaatgcatttttatctgcacgcaatgaaatgcgataatattttagtgtcaacaattgttaaaaggaccataaactaatgctccggacccggtgccacgcccacagctgcgaaaagagccatctctctacagttcaatacttgaacataatcaaatttcgccccggccaagatattccggcagcgataggcaaaacgagcactgagtaaagcagcaggaccagatacagatacatctacatccacagccggggccggagggccagatacagtcaactaggcagccgtcgaggcgggtgaccattgtgagggcagagtggagtggttctggagtgcagtggattggtggtgcaagtacgggtgggtcttctacggcgactacggcactgagttgcactcgaaaaaccaatggagcagctacgagattgagaacaaggacgatggagaggacgacgaagcccgtcgtcgtagtgcattacagaccattgaataatttccatttccattgtacagcgagaggggcgggggtggggaagtggggcgtggcaggaggtgagcggcacagcaaagcagattatgaaaaattgtcgttatttgcatatgtaaatcgaatttcataaaatttgtgagaggccttaaagcattattcaggaattgatttcttctagtgaatttgcactgaatgcagtcaaggtgttcactgatattgaaataaattcaaccgaaggcagataaataaattcagagtctatatgggtgtcagagaaatatctgaaatgtcacaaaaatgcatttcataatcggttcttctgaggcatgaaatttgaaatcgaaccatagccataaagtttacttaaaaatgtggatttaaaattaaataataataattttaaaaacaatctgtagaccgcattcgatttaagtatgcttataatacttaccttaaaaagttttaatgtcatatggacaatcatgtcggctataagcatgtactcgggctggaacttcacgaataccatatgtcccttgaagatggaggagtagatctggatgagggactcatcgttggggaatatgatgttgtaggtggagaacatgctgataaatcggggatccacctcgttcctgccgccacccgctgttcccatggctgcgtagaaggtcagatccttaaacttcttccagttgagatccttgtcgcggtcgtacatgccgccgcgttcaaagaatagcttcagcagggcaatcggctgctgggtgccatagctgcgagggagggagataagcgaaatgagatggaaccggaattcgcttcgctatcttgctgctggaacgacgtgaactcactcatccacctgcggcatgttcatgtcatcaataaagcaggcaattctcttgcccatcggaggcccgtacgtatccttggtgcgtttctccacggccgcctccagggtgtgctgcacatccagcgatgaggttctcgatgaaaaattaatattgagtatgacctgaaagggaagcgccatgttagccgggaacgcgacgtttgtcagagagatttttcaattacgttgacactcggattgagattgcgcaaatattgcatgatggtagccgtctttgatgtgccagcctctcccacaagcagaacgggtcgtttgatctgtaaacgggattggagttggagttgaagcaacgcaatcgaaatagggacaaacattaataaggcatctcccaggagctgggagtaatgactttcccaaacagctaggcaccactcacctcgctcatcagactgagagtccgattggtacgggtgttgtccaccgtgggcaccaggatctcactgaacttcacttgcgggtcgtgtgtgtacggctgcaccacccattcccaggccttccaaacgttgtccttgacgtcccagaagtagtcgtacagtgtgggcttgctctgcggaaactgtcctcccgaggcgggattctccggcgtgtcctgcactaacggaaagccggatatgcgcttcatatactcatcaaagacaggctgatgcttctctacgaggcaagcgcccatggatccatagacagcttgcaggaaacagcactccaaactgtctgtattgtagttctgctgcaccggctcatcgtagttcttactatccataacatagttgggcaggagggcgtcgtagaggttgcagaactgagttaccatgttcaggtccgtttgcattatgaccagcttcaggggattaccctgagtagtgccatccaggccctccagaatgaaggctatggactgagtgataatcttctcaaagaagtcgttaaggagttccctctgaggctccggccgggttagcacccaccgctgccagaacggactgtatcgcagatttttggggtccacatacaccattcctgcccgggagacggtagcgggagaggcgtagtttagattgcccacctcgaagagcagggcgcagtagttctccagacggatgcgctcgccgttagccaaagtcagtagcttgttatcatccatcaccgagttcatgttttcgatccacagagcatccacatctccatcgaagcaggcgtaacgtcgctcctgtcggtgagttggcattgggttgcattagcctaagtgcgttactcaacgcctgtcacccgagttctcgtcgtcacccagctgcccccagtcagcttaccacccacgagtgattactctgcggagccgaatgaatgagcttggcttggatacgaaaatcagcagggattcacacaataaaaaattgcccgaatctcatggacattcatttttagtttacactacaatgtattacagccatgttgaggtaacaacaacggaaaatttttaacatattcataaatttttaaaggtaaataaataatagatttacatagatagactcaacaaaacacccccaaaaaatgaaatttatttttaagaaattttgaatttgtatcaagcccatataccccactttcagtttttatgcaatcccggcttattactgtatgaacgcgatttccgcatgaatgatgcggcgcaaccaccaagcacctgcatttgagccccacgcgggtcgacattgagcatggtcgttgtcggatgcggattcgctgatgctgcactttaattccgggcgggttggcaccggcacctgcctagttgttcgccatcggagtcccctaatcccacccaaaaagacagcccctttttacgtacctctcgctcgatgggcttattcatttcacgaaatatatttgaaaacaatccatcaatccaatccctcgtttccatatccaaaaagccgtataattcgatcacagaacaggcctgcaaataaaaatgtgatgataaacatgaccgaatacattccccaatgatactttcttaaagcctaatgtatgcacaatcataaagaatgtttcggttttcaatggaccaaagcctgattgctttggaactgcagtatcaatgtttttcaatattgcatggagtaattacagtccatgcaattgaacaatttcacaagcacttaacaactcggatttgccaaagcaaaatgcgaaaaacatagagaagtgcaatttgaagacaggacgaggccaaaggacatgcacctaagctcataaaggacggagcaaactaaaagtgccgcaggaggaggcaatttgtgcgcttgtccaaatttggtggatggagccatgggtccacttaccttggggttaagcacaaggcacttggtgggcaggcccatgtgggtctgcgccttgaccagggcatttatgacgacagttttcccgccacctgtagggcccaccaacatggtcgagtgcctggtcatcatggtctcgtacatttgcactactttgtcctcctaccagccagagtttttcgaaaggacgaagaaggcgttgccattgtggggatttagttgtcataaatggtgttgcacggacgggaggaaccgagcccgggtgacatcgcatgtccagcagttgtccatttccggcaggaggtggccgacatttgcgcaacattttgtttgatgaaagtgggaaggattttgccagtagttcgagaatagcgtgcatggaggagagaaagaagaaatggaaaattgtattagtgaaaattgtcagcagttgttgaaaaagcaaagttgaaattggacgtgggcggtgggtcaccgtagaagccggtgcaaaatgctttgtaacatttccttcatttgcgattatgcgacatggcgcaatttacaaagtgtcaaagtgatggccgccaggagagtgtcacggctgactatgggttgttgccactgtcaacacggcaatgacagggcacaaaccagtggacagacgcacctgatcgggcagcaatatgtagccatcgttgaccagcacatgacgcacggcggcattgaagtcgggataaccgatgcgggggcaatcgataccaggaaacagatccttgataagtcccaggaacaatggtacatcctcgaaaacgaatttgggaaagttcatgtcacgcagcactcgcatcagcaccactgcctccggtagatcctcagactgccgcttcattacgccagccattcgcagcacggagttgagggatcttaatccccaatcgtaatggcactgcttcgacagctgcgcctgcgccagggagtacaaaacggtcatctttttggccaataccttggctgtaaggaatccatcagaaaacagggagatcaggcagatcagctctagatcgggcttgatgcaggtcactggacggaacaaagccttaacggactcgggtagctccgtgcggccagcgtagccaggattcatggtcacgaacacgccgcatttgggatctagatggatctcaaccccttcaaactgatacaaatcattattaaacagagttcaaggctaattttatgactacataccacaaaccgatccagtttccttattaagccattcctgatggtttgcaactgtgttgatatcacactgagcacagagatgtcgatacgattgaactcgtcgaagcatccccaggcaccgcactggaccaagccagagagtatagtgcccactgcccggtaatccatgccctcgccgcaattggtgaccacacaaaggagacccatggccttggccagatccttgaccgtctccgttttacccgttccagctggtccagcaggagcaccacccagattcatgagcagcgcttgggtgatggttaagtaaatacgatccgtgaggggtgttataaccaggcgaccattaagacccatgtactcgtaaccgaagtcgaagcttccggagcactggagcacatgcagattatcgtagaacttaatccagtagaaacgcagctgactttcccagctgaattcgctggcatccaggacattgtctcgcacaaagttgtcaataatatcccttgcatggacatccactgtgcactgggccttgaacttgagtcgatcgttgcgggagagattggagcgcaccttaaggaccagctcctcgatctgatagttgtttttgccaaggaaatccttcatggcccgcatgttgccatgattttgggcctggtcgaaggcctcctccacctctgccgtccaccagacttgactcgcagccagcccaaccattccctggtagttcattagccagtcgggcctgcggacacaacaaagtcgaaatcgaaagtgcccaatgactgtcaatttaatacaattggccataaatatgccaggccatgcgccccacggcttaaacaaaataataaatcgcgcgaaatgacaaaattatacagtcgcgaccggaatgggaactggatgagagtcggagcagttgacttcccgcaatgtaaatcgccggccataaaaggaattggctgccgaagtgtcactctggtacccacccaggactcactctgccttccccaccagaaggatacgaaaaggaagcggaaggacaggggcattaaatatgttttatgcccagctgacggtagcacttaccttgaaatttgcagatctgtgccaaagtcgtagatggccgtcttgtttatgaagcggttggagcggcgcatttcgtccaggacatcgttcatccagtactccacgcgtcccgctgcccgtgctgttattcatcgcacccggaggaggaagaagcaggcgaaaagaaaagacaataaccgcataaataaaccccagttgccaatatcaataagtgttatacaacaaacaataaagcaacaacaatggcagtaagaacagaggagcaatcatccccagcttggctgatgggcccatgccgatgcccaagcccatgcccatgtcaatgcgccacgatgccaactgcgactggcttcaaattaattaaaagaaattggccagccggcaggcagcagacaatattgccataaaaaagttcaattttaaaattggcaatcagtgcgtggatgctggattgccccgaatccgtttcccgaacggaatggagcagtacctaccagagtgccggaactccatgacctcgccctcgctggaaatcatgccggtaacaatcgtctggctgccctccttgaccaagcgcaacgacttgatattgtcgtacatctgaaaattgaaaaatcaatgcaaacgaaaagggggcagggggcggagggaagaaaaaatatatatattatttataagccaaataaattcataaaaatttaccacggctcaagcgtcccaaaacgaaacgaaacgaaacgagaccagagccgtgcatgtgttgcagaaattggcgtaatttccgccatggacattggccagaacgaataaacagtgacattaacttttatggcaagactctatggtatatacatacatacatatatgtatatacacacacgcgccctgttgtacataaaaataatgtcgctggcagtttggcaaatctgttgttgtcaccaccaaaagggcagcacacccaccaacttgaaaccagatacggaacccaaaccgaacccacccgatacccaccttaatgatgtggttctgcactgcagatggctcactgctgcccaggatggagagcagctcatcggtggatatgaaatagaaacgcggaaaaatgcgacgcttcgagtccaaatattcgtttaacgacttctgacaattttccaagccaatgcccaggccctgtatttccactaagcgaccgggtactgtgcagaatggcaccactaacggatttttggcacaatcgaccatgatctgcaatggaagatggagagaaagatgtagtagggaactgggagcaggaggcaggatccagaacgcgacatcgccagtcggggcagtaaattattatgaaaggcaatgagcgcaacgaccaacccaaatacaatcaaacatattagacggaagtgggaatggttatggtgtatgatatatggcatctagtatactctacatatacaatataattttagtctttagtaagtaccaaattagtaagcattttactcgtgtttctaaaatactaacgtttctgtaatacttatacttaaaacccatccaagaatgcaaactttgttgcttcaaaatgtgaaacaaacgcatggtaatacttaaattgtgtaaagtaattttaatccggagtggcactacagcccgaactgaaggatcttaattcggtcaattcaagtaggaggccctaccaatggagagagtatggaactcaacacgaatgtcgagagcaaatcaaaataataaatcatttcacaaatggcatcaaatatggcggcaaatgttgcaaatgaaacgtaaagcaaacgaaggagggaatcaagtggttggcaaggttaagtgaagttaagcgccaaacacaaacacaaatctatcctcccacacacgcccacttgcacaccgggaacggggagaaagccggtagtcggtagtggaaggtgaaagtgcttggcatttgtaaacactgttcgggctaacgctgcgtatgtgtaatgtgctacggctactgtgatatcctgggatatcctaacgtatttcggtgtgtgtgcggctacacaattacgcatacacaatagcagtcgtttgcatgcgtattatgtttaccgttaagtaaggagtcgccatactgtcggcacacattaaatcaactcaaataaattgtaggcagacactaagtgtgcgttccaaataacccaatagctacataaccaggaccagcaaataccacggattactcaccctgcgatacgacttgtcaatgtcatcgaatttccgcgcctcctccggcagctgggtacgaatgtcgccgccaatgaatatgccctccagatagagccacttgcgctgcactaccaaccactcgtcgatgatctccgagatgagggccaaggtacgctcccatttgttcaccgtctccagaaagggtccaataaacctggtgatatacaaattaatataacaatagctaagattgcgtgtgatactcactgactggctcccatcgactggagattcatggcattatcctcgagtatctgcatgatctcgtccaccggacccagcacccaaccccgatcatctgatcccttgaagtgcttgaaggtcttgaaggccatcgaggcccaggtctcgatgacagcctggacaccccgttcgatttgcaactccttgatggcattggttaggatctgctcggcgatctcctggtacttgtgcagctgcattgcgaacatgttctccagcgtgaatcgggccggtgacatgtcgaagtactgacccgtcttctccatcaactgcagccagtggcgctccctgagagcctcgtgtttgaggctaaccatgagcggcacggtgcccttgaactgcttcatgtggatctccagctggacgccaacgggcagggtgcgcacctggaaacgaaaacgaaaagttcccattggttagcgaggtgtggatggttagttagctggctgaaaatcagctgaaacaatagtgtggttgttgcctgtggttgcccccattgaattatgacgaacgcgcgtcctgcggccagtggtttctggtctcggttatgttttagctaccaacttccatcgttcccatcattgccattgctgttggccaaaaagcgcagtctgtttgcacgccgggctgccgtccgtttgtttgcacatgcaaaatgcacgacactccggaccattcaggacataaattgaaatagcaacaacaggagcaacagcagcaatgcagctacactgtcaacaagtcgatggacaggacgaggggtaggggtttgagtgtcggagggagatgacatggacaggccgctggcattttaattattttcaatattgaacaaattgatttacattttaggacgctgattatgtagagcctttcagtagttgctgctttggggactggtagccgaaattatgcgcgataaaactgcagtaaaatatgtgcgtgtcgaatgattatattcaaatttgtttgcacccactacgctgtttatattaatcgcggtgcttttgaaatatttgccatactaatcttctatccgccggagttatgatgccagaaagccaaccccacctagaatggccaccgatgctttgggccgccccattcggtggtgccacgccctcttcatttgtatggtcgatgggcgaaaagttttggctgcaacaaacttttagcccggccagcgaaattcctcaaaaacttgttagtgaagtaaataaatcaatttgtcataatcagtttaggtgcaaaattttgtcgctgcaaggcgtggccagaaaattctcatttcttgtttaactaaagctttggggaaacctcatggaaggccataggtatgaaaaaaggaaatacctagcaaacgaatgtaatgggtttcccccatcgcacgcttttgaacgcaagccgagtggaagcaccagatttttctaatattctgagattttcttttgagttattcgaatagcccgacatgcttgagcgtaaaagtggcatcataagacgcctttcacagtgagttcactgttcaaaagtattttgcttttgttgtttcaaggcgtcctgtaattttatgaaaatccaagcaggccgaaaaactttgtttaattggcaaagtttgccgcgccccggagaaaaagcttaccgccttggtaaatttccggaactccttcagatagctctcgacgccctcggtcagtacattgggatccagatcggcccacaaggtcttgccccatccttcgcgagcgtatttctgcgccttgtatagtttgtacagctgccagagtgaatggggtttgaaaatatccgatgaacaagtaaggatatttattattcagaataccctacctgctgcagtccctcaaactcggtttgcacccgcgcaaactcatggtaatcaaccatggccatgtcgaacagtcgctctgcattggccagctcctcgcgtctcgattcgcgttcggctattttctggccatacggatccattaggcgcactcctcgctccagttcggcgcccacggagccgggtccgttctcgtcgtaatccttgataaactcggccaactgtcaagtaaatgaaaaaaggttagtgcagcacaaagtagcagtggcactgggaatgggtggtctctgacccacccagccaccacatccgtctgtcttgcgctctaattcaaatgataaacacttcaagttaattcattttacgctgacgacagcagcgacgtcgccgctaacaattgacaataatggttgggcgcgcggaaaaatccaattaaaatgccattgaaaggaaataataatgggaggaaacaaaacagaattgcagaaaatgaacgcaaaatagcggaaatgcaaagtcgacagcgcagcctcagcttcagaatcagcctcagccctaatcccattgccacaactcgaaaaggaaggacctccgggggacttccttttcctcctctccgacaacttacatcatcgcagaactcatcgatttcgacggaagtcatgtcggcgaatttctgcttaattggttgtagcttctcgtagcgatacagggccgataggaagagcctcttccagcgcttctccaggtgatgggccatcagcatgtcctcgtaggggaactggaatggcagaggtgaattaaactgcggatcgaaatatatgcaaatgcacataaaaattaagcagtgcccttcaattatggctgagtgcaaataataatcatgaaaagtgccgaaattcactaacgaccagcgaagcgtggtgttccacctcttctgcctaccccctctccccttcttttttttaaacaacatccaacagtccacaagccgaagtggaaaaaactatagcatagctttcagggccgccaccgcataaattttcatttggcctttcccggcaattgcaacgccaatacatacaggtaaggtcataactgtagctaacagagtatctaaattgcatattctttacagcgatcacgaattttcattatttatattttgtaaaagtttacatttcgaaagaaaagcattgaaaattcttttaaagtctttaaaacgtaaattatattttaagctggattgaaatatattaccatttcatggcgaacatccaaagagctactctcttatccacagctgtatatgtattacactgtgccagtgtgcgggcgtatgcattcattcgttcattaatttatataaaatgcaagttaattcctttttgtctggccaaagctaagcgacgtcgccgccgcaacggaatgccatcaataaatgaacggaccgaagcgaagcggagcgagcggataccgaaatggccagcacacagacacagattcggatacgcagcattggccgggcccggatcctaatctggactatggagcatggactctggcacggatagtcctgttgctgctgcagctgcatttacgtaaccatttgtgcggtggctgcgccaaaaagcggaaagcgatttccaaatggtcctggccagaccgaccgccgaatatgcatatgtaaacagaaatagaaacagtgacagtagcctcagtgcagctctgctgggatttcgatgggatttttgtaaaactgctcatttgaatacacaaataagcgcgccatggttggcagacttaagtaactttcattaaacggaggggatgtgcccaattcagaaggattggattaaaatgagaagctcgcgaaaaatctgagcaaaatatttaaagacgattcttaccataattttgtgttcgctaagaatggtgaaggtctcctgcatttcgtggattttctgctcgttggtcaacgtcgacgactgcaccgtgccaatcgtggtcatgaccagcttgaagtcctccagctcgcgtgtggtcttgttcagattcaggctaagggtctgccacagatttgcacagattaggagggttgtttgaaagggatgtgtttgtggaatcttggagaatcaggactcactttgacttcgttacgcattgccctcatgttatcgttgacatggcgcaacagctcctcgcccagtgtggtgcaccagtcctgggcatgttgcgttatgctcgccagcaagggctccaaatttatgcgcacacacttgatgtcctggaacttgcgggtgttggccagtgtttccacaatggacgagtaaaatgtaaatttctcatcgatttcgatgagcgtcacctgtttttccaagaacttctggcagatgaaactcttctcgaaggcccacagattgaagtactttcggaatctttggcataaagtgcattaattgggattttttttcatttttcattccacaaacaaagcaattacttactgcgacacaaatcccctggcttcgttcgccactctagaagccaaatcgtgtatgtttatgaccagatccacaatggatcttatctggattacgtcctcatagtacgtgtaattgtacttgaactgtttgcccatttccaccagtggacaggctatgcaggttccggtcatccaacgggtgaaaattctcaacctggatatatagtccttagtggcagtcacaatggtgttctgcagctcctgaaccgaaggctcaaggacgatttctgacatcaggagaacagcgttcacctcaaacatcggtttatttgagagcaggcggttgatatagcattttaaattctgatacgtcatgctaaaaatggaattaataggttaactaataaggaatctattgaagaagagaactacttactcaacaatacacttgaatgtctctccttcccaatactcgtagtaggttttcatccggtccgaccttccagaaaatgtgcccaacaccaagctctccagcttgactaataccgggcccagggagtcgtaaagcttcttcatttgggctgcctttcgattgcgcgatgcctctaagagttcgaaatatccctgacatggatatatgccggatccacaggcttgctctgccttttcatccgccggaacgtctttttcgaccgaaaacatcgttatagtttccccagtgaccgatttgaatctttgggacgggttcttcctatcttgtagatacgattcgccagaggatctagatgtatcctcaactttaagttcatcatcaaggttgaacaaattgaaactcttaatcatatcgatacgagagcgcagatccaggcgaataaaattgatttgggatactatagaggtcagtttgcgcagctgtgaattgatttgatcacagaatttgcctatattgaacgaagtccaagtgtatcgacccacgcccatttggataaagagttcagtgtcgtagatgtggccgcgtaggaagatcacctctgacatggacaggttgttgataattgacctatacctgtcaacgacctcggtcatcctttcataatccttgaagagcaggtcctttttcataatcgcagtacgcaagactgcgggaagtgtaaagccaagatgctcaaactgctgagcttcaaacaggacatcgaagacatcgcgcttcagattgacgacaaaatccatgtcatattcgataagtgttttctccccaacgagttcacgccaaatgggcagcagatattgggactctgctcgttgaagtactaagagcagaaaaaacgatatgtctatacaattacaattctgttatatcccaataactcacattcgcaagtcctaacacagtgcctatccattgccgtaacatctttgggcttcttatccttgaccattttaataaacgctgtgcattcctgaagttgtatatttgcctttcgtgtgttactgaccatccacatgatcatggccaccagcacggtcagtcggttgatgcggcacatcagtttcttttgtgatgtgtcacccactagcaagccctcgttctccgattccgagctgatttccgttcctgccgaatccgcgacgctgtaggcactaaacgcttccgattgcacgggcataagatttgaagactttacgggagtaacccgcctatcactggtcatttgcaattcaggtcggggcttggccttcaaggtctgcacggcttcggaaatataggacactacggggacaaagattaattccttcttttgtaacctactgttcataagccctacttgtagattccttgcatatgcgaatacgcaacacattggatcggtttgtggtgttcaccaagtacgtggcgttctgtatgaagttctcgaagagcaccttttcaaactggaacatcacagtcattaactcgaagtactgcttaaaagagctgcgctttaggaagctgttcttgatagccggttcatcctccaccctcttgaatgccagcaccgaggtcttgagctttttacctagcaagcgggcccagaagatggcacttattttggccggctggtgcttggccatgggaggggatttttttaatttctggaaaggcaaccacattatatggggactacatttatgaatcacaacaaaccgtgaatacgcgctcaactgcgtttatctcggtcacaaagaatcgcagtaggttctcatgtttggtggccacaaactcctgtagagtggctctggtgtctatgttcatagcattgaccaccaagtcaagacccttctcagaggacagcagggagttgatgctttggtcgatcacgttcttggcctcattctccacattatccagccgcttgttgaacaactccagcgagtactcccagttctcccagtttcccggtctgaacatgtcatagtcgacgctcttgatcagatcgtcaagcatgcgatagaccttgcgcatcaggttgtccacaatcgagggatccgcaatgcaggctttcaagcggtgtccaaacagattctcatactggacgaacacgcgacccacataggcaatgtccacggcgacgcgatggatgtggttcacctcgttgaagagcgccactctgtcgaattcccagcgggatccagccccggaatcctcgatgtgctggcgactgagcttgtaggcctgtttccagcagcgcagcaagttggcacagttggtggccgtctcgtaggtgtaggtcgctgagtacctgtccatgagataaataatattttagttcaaaataatgctacttattagtccatcgatctgaaaaaataacggtttaatatcgcaaggaacttgattcatgcaatgtgatgatccagcgcgtcacgcgctcatctctagttcacaagtaaaagttgcgcactgcactttgcaaatttactcacttgaatatgttctcaaagttgatgatgctcttcaccttctggacgaacacattcgagatctggcagagcaggacctgcatctcgggatcacggcaatagtggctggacatggtccagatgtggcgtagcccaaccatgatgttggggatctggagcaccaccatcttaaagctctcatagcttcgtactttctggtgagtagataaagaaattcaaaactattagtactttcactgataagctttaaggttaggttacggttacaattaagataagtaagcaacaataaattcagaaagactacgaaaattaagcactgtaaggtttcggttccgaaaggaacacgcctcttgagcgaaccactagttccaagccgaaatcaaatttccagttttagcgttgccacttttttaaaatgcataatttccattttaaaataagttttttagtttccaacgtcttggatctggtatgtatttgaaaagtgtacttgtcctataagctattcgatgcaagtaattcctttttcctgctgtaaaaagtggaactgtgaaactcacctccaggtaatctatgatggtacctaagtagtcagagttttccttggccaacttgaagcgagcctcagtcttttcgacaacagcttgccactcatcaagtactggggatttatcatcagtcagacgctgtagaacagctaccacaaactcggtctttaactgctccaaagttccgtagagttccacctccattttgtgccagtagcggtgctcggccattggagtaaaatcgtctaatttggcatccgtaagcgtcttcattgtcttcttgaggtacttgatccaaccgtcgaccacttcttccagctgctgctgggtgtatgttatcaccaggtccagtctttttggatcgacaggcaccctaatgatggcgtcctcgaattcggttgcctcctgaccgggcagaatgtacgacgacggcagactaaaggcccatacaatgtgattgatggtccacgttatttcactctggaactcctcgatctccttgagtagccgcctctggatgggcgtgatgcgtggcggcgtggcttcttcggcagcgtgttccgcctctactttggccttcgtctcattgagcatcttttcccatcgttgaccaatcgtcagcttttcgacttttatctccactgtaaagaattattgggtaagtaactcctcgtgtatataaatagaaataaaagattcttaataagtctagaccaagtatttctgagaactaagtaagatatgtaactagactgagcttcccttgaagcatctattcaccttcctcttcggaggacgacaaatgggcttcaactttgtgggcgtcagcttcttcttcctcctccgtgggctcagcgtccgttttcttggccttcgcctttttggccgccgcctccttctccttcattttcctgggaggagtggcaaataaacaaacaaacacaattaacggccggccagtatgcaaaattaacacaaagcgtaatgaaaggctaccgataagcaaaatgagcaacaaatacaaagcgtaacaaaggctactccgctggaagtggacgaggatatggccacgaacccaactccagcacctcctgcgttggcattttttaatctgcatgacagaaaggggcaaaaaaaaaatgttaaaacaaaaaagatgcccgaaatgaaagggggaaaatttaactgtggcggtcaagtggcattcgcgaggcggcaatgaaaggccaatgcaaggatgaatgaggctcgccaggaagtgccataaatgctgcctgccaaacaaatggaaaatggccagaagacaacaacccaacgacaccgacgacaacggagtacggcgccgttgatggtagcatgaaatccgattaaaaataaaaatttcttatcggatgcgctgtaatttatgtgcgaaaagggttctgtgcaccaggatcgggaaaaggagcataaaaaaggggagcaacggcaactgtggccgatggtaaccagcgataagcgcaaaacaaaggcaaacagaaaatttgcaccaaaaaaaatcggagaaaaaaaactcgaatgggttggttgaaagaaaggcagcattcacaatcggagcccagtcactcctccactccagcagcagcagtagcaccagtagcatcagcttgaaaccaataaacccaggcccgatttttccccagaagccagcagagcagcgaatgccacaccctggctgcctttgttaaaagttaaatacttttgttgtttaagcgctctcaaacgaaattccgatggtttggatagctccaatagacccgggcccgattccttggcctcgctggatatatcctcgccggtctctcctgcagggccgcccgctcctccgcccccagatccgccggcctgcccctcataactgtccatttgctggctatccgctgtggccggttcgcgaaattgaaattgaatggcgctcttgtaaacctgattttggggcgaaaaaaagaaaatagagcccacatgtacaatggaatcaaagatggagtgcccggatattggaggccgcgttgttcagggcctgcggtctgtgtagactttctaattgattcgccccgttcgccattcgccgaaaactgatttgcaggcaaaaattttccaatttattttcatgcaaagctaataatatgaaagcccactcgctgccgactttgtggaccgcagaattcacaaggccgaagtcttggctggcatggcagtctaatggaaaccgcagcccattttggagctatgatgaagcaatttgcgttggcggtcaacgcttaaggctcggttcagtgggcgtgatgccccacccatcaagtcaaccaagtcacccaatccacccgctatcctcacagctccaaggtggtgcagtggagcggaaaaatcttgcggcacagcgggcattttgatagatgactgccttgtttcgggaattaattacaattcgtcacaacattttgttttgcggtcggagagcggacttcgggatgaaaagacaagcggacggaaggacgaacgagtcgttgaaacaatgctggatcggccttaaagtccttgattgattgaacaacggtttatggtgtgtgaaatgagcgaatcgggtgcaagtttgagtgattttggtttggtgatgcgtctcttaatgtccgattacggatggcagctcagcagtacggttctctcagacttaccaggttcaagtcatccctcagcgagttgatgagtgaccctcgaacggtgcctagcagaaagtaaaggggcatttgggcaaagcaggccgatacgtcactgaagtttgctaaaaggacataaaagtttacaacttacagggatgcatgagtgcgtagtagaataataatatagtgtaaaggtaagacctaatgtatttcatatttaatatataaattagttaatgtactcacgtatctccctccggttttttcgcacgatgtatatgtacttaatcttcggatccaagtcacaggactccatccttccaaaatggcagtgcacttgtggggttttcacgtacgccgggacaagtttctgtaattttaggcgacattactatctagtactatgttctatcacatcaaattcagggagttgagccattttcaattaggaatctcccaaacactccatgtgcctttcaattagggtgctcaccttcacttccacgtagacgggtacataagtggctttcttcttcctaaatttgcttccttttgggagaaggaggtggaacatttggggaagtgcattagtaaggggacgaaatgggcgtgtcagaagcgagtaagcgaatgcagcgccgcgattacgattgtgattgagattgatggggtggaacaaagtgcagcgggcggaatttgcattgtggcaagttgcgcgcttccatttaaatgcaatgaatgagccggcgaaactttgctcttatctttgcaccaggcaatgggaaatcaaatgagtcggttgggtggaatagtggctgcgtcggaatggctgattcaaattaaaagttacaaaagaaatgaattttagccgggcaaacgaaaatgaggcccttaaatatttatgatgtgaagtgggcggcgcaaatcaaagtgtggaccaagattttcgtttgatatcaagttggacgggctacaaatttatgcatcgccaaaatggggaaaataaaggaggaaaaactgaaacttttaaattaaaatctttggacagtaacaaaggaaactcaagtaatgcatccatcttatttaccgttttccgtatcggagctggctgaaaatatggtttttatgtggttacagagagataattgtaaaagtttaatcataaggcagatattcctttttcttcagtttagaactaacccaaaaaatccaaatattatgtagttctgacttacgtctggatcgagctgagctcttgccactcccagccacggttgcctcctcctcgccctccaactcgccttctacctcggcatctgtggtttcaccaccagtgttgacctcttcgacggcctcttgatcaccaccggctggtgccgctgcatcctggccagctttcttgcgtccctttccggctgctcctgccgatgcacctgctttgccggcggactttccgcccgccatccgggcatcgcccttctttttgcccttgccttttttgtcgggaactgtgggtggtgggcgcggcacctcctccagcacggtaatctcctcctcgatgagtttgtcgtagaaggtgcgccagaagaacaacaccacgaaatccaaatcgttttgggtctcgtaacgtcgctggaaaaaattctccacggcaggcatatttttgctgatcgttgcattcacatacttgggttcaaaaactcccagcatattggacataatcgtcttcagccagacgatacggggttcaacgttgttaagggactctgccgtggcatcggcactgtctgaggtggattcaaattgcgtttgtgacatggtggtcgtcgcttatttgaataggttcttgaagttgggcggtggagtgggtttccgatgtgagtgggttttgggtcccttgcttgctctcttttggttgtttggctgccacgtcggcgtcttcgcgcggctgaacatcaaacgtttgccttgatttcgcaggatttctcgttacaaacaggatctctcgtcctcccacttggatgccaacttggtggatgcccaaccacctttccgtttttgttgttctttcaatcaatttcagctgcctcgctgtgcagtttggtttcgcttccgccacagagtgctggtgtatttactcccgggcgtctgaaaatccttttgtgtatcccaggacaacagttgcggctgcagctacggcaatggccaatgccagccgtctaaaaaccaaatatggaatgccttgaaatgttgtctttgggccacactgttcagatatacaggtacacaatttgttaacggcgtttgatgaaagttatttccatttccctgacgaaaatatagcagggctgctttgattaaagctgtcgaataataataacgacgttgcttaaattgtttatgctgcttgttttgattccatttcccggctatgttgctggttgccttgactagctgttgttagggcaacccaatcctacccaactcagcccagtccaactatccccaacccatccgatttaatgtaatttctggtaccccccttccggttacctgtcagccgcacttgcaacatgcaacagtcgaatagcaatgccagagcattgtgggccctttgaatgcaccaacgcaacacaacacatcccaaccaatcccctgccaagttatagagctcacgccgttgcgtaaacaaaacacgcagccctgacttaatggctatgcacattagcaacgtgccagggactttcccagttgccaggtctccgggtccaggtcaagtagccccgtagcccccttggctcctgggaagcggcggacg

SEQ ID NO: 2567 - DNA, 14542 bp, DROSOPHILA
atgtcacaaacgcaatttgaatccacctcagacagtgccgatgccacggcagagtcccttaacaacgttgaaccccgtatcgtctggctgaagacgattatgtccaatatgctgggagtttttgaacccaagtatgtgaatgcaacgatcagcaaaaatatgcctgccgtggagaattttttccagcgacgttacgagacccaaaacgatttggatttcgtggtgttgttcttctggcgcaccttctacgacaaactcatcgaggaggagattaccgtgctggaggaggtgccgcgcccaccacccacagttcccgacaaaaaaggcaagggcaaaaagaagggcgatgcccggatggcgggcggaaagtccgccggcaaagcaggtgcatcggcaggagcagccggaaagggacgcaagaaagctggccaggatgcagcggcaccagccggtggtgatcaagaggccgtcgaagaggtcaacactggtggtgaaaccacagatgccgaggtagaaggcgagttggagggcgaggaggaggcaaccgtggctgggagtggcaagagctcagctcgatccagacccagctccgatacggaaaacggaagcaaatttaggaagaagaaagccacttatgtacccgtctacgtggaagtgaagaaacttgtcccggcgtacgtgaaaaccccacaagtgcactgccattttggaaggatggagtcctgtgacttggatccgaagattaagtacatatacatcgtgcgaaaaaaccggagggagataccaaacttcagtgacgtatcggcctgctttgcccaaatgcccctttactttctgctaggcaccgttcgagggtcactcatcaactcgctgagggatgacttgaacctggtttacaagagcgccattcaatttcaatttcgcgaaccggccacagcggatagccagcaaatggacagttatgaggggcaggccggcggatctgggggcggaggagcgggcggccctgcaggagagaccggcgaggatatatccagcgaggccaaggaatcgggcccgggtctattggagctatccaaaccatcggaatttcgtttgagagcgcttaaacaacaaaaattaaaaaatgccaacgcaggaggtgctggagttgggaaaatgaaggagaaggaggcggcggccaaaaaggcgaaggccaagaaaacggacgctgagcccacggaggaggaagaagaagctgacgcccacaaagttgaagcccatttgtcgtcctccgaagaggaagtggagataaaagtcgaaaagctgacgattggtcaacgatgggaaaagatgctcaatgagacgaaggccaaagtagaggcggaacacgctgccgaagaagccacgccgccacgcatcacgcccatccagaggcggctactcaaggagatcgaggagttccagagtgaaataacgtggaccatcaatcacattgtatgggcctttagtctgccgtcgtcgtacattctgcccggtcaggaggcaaccgaattcgaggacgccatcattagggtgcctgtcgatccaaaaagactggacctggtgataacatacacccagcagcagctggaagaagtggtcgacggttggatcaagtacctcaagaagacaatgaagacgcttacggatgccaaattagacgattttactccaatggccgagcaccgctactggcacaaaatggaggtggaactctacggaactttggagcagttaaagaccgagtttgtggtagctgttctacagcgtctgactgatgataaatccccagtacttgatgagtggcaagctgttgtcgaaaagactgaggctcgcttcaagttggccaaggaaaactctgactacttaggtaccatcatagattacctggagaaagtacgaagctatgagagctttaagatggtggtgctccagatccccaacatcatggttgggctacgccacatctggaccatgtccagccactattgccgtgatcccgagatgcaggtcctgctctgccagatctcgaatgtgttcgtccagaaggtgaagagcatcatcaactttgagaacatattcaagtactcagcgacctacacctacgagacggccaccaactgtgccaacttgctgcgctgctggaaacaggcctacaagctcagtcgccagcacatcgaggattccggggctggatcccgctgggaattcgacagagtggcgctcttcaacgaggtgaaccacatccatcgcgtcgccgtggacattgcctatgtgggtcgcgtgttcgtccagtatgagaatctgtttggacaccgcttgaaagcctgcattgcggatccctcgattgtggacaacctgatgcgcaaggtctatcgcatgcttgacgatctgatcaagagcgtcgactatgacatgttcagaccgggaaactgggagaactgggagtactcgctggagttgttcaacaagcggctggataatgtggagaatgaggccaagaacgtgatcgaccaaagcatcaactccctgctgtcctctgagaagggtcttgacttggtggtcaatgctatgaacatagacaccagagccactctacaggagtttgtggccaccaaacatgagaacctactgcgattctttgtgaccgagataaacgcagttgagcgcgtattcacgaaattaaaaaaatcccctcccatggccaagcaccagccggccaaaataagtgccatcttctgggcccgcttgctaggtaaaaagctcaagacctcggtgctggcattcaagagggtggaggatgaaccggctatcaagaacagcttcctaaagcgcagctcttttaagcagtacttcgagttaatgactgtgatgttccagtttgaaaaggtgctcttcgagaacttcatacagaacgccacgtacttggtgaacaccacaaaccgatccaatgtgttgcgtattcgcatatgcaaggaatctacaatgtcctatatttccgaagccgtgcagaccttgaaggccaagccccgacctgaattgcaaatgaccagtgataggcgggttactcccgtaaagtcttcaaatcttatgcccgtgcaatcggaagcgtttagtgcctacagcgtcgcggattcggcaggaacggaaatcagctcggaatcggagaacgagggcttgctagtgggtgacacatcacaaaagaaactgatgtgccgcatcaaccgactgaccgtgctggtggccatgatcatgtggatggtcagtaacacacgaaaggcaaatatacaacttcaggaatgcacagcgtttattaaaatggtcaaggataagaagcccaaagatgttacggcaatggataggcactgtgttaggacttgcgaattacttcaacgagcagagtcccaatatctgctgcccatttggcgtgaactcgttggggagaaaacacttatcgaatatgacatggattttgtcgtcaatctgaagcgcgatgtcttcgatgtcctgtttgaagctcagcagtttgagcatcttggctttacacttcccgcagtcttgcgtactgcgattatgaaaaaggacctgctcttcaaggattatgaaaggatgaccgaggtcgttgacaggtataggtcaattatcaacaacctgtccatgtcagaggtgatcttcctacgcggccacatctacgacactgaactctttatccaaatgggcgtgggtcgatacacttggacttcgttcaatataggcaaattctgtgatcaaatcaattcacagctgcgcaaactgacctctatagtatcccaaatcaattttattcgcctggatctgcgctctcgtatcgatatgattaagagtttcaatttgttcaaccttgatgatgaacttaaagttgaggatacatctagatcctctggcgaatcgtatctacaagataggaagaacccgtcccaaagattcaaatcggtcactggggaaactataacgatgttttcggtcgaaaaagacgttccggcggatgaaaaggcagagcaagcctgtggatccggcatatatccatgtcagggatatttcgaactcttagaggcatcgcgcaatcgaaaggcagcccaaatgaagaagctttacgactccctgggcccggtattagtcaagctggagagcttggtgttgggcacattttctggaaggtcggaccggatgaaaacctactacgagtattgggaaggagagacattcaagtgtattgttgacatgacgtatcagaatttaaaatgctatatcaaccgcctgctctcaaataaaccgatgtttgaggtgaacgctgttctcctgatgtcagaaatcgtccttgagccttcggttcaggagctgcagaacaccattgtgactgccactaaggactatatatccaggttgagaattttcacccgttggatgaccggaacctgcatagcctgtccactggtggaaatgggcaaacagttcaagtacaattacacgtactatgaggacgtaatccagataagatccattgtggatctggtcataaacatacacgatttggcttctagagtggcgaacgaagccaggggatttgtgtcgcaattccgaaagtacttcaatctgtgggccttcgagaagagtttcatctgccagaagttcttggaaaaacaggtgacgctcatcgaaatcgatgagaaatttacattttactcgtccattgtggaaacactggccaacacccgcaagttccaggacatcaagtgtgtgcgcataaatttggagcccttgctggcgagcataacgcaacatgcccaggactggtgcaccacactgggcgaggagctgttgcgccatgtcaacgataacatgagggcaatgcgtaacgaagtcaaaacccttagcctgaatctgaacaagaccacacgcgagctggaggacttcaagctggtcatgaccacgattggcacggtgcagtcgtcgacgttgaccaacgagcagaaaatccacgaaatgcaggagaccttcaccattcttagcgaacacaaaattatgctgcagcagcaacaggactatccgtgccagagtccatgctccatagtccagattaggatccgggcccggccaatgctgcgtatccgaatctgttttaattcacctctgccattccagttcccctacgaggacatgctgatggcccatcacctggagaagcgctggaagaggctcttcctatcggccctgtatcgctacgagaagctacaaccaattaagcagaaattcgccgacatgacttccgtcgaaatcgatgagttctgcgatgatttggccgagtttatcaaggattacgacgagaacggacccggctccgtgggcgccgaactggagcgaggagtgcgcctaatggatccgtatggccagaaaatagccgaacgcgaatcgagacgcgaggagctggccaatgcagagcgactgttcgacatggccatggttgattaccatgagtttgcgcgggtgcaaaccgagtttgagggactgcagcagctgtacaaactatacaaggcgcagaaatacgctcgcgaaggatggggcaagaccttgtgggccgatctggatcccaatgtactgaccgagggcgtcgagagctatctgaaggagttccggaaatttaccaaggcggtgcgcaccctgcccgttggcgtccagctggagatccacatgaagcagttcaagggcaccgtgccgctcatggttagcctcaaacacgaggctctcagggagcgccactggctgcagttgatggagaagacgggtcagtacttcgacatgtcaccggcccgattcacgctggagaacatgttcgcaatgcagctgcacaagtaccaggagatcgccgagcagatcctaaccaatgccatcaaggagttgcaaatcgaacggggtgtccaggctgtcatcgagacctgggcctcgatggccttcaagaccttcaagcacttcaagggatcagatgatcggggttgggtgctgggtccggtggacgagatcatgcagatactcgaggataatgccatgaatctccagtcgatgggagccagtcagtttattggaccctttctggagacggtgaacaaatgggagcgtaccttggccctcatctcggagatcatcgacgagtggttggtagtgcagcgcaagtggctctatctggagggcatattcattggcggcgacattcgtacccagctgccggaggaggcgcggaaattcgatgacattgacaagtcgtatcgcaggatcatggtcgattgtgccaaaaatccgttagtggtgccattctgcacagtacccggtcgcttagtggaaatacagggcctgggcattggcttggaaaattgtcagaagtcgttaaacgaatatttggactcgaagcgtcgcatttttccgcgtttctatttcatatccaccgatgagctgctctccatcctgggcagcagtgagccatctgcagtgcagaaccacatcattaagatgtacgacaatatcaagtcgttgcgcttggtcaaggagggcagccagacgattgttaccggcatgatttccagcgagggcgaggtcatggagttccggcactctgcacgggcagcgggacgcgtggagtactggatgaacgatgtcctggacgaaatgcgccgctccaaccgcttcataaacaagacggccatctacgactttggcacagatctgcaaatttcaaggcccgactggctaatgaactaccagggaatggttgggctggctgcgagtcaagtctggtggacggcagaggtggaggaggccttcgaccaggcccaaaatcatggcaacatgcgggccatgaaggatttccttggcaaaaacaactatcagatcgaggagctggtccttaaggtgcgctccaatctctcccgcaacgatcgactcaagttcaaggcccagtgcacagtggatgtccatgcaagggatattattgacaactttgtgcgagacaatgtcctggatgccagcgaattcagctgggaaagtcagctgcgtttctactggattaagttctacgataatctgcatgtgctccagtgctccggaagcttcgacttcggttacgagtacatgggtcttaatggtcgcctggttataacacccctcacggatcgtatttacttaaccatcacccaagcgctgctcatgaatctgggtggtgctcctgctggaccagctggaacgggtaaaacggagacggtcaaggatctggccaaggccatgggtctcctttgtgtggtcaccaattgcggcgagggcatggattaccgggcagtgggcactatactctctggcttggtccagtgcggtgcctggggatgcttcgacgagttcaatcgtatcgacatctctgtgctcagtgtgatatcaacacagttgcaaaccatcaggaatggcttaataaggaaactggatcggtttgtgtttgaaggggttgagatccatctagatcccaaatgcggcgtgttcgtgaccatgaatcctggctacgctggccgcacggagctacccgagtccgttaaggctttgttccgtccagtgacctgcatcaagcccgatctagagctgatctgcctgatctccctgttttctgatggattccttacagccaaggtattggccaaaaagatgaccgttttgtactccctggcgcaggcgcagctgtcgaagcagtgccattacgattggggattaagatccctcaactccgtgctgcgaatggctggcgtaatgaagcggcagtctgaggatctaccggaggcagtggtgctgatgcgagtgctgcgtgacatgaactttcccaaattcgttttcgaggatgtaccattgttcctgggacttatcaaggatctgtttcctggtatcgattgcccccgcatcggttatcccgacttcaatgccgccgtgcgtcatgtgctggtcaacgatggctacatattgctgcccgatcaggaggacaaagtagtgcaaatgtacgagaccatgatgaccaggcactcgaccatgttggtgggccctacaggtggcgggaaaactgtcgtcataaatgccctggtcaaggcgcagacccacatgggcctgcccaccaagtgccttgtgcttaaccccaaggcctgttctgtgatcgaattatacggctttttggatatggaaacgagggattggattgatggattgttttcaaatatatttcgtgaaatgaataagcccatcgagcgagaggagcgacgttacgcctgcttcgatggagatgtggatgctctgtggatcgaaaacatgaactcggtgatggatgataacaagctactgactttggctaacggcgagcgcatccgtctggagaactactgcgccctgctcttcgaggtgggcaatctaaactacgcctctcccgctaccgtctcccgggcaggaatggtgtatgtggaccccaaaaatctgcgatacagtccgttctggcagcggtgggtgctaacccggccggagcctcagagggaactccttaacgacttctttgagaagattatcactcagtccatagccttcattctggagggcctggatggcactactcagggtaatcccctgaagctggtcataatgcaaacggacctgaacatggtaactcagttctgcaacctctacgacgccctcctgcccaactatgttatggatagtaagaactacgatgagccggtgcagcagaactacaatacagacagtttggagtgctgtttcctgcaagctgtctatggatccatgggcgcttgcctcgtagagaagcatcagcctgtctttgatgagtatatgaagcgcatatccggctttccgttagtgcaggacacgccggagaatcccgcctcgggaggacagtttccgcagagcaagcccacactgtacgactacttctgggacgtcaaggacaacgtttggaaggcctgggaatgggtggtgcagccgtacacacacgacccgcaagtgaagttcagtgagatcctggtgcccacggtggacaacacccgtaccaatcggactctcagtctgatgagcgaggtcatactcaatattaatttttcatcgagaacctcatcgctggatgtgcagcacaccctggaggcggccgtggagaaacgcaccaaggatacgtacgggcctccgatgggcaagagaattgcctgctttattgatgacatgaacatgccgcaggtggatgactatggcacccagcagccgattgccctgctgaagctattctttgaacgcggcggcatgtacgaccgcgacaaggatctcaactggaagaagtttaaggatctgaccttctacgcagccatgggaacagcgggtggcggcaggaacgaggtggatccccgatttatcagcatgttctccacctacaacatcatattccccaacgatgagtccctcatccagatctactcctccatcttcaagggacatatggtattcgtgaagttccagcccgagtacatgcttatagccgacatgattgtccatatgacattaaaactttttaagatggtgattgtggacctgccaccgacgccctccaagttccactacattttcaatctgaaggatctgtcgcgtatcttcgccggaatgctgctcatcgaacccacttgcttcaaggggctgagggacctgattagggtgtggcgcaacgagtacaccaggatcatatgcgatcgcctgataaccgataacgtgatactctcgctcaaggactacgtcctgcgcgatccgctgctctttggagatttccggaattttaccaatgaatctgagcctcgtttatatgaggatcttttggactacaactctgtatactttctattcacggagatcctagaggaatactgtgaacgcaaacaaaagatgacattggtcctgtttgaggactgtctggagcatctgacccgcgtccatcggacgctgcgcatgaatcgcggacatgtgctgctcattggagtcggtggcagcggcaagaagtgcattactcgtctggccgcctttgccgccgaatgtgatgtctttgagattaccatttcccgtggttacaatgaagccgcgttccgcgaagatctaaaggtcctttacaccatagcgggcgtgaagcgaaagaaggtcgtgttcttgtttacgggagcgcaggtagcagaagagggcttcttggagttgatcaacaacatcctgacagtgggccaagtaccagccctgttccccgatgaagacaaggatggtatcgtcaatcaagtgcgcaagttcgccgaagaggatggagtttcggcatccaaagacgctgtttggggttacttcctccgcacctgtgcggaaaacctgcacgtggttctatgtatgtctccggctggcgatgcgctgcgcaatcgttgtcgaaacttcccgggtctcattggcagtacctatatcgattgggtgttcccgtggccccgacaggctttgtacgcggtggccaaacttttcctgaccgagcaccgccttattccggccagccatcgagaggccatagtggagcatgtagtccatgtccatacttccatacagcagtactcaaaggactatctggcaaaactaaggcgtaacaattttgtcacccccaaacactacttggactatattaacacctatagaggattgttggaggaaaaggccaaattcattacccagcaacgttcgcgtctcggcgagggcatcaaaaaaatcgaggaagcttccgtgcaaatcgacgaactgcgtattattgtcacggagcaaaagaagaacgtggctgtcgcctccgaggagtgcgaggctatgttggtcactatcgagtcctccactcaaaaggctaatgtcaagaaggccgaggcgtcggaaaagtctgttgaggtggagattaagggaaaacagattgctatcgaaaaggacgaagccgaggagattctggcagaggcgatgccagctctcgaggaggccagattggctctatcccaactcgaaaaggcgcagatcactgagatccgatcctttgccacgcccccagccgccgtgcaagtggtttgcgaatgcgtggctattctaaagggctataaggagataaattggaagagtgccaaaggaatgatgagcgacgtaaactttctaaagagcttgatggagatggattgcgaggctttgacccagaagcaaataacccagtgccgacagcatatgaagactggcaacctagaggacatggcgaagatatccgttgctggagctggattacttagattcgtcagagctgtgctcggcttcttcgatgtatataaagaggtcaagcccaagaaggaacgcttggacttccttgtggaagagcaagaagtacagattaagctgctgaatcacctgaacggagaaatccaaaagttggaggagaagctaaacgagttgaacgagaattatgctacatccatgaaacagatgcgtgcccttactgaaatgatgcagcaggccgagcgtcgtctgattgcctccgacaagttgatcagtggcttgacctctgagttaatccgctggagcaaagagatggctagcctgggacagcagcttatcgacagcgtgggtgggtgcctgattagtgcctcatttttggcctacacaggcgcctttacatgggagtttcgcaaggcaatggtcttcgacgattggctggaagacattgcgtccctgggaattcctatacagctaccatttaaaatcgatggttacctcactaccgacgtcgagatctcccagtggagcaacgagggcttgccgcccgacgagctttcaatccaaaatggcatccttaccatgcgcgcatctcggttcccactctgcattgatcctcaactgcaggcgttgcagtggattcgcaaaagggagttcaaaaacaaccttaaagttctttcattcagcgactctgacttcctcaagcaactggagatggccattatgtacggaacgcctgtactattcgaagatgtggacgattatatagacccagtgattgacgacattctgcaaaagaatattcgcattcagggtggtcgcaagttcgtcatgctgggtgacaaggaggtggattgggatcccagcttccgagtctacttaaccaccaagttctctaatcccaaattcgatccggcagtctatgcgaaggcactagttatcaactacacggtaacccagacaggattggaggaccagttactaagcgttgtagtgggcaccgagcgtccggatcttgaggcccagcgtgagtccttgatcgcccagaccagcgagaataagcagttgttgcagcaactggaggattcactgctccgcgagctgtccacctcgacgggcaacatgttggacaacgttgaactgattgaaacccttgagaacacaaaaactaaggcgggcgtcgtcatggaacagctaaaactggccgcggatacggcggcggacatcgaggtgctacgaaatggttaccgtccggctgccaaacgtggagctgttcttttctttgccctatcggacatggccacagtgaatagcatgtaccagtatgcactggccgcctatttggatgtgttcgtttactccctgcgaaaggctgtgccggatgctagtctcaacaagcggttgaacaacatcatcaaaacgcttacggaaaacgtttactgctacgggtgcacgggcatctttgaacggcataagctgcttttctccttccaaatcgccactaaactcgcccagcgggacggcattttgctgcaatccgagctggacttcttcattaagggcagcattgctctaaccaagagcgaacgctccaatccctgcaaatggctgagtgagaagagctgggaggatgtgctcaagttggccttcgatttcccagacattttcggcaccttaccagaccactttggtcgttaccttaccgaatggaaagaaaaattaatgttcctgcgctgcttccgcgtggatcgcatcttcaggagtataaatcaatacatcgtcgaaacgatggatgagttctatatcatgccgccagtggtgagcttctcggccatatacgaacagacctccagcacgattcccgtatgctttgtactgagtgccgggtcagatcccacaaatgatctaatcaaactggcggatacgattgtcggcatgtccaacttttgtcacatatctctgggacagggccaggagaaggctgctttgcgactcctggatggtgccatcaaacagggaatgtggctgatgctgcagaacggacacctgctgatcaggttcgtccgggaactggaaaagcatctagatcgcatagagaatccacatccggactttaggctgtggataacaacagatcccacgcccacattccccattggcattctgcaaaagtcgttgaaggtggtcactgagccacccaatggtctaaagctcaatctgcgctcaacgtacttcaaagtgcgtcaggagcgcctcgagagctgctctcatgtggctttccgtccattggtctatgtgctagccttcttccacgctgtcgtccaagaacgtcgcaagtacgacaagctgggctggaacatagcgtacgatttcaacgacacggacttcgatgtgtgtactgaaatcctgcgcacttacctaacacgatgtggcactgggaaaataccgtggaacagtttgaaatacctaattggcgaggtgatgtatggagggcgggtcatcgatgacttcgaccgacggataaccaactgctacatgaacgaatacatgggtgacttcctgttcgacgagtttaaggtattccacttctatgaggacgacaacgtggactactgcctgccggaagaggagaccattctgaaagaggactacatagcgcacatcgacaaactgccgctggtcaacaagccggatgtatttggtttgcatccgaacgcggaaatcggttattacacaatggcggcacgcaacatttggaacagtttgattgagctgcagccacagacgggtgagggaaccggtggaatcagccgcgacgacttcatcgactcggtggcagccggcatactgaagaagctgccccccgccttcgagacatggcgcatccgcaaacagatccagatgagcctgtcaccaaccggggtggtgctgctccaggagctggaccgctttaatctgctggtcgtacggatcaagaagacgctggagctgctacgcaaggtaacttacaaatacctaccttgccccggtatacacgacatcgctgcgcaggaacgccatgggtgtgggcctggtctttgaggctaatttggccacttcggaggatctgagtcactggattctgcagggcgtctgtctaaccctcaatacagatacctaa

SEQ ID NO: 2568 - protein, 4820 aa, DROSOPHILA
MSQTQFESTSDSADATAESLNNVEPRIVWLKTIMSNMLGVFEPKYVNATISKNMPAVENFFQRRYETQNDLDFVVLFFWRTFYDKLIEEEITVLEEVPRPPPTVPDKKGKGKKKGDARMAGGKSAGKAGASAGAAGKGRKKAGQDAAAPAGGDQEAVEEVNTGGETTDAEVEGELEGEEEATVAGSGKSSARSRPSSDTENGSKFRKKKATYVPVYVEVKKLVPAYVKTPQVHCHFGRMESCDLDPKIKYIYIVRKNRREIPNFSDVSACFAQMPLYFLLGTVRGSLINSLRDDLNLVYKSAIQFQFREPATADSQQMDSYEGQAGGSGGGGAGGPAGETGEDISSEAKESGPGLLELSKPSEFRLRALKQQKLKNANAGGAGVGKMKEKEAAAKKAKAKKTDAEPTEEEEEADAHKVEAHLSSSEEEVEIKVEKLTIGQRWEKMLNETKAKVEAEHAAEEATPPRITPIQRRLLKEIEEFQSEITWTINHIVWAFSLPSSYILPGQEATEFEDAIIRVPVDPKRLDLVITYTQQQLEEVVDGWIKYLKKTMKTLTDAKLDDFTPMAEHRYWHKMEVELYGTLEQLKTEFVVAVLQRLTDDKSPVLDEWQAVVEKTEARFKLAKENSDYLGTIIDYLEKVRSYESFKMVVLQIPNIMVGLRHIWTMSSHYCRDPEMQVLLCQISNVFVQKVKSIINFENIFKYSATYTYETATNCANLLRCWKQAYKLSRQHIEDSGAGSRWEFDRVALFNEVNHIHRVAVDIAYVGRVFVQYENLFGHRLKACIADPSIVDNLMRKVYRMLDDLIKSVDYDMFRPGNWENWEYSLELFNKRLDNVENEAKNVIDQSINSLLSSEKGLDLVVNAMNIDTRATLQEFVATKHENLLRFFVTEINAVERVFTKLKKSPPMAKHQPAKISAIFWARLLGKKLKTSVLAFKRVEDEPAIKNSFLKRSSFKQYFELMTVMFQFEKVLFENFIQNATYLVNTTNRSNVLRIRICKESTMSYISEAVQTLKAKPRPELQMTSDRRVTPVKSSNLMPVQSEAFSAYSVADSAGTEISSESENEGLLVGDTSQKKLMCRINRLTVLVAMIMWMVSNTRKANIQLQECTAFIKMVKDKKPKDVTAMDRHCVRTCELLQRAESQYLLPIWRELVGEKTLIEYDMDFVVNLKRDVFDVLFEAQQFEHLGFTLPAVLRTAIMKKDLLFKDYERMTEVVDRYRSIINNLSMSEVIFLRGHIYDTELFIQMGVGRYTWTSFNIGKFCDQINSQLRKLTSIVSQINFIRLDLRSRIDMIKSFNLFNLDDELKVEDTSRSSGESYLQDRKNPSQRFKSVTGETITMFSVEKDVPADEKAEQACGSGIYPCQGYFELLEASRNRKAAQMKKLYDSLGPVLVKLESLVLGTFSGRSDRMKTYYEYWEGETFKCIVDMTYQNLKCYINRLLSNKPMFEVNAVLLMSEIVLEPSVQELQNTIVTATKDYISRLRIFTRWMTGTCIACPLVEMGKQFKYNYTYYEDVIQIRSIVDLVINIHDLASRVANEARGFVSQFRKYFNLWAFEKSFICQKFLEKQVTLIEIDEKFTFYSSIVETLANTRKFQDIKCVRINLEPLLASITQHAQDWCTTLGEELLRHVNDNMRAMRNEVKTLSLNLNKTTRELEDFKLVMTTIGTVQSSTLTNEQKIHEMQETFTILSEHKIMLQQQQDYPCQSPCSIVQIRIRARPMLRIRICFNSPLPFQFPYEDMLMAHHLEKRWKRLFLSALYRYEKLQPIKQKFADMTSVEIDEFCDDLAEFIKDYDENGPGSVGAELERGVRLMDPYGQKIAERESRREELANAERLFDMAMVDYHEFARVQTEFEGLQQLYKLYKAQKYAREGWGKTLWADLDPNVLTEGVESYLKEFRKFTKAVRTLPVGVQLEIHMKQFKGTVPLMVSLKHEALRERHWLQLMEKTGQYFDMSPARFTLENMFAMQLHKYQEIAEQILTNAIKELQIERGVQAVIETWASMAFKTFKHFKGSDDRGWVLGPVDEIMQILEDNAMNLQSMGASQFIGPFLETVNKWERTLALISEIIDEWLVVQRKWLYLEGIFIGGDIRTQLPEEARKFDDIDKSYRRIMVDCAKNPLVVPFCTVPGRLVEIQGLGIGLENCQKSLNEYLDSKRRIFPRFYFISTDELLSILGSSEPSAVQNHIIKMYDNIKSLRLVKEGSQTIVTGMISSEGEVMEFRHSARAAGRVEYWMNDVLDEMRRSNRFINKTAIYDFGTDLQISRPDWLMNYQGMVGLAASQVWWTAEVEEAFDQAQNHGNMRAMKDFLGKNNYQIEELVLKVRSNLSRNDRLKFKAQCTVDVHARDIIDNFVRDNVLDASEFSWESQLRFYWIKFYDNLHVLQCSGSFDFGYEYMGLNGRLVITPLTDRIYLTITQALLMNLGGAPAGPAGTGKTETVKDLAKAMGLLCVVTNCGEGMDYRAVGTILSGLVQCGAWGCFDEFNRIDISVLSVISTQLQTIRNGLIRKLDRFVFEGVEIHLDPKCGVFVTMNPGYAGRTELPESVKALFRPVTCIKPDLELICLISLFSDGFLTAKVLAKKMTVLYSLAQAQLSKQCHYDWGLRSLNSVLRMAGVMKRQSEDLPEAVVLMRVLRDMNFPKFVFEDVPLFLGLIKDLFPGIDCPRIGYPDFNAAVRHVLVNDGYILLPDQEDKVVQMYETMMTRHSTMLVGPTGGGKTVVINALVKAQTHMGLPTKCLVLNPKACSVIELYGFLDMETRDWIDGLFSNIFREMNKPIEREERRYACFDGDVDALWIENMNSVMDDNKLLTLANGERIRLENYCALLFEVGNLNYASPATVSRAGMVYVDPKNLRYSPFWQRWVLTRPEPQRELLNDFFEKIITQSIAFILEGLDGTTQGNPLKLVIMQTDLNMVTQFCNLYDALLPNYVMDSKNYDEPVQQNYNTDSLECCFLQAVYGSMGACLVEKHQPVFDEYMKRISGFPLVQDTPENPASGGQFPQSKPTLYDYFWDVKDNVWKAWEWVVQPYTHDPQVKFSEILVPTVDNTRTNRTLSLMSEVILNINFSSRTSSLDVQHTLEAAVEKRTKDTYGPPMGKRIACFIDDMNMPQVDDYGTQQPIALLKLFFERGGMYDRDKDLNWKKFKDLTFYAAMGTAGGGRNEVDPRFISMFSTYNIIFPNDESLIQIYSSIFKGHMVFVKFQPEYMLIADMIVHMTLKLFKMVIVDLPPTPSKFHYIFNLKDLSRIFAGMLLIEPTCFKGLRDLIRVWRNEYTRIICDRLITDNVILSLKDYVLRDPLLFGDFRNFTNESEPRLYEDLLDYNSVYFLFTEILEEYCERKQKMTLVLFEDCLEHLTRVHRTLRMNRGHVLLIGVGGSGKKCITRLAAFAAECDVFEITISRGYNEAAFREDLKVLYTIAGVKRKKVVFLFTGAQVAEEGFLELINNILTVGQVPALFPDEDKDGIVNQVRKFAEEDGVSASKDAVWGYFLRTCAENLHVVLCMSPAGDALRNRCRNFPGLIGSTYIDWVFPWPRQALYAVAKLFLTEHRLIPASHREAIVEHVVHVHTSIQQYSKDYLAKLRRNNFVTPKHYLDYINTYRGLLEEKAKFITQQRSRLGEGIKKIEEASVQIDELRIIVTEQKKNVAVASEECEAMLVTIESSTQKANVKKAEASEKSVEVEIKGKQIAIEKDEAEEILAEAMPALEEARLALSQLEKAQITEIRSFATPPAAVQVVCECVAILKGYKEINWKSAKGMMSDVNFLKSLMEMDCEALTQKQITQCRQHMKTGNLEDMAKISVAGAGLLRFVRAVLGFFDVYKEVKPKKERLDFLVEEQEVQIKLLNHLNGEIQKLEEKLNELNENYATSMKQMRALTEMMQQAERRLIASDKLISGLTSELIRWSKEMASLGQQLIDSVGGCLISASFLAYTGAFTWEFRKAMVFDDWLEDIASLGIPIQLPFKIDGYLTTDVEISQWSNEGLPPDELSIQNGILTMRASRFPLCIDPQLQALQWIRKREFKNNLKVLSFSDSDFLKQLEMAIMYGTPVLFEDVDDYIDPVIDDILQKNIRIQGGRKFVMLGDKEVDWDPSFRVYLTTKFSNPKFDPAVYAKALVINYTVTQTGLEDQLLSVVVGTERPDLEAQRESLIAQTSENKQLLQQLEDSLLRELSTSTGNMLDNVELIETLENTKTKAGVVMEQLKLAADTAADIEVLRNGYRPAAKRGAVLFFALSDMATVNSMYQYALAAYLDVFVYSLRKAVPDASLNKRLNNIIKTLTENVYCYGCTGIFERHKLLFSFQIATKLAQRDGILLQSELDFFIKGSIALTKSERSNPCKWLSEKSWEDVLKLAFDFPDIFGTLPDHFGRYLTEWKEKLMFLRCFRVDRIFRSINQYIVETMDEFYIMPPVVSFSAIYEQTSSTIPVCFVLSAGSDPTNDLIKLADTIVGMSNFCHISLGQGQEKAALRLLDGAIKQGMWLMLQNGHLLIRFVRELEKHLDRIENPHPDFRLWITTDPTPTFPIGILQKSLKVVTEPPNGLKLNLRSTYFKVRQERLESCSHVAFRPLVYVLAFFHAVVQERRKYDKLGWNIAYDFNDTDFDVCTEILRTYLTRCGTGKIPWNSLKYLIGEVMYGGRVIDDFDRRITNCYMNEYMGDFLFDEFKVFHFYEDDNVDYCLPEEETILKEDYIAHIDKLPLVNKPDVFGLHPNAEIGYYTMAARNIWNSLIELQPQTGEGTGGISRDDFIDSVAAGILKKLPPAFETWRIRKQIQMSLSPTGVVLLQELDRFNLLVVRIKKTLELLRKVTYKYLPCPGIHDIAAQERHGCGPGL

SEQ ID NO: 2569 - DNA, 5679 bp, DROSOPHILA
gtgctgctagggggcgtggccggtggaggaggcggctccctaactgggtacacacacacacacacacatacataccttctgctcctccccctctcctccttctccacctttattttttttggtcctgcgacctcgttactttgttgttattgttgttgttgctgctgctgctgcacagctggctgccaaacgccccgcactccgctggcactcacaatcgggctactcctggccaggagctgggtcatccgtcgctccgagtgaatccccttgcccacgattgcaattaatacaagcaactaattgaatttaacagctaattttgataagcgcactgcgctactgtttctgattggaaaataagttggagatgacagctggaggtggcaaaatcggtcgtgagtatcgaatggaagttcttgatttccaatgttacgatgaaatgcaaatttagtaatgcaacctatataatatttcatttaaatatatatatatttatttatttcatatttgatggcatctttataacaaaaattattctaattggaaaattagcgctgagcaatgcaagagtgtggtcacactgttggcagaatttaccgatagtatcgatgtatacttataatcaaaataagaaattgtaattcttgcttaaaatgttaatgcaagcaaatgaaattaataaatatccatatagattaaaacaaaccaattttcatcaataaacaagtgcatttatacgcaacttttgtattataattctctaattcttagcattagttcaagtgattaaaaaatcgcccagcttaatatcaaatgtttcatattcataacagcatatatatatataacattttactataaatgaagagggagaatgtcacatacaaatatgtgggatctaaaagtacacttagcattgtactaggcataattagtgtagctacaaggactggattgtcccatttccggtttcaattacgccatttccgtttccggttcagtgacgtcgactgctcttgatgtccactttaaattgtcgcgaccattccgccagcaaatcgaactgagtaacaaatggaattagctaaggaatagaaggtgcaattccatcgaacatctactcacatcccgatccatgatgttgtcacagaaactcaagtccagcaactgcagcttgggacagttgaccagaatgctgaaatcgaatcgaattgaatgcttaatgatcttaaagtgattaaaaaggaagagagacgtactcataaacacgctcatgcgttatgttcagaatgcccatgaggtcaagctgctccagattcttgcccagcgcggcaatatgcatgagatcgcgttcggtggtgccgcgcaccgccgacaagaagagcttctttagcttgggacagttggacagcagctggaacaggccatctccgagcgatgcctccctcatgctaaaagaacagaacatgtttaacttaaggattatgcaattccatcgcgcatgacacctaccaccagcccagatccagttcctccagctgatggagacgcgccagcgattgcaatcctctggacgacagaaagtgcgccttccacaaatccagcgagatcagctgcgtattgtacgtggccaaatgggcggccacattgtccatgttcaccgagacaccacaaaatgcttgagcaatgggcatcaaatgcaattggttaaacgcaacaaaactgaagctatctagaagctcacccagattcagatgctttagcttgcgattgccctcgagcatgctgagcagcagttccgtttcgaagtacgtttgaaagagatcgagacgctccagattcttgagattggccagacaggagaagttcaacagcggcggttcagtggcacagttgcgcaggctcaactctgcgacgaaatattaagttaaaccttcgataaggatgcgagaaaaacccacctatcagattatcacagacaatgcccacattctcaatgcagctggcattgagaaacttgcaggagttcagacgcaggtgggttagattatcgccgcgttgggtcaggaatctgaaacgagtgttcgaattttagttctagtagctcagtatgatttgctagcatgtaaccacttcttgaactcggtgggcgagacattgccaaagccgccgcaccaggacaaatccaacttgcgcaacatggtggcccgacgcgccaacgtgcacaacagctccgagctggccacatcccagtagggcttcaggctgatctcggcatagagcagcggatgcctggagatgtcgtagaaggtgcgcgacacgtgacccacgcggaacagcgacttcaggtccaggtagctgagtatgcgcaataggatctcgaatggcagatccgttagacagatttgtggcgccgccgcctcgccatccacacaattgtccgccagaaactgactaagatcgttgttgatgaactcgtgcagcttggtggcaccgtcttcgccgcaattcggctggaacttaagggtgcgcagcttgtggctaattgatccgccactgccgtcgccggacgttgagccaatagcatccggtggcggcgacactagcgtccggctgtgctgcgtaatttgctgcttggccagtaggttttgcgttttggtgaccgttcgaccgcacagcataatggcatcgatttccgtatagtaattgagtcggctgtgattgaaatcgatgcgcagcgttctgccaagaagagagtgcgtgctatatattccagtgttatgataccaccattgtccactacttacttcgttagcatcgtggtcttcttcagtgacggcgcaaagcgacgcgagtccagtggcggcggtcgggagagatcgctttccgttgcctcccacaggcaggtccagtttttggtcaggccgtacgcccaaatgcgtacaacggcgcccggattgaaggtctcaaagatggccacttcggtgggcactacaaactcctcgaaataaacaactgcaaatcgataataaatgttatgatgatgaaattctatagcaatcacaaccttgcgcaaattgagctagatattctgatgcaagtgcaagggtatgtgatatccggctatcttgagctagtcatcttaccaacatagtcatgtgtttccaacttcggcagattctggggctgaatctcacgcgtggcggacggtgcccgttgccaccagtcgccgtaggtgcgctgcgggcgagagttgaatgggtaccgtgtacggatgcttctgcatggactcaccatgggaaaggtctccggataatcgccataggcgggaaatttcgttggcctgccaatcacattggccgccgtatacgagatgctgtaatcgatgccatactgtgaactgaaatcgagcacgcccagcacatattgctcgagatagtagccctgatcggattgcgtcgtctgcattttgctgtcgcaaccgaaccaaccgccgtaatcgccgttctgcctttgccgctgcagcatggccgtaaaatcgaccagtacgtccggctccgcctccgccgccgggctgtccgtttcgctggactctgctggttcgccgtaggccagcagggacatggccagcgccagctgccgtgggcgctggccgtaggtcagcctcagtgtatcgaccgccgcctgcaggctgcgccccagtcccagttccccaaccgcgtaccagggcacgcgttgggcataaccgatgggccagagtcgcgggagccacttgtttctccggttcctcggctcgtcctcgcctggctgctgccgctgccgctgctgtccaaggattgccgctgctgtgtccgggcaaattgtgctcctcgagatgatccggatattgagcttggctgcgccgtcgacgtggatcgcctagctatggtcacgttgctgggccagaccttaatggctctggctagcgatgttctcctagttcttctgcgcaactaatccaattaatggccacttgcggagtcctctttggtttgcagctttattcgcgcctcgccttgttgctctgttcgctgtccgccgacctctgacctctgctgctttgtgctgtgtgtcgcgcttgggtggcaattctctcgaggattcgcggttattcagcaaatttctgtgccaaaacaaaaacaaaaaacttttggcttgcttggtttaaatgacaaaaacaatactgctatcgataacgagaaaatctatcgaaaaatagaccgtgaatacagaagtatattttcgaaaataccaaaacacaccaagcgaaattgctataagaacaaaggaaaggtatgtatatatatgcaggataaatattaacaatgcctatattttagcttgtaagcagctgatttaaatttttgtttttagacattataataatcaacaatattcagtaggcggaatacaatcaaacaaaaatatgcaaaaatattcactagcacaaataaatcatatctgcatagaatatgcagttcttcaataattattcaatcatatttatatggcgtagaaatagtaccttgcatgacggctccacgtgtcgtgcagtgtccgccatgcgctgacgtgcagagggccccaaattgaacggcgtgcaacagctgaattcgattcccgcgattccaatccatgttgcgactgccgacgattttaaggaagtccttcagcatgaagacgcgccagaggctggactaccgcaacaagctcatactggcgccaatggtgcgcgtgggcacgctgcccatgcgactgttggccctggaaatgggtgcggacatcgtttacaccgaggagctggtggacatcaagctgatcaagagcatacgcaggccgaaccgtaagtggacagagctccagccaactcagcatacttcatctatttgcattataccttttagccgctctgggcacggtggactttgtggatccgtcggatggcacgattgtgttccgcacctgcgcccaggaaacctcacggctggtactacaaatgggcaccagcgacgctggacgggctctggccgtgggcaagctgctgcagcgcgacatttccggtctggacataaacatgggctgtcccaaggaattctccatcaagggcggcatgggcgccgccctgctcgctgatcccgacaaggcggcacacatattgcgcactctgtgctccggcttggacattccagtcacctgcaaaatacgcatactgccggacgtggagggtacaatcgatctggtgcagaaactggccgccacgggcatcgctgccattggcattcatgcgaggacgcgcgacgagcgtccgcagcatcctgcccatcccgaggtactgcgtgccgttgcccaggcggttgacataccgattatcgccaacggtggttcgaaaaacatgcactgctacgatgatctgcgcaaatttcaaatggaatgcggcgccgatagcgtgatggtcgcacgtgcggcacagatcaatgttagcatcttcaggccggagggcctgctgcccatggacgagctaatcgagaagtatctgcgcctgtgcgtcgactacgacaatgcgccgcataacgccaagtactgtgtgcagagcatactcagggagctgcaggagacgccgcgtggcaagcgtttcct

SEQ ID NO: 2570 - DNA, 2460 bp, DROSOPHILA
atggattggaatcgcgggaatcgaattcagctgttgcacgccgttcaatttggggccctctgcacgtcagcgcatggcggacactgcacgacacgtggagccgtcatgcaagccaagctcaatatccggatcatctcgaggagcacaatttgcccggacacagcagcggcaatccttggacagcagcggcagcggcagcagccaggcgaggacgagccgaggaaccggagaaacaagtggctcccgcgactctggcccatcggttatgcccaacgcgtgccctggtacgcggttggggaactgggactggggcgcagcctgcaggcggcggtcgatacactgaggctgacctacggccagcgcccacggcagctggcgctggccatgtccctgctggcctacggcgaaccagcagagtccagcgaaacggacagcccggcggcggaggcggagccggacgtactggtcgattttacggccatgctgcagcggcaaaggcagaacggcgattacggcggttggttcggttgcgacagcaaaatgcagacgacgcaatccgatcagggctactatctcgagcaatatgtgctgggcgtgctcgatttcagttcacagtatggcatcgattacagcatctcgtatacggcggccaatgtgattggcaggccaacgaaatttcccgcctatggcgattatccggagacctttcccatgcgcacctacggcgactggtggcaacgggcaccgtccgccacgcgtgagattcagccccagaatctgccgaagttggaaacacatgactatgttgttgtttatttcgaggagtttgtagtgcccaccgaagtggccatctttgagaccttcaatccgggcgccgttgtacgcatttgggcgtacggcctgaccaaaaactggacctgcctgtgggaggcaacggaaagcgatctctcccgaccgccgccactggactcgcgtcgctttgcgccgtcactgaagaagaccacgatgctaacgaaaacgctgcgcatcgatttcaatcacagccgactcaattactatacggaaatcgatgccattatgctgtgcggtcgaacggtcaccaaaacgcaaaacctactggccaagcagcaaattacgcagcacagccggacgctagtgtcgccgccaccggatgctattggctcaacgtccggcgacggcagtggcggatcaattagccacaagctgcgcacccttaagttccagccgaattgcggcgaagacggtgccaccaagctgcacgagttcatcaacaacgatcttagtcagtttctggcggacaattgtgtggatggcgaggcggcggcgccacaaatctgtctaacggatctgccattcgagatcctattgcgcatactcagctacctggacctgaagtcgctgttccgcgtgggtcacgtgtcgcgcaccttctacgacatctccaggcatccgctgctctatgccgagatcagcctgaagccctactgggatgtggccagctcggagctgttgtgcacgttggcgcgtcgggccaccatgttgcgcaagttggatttgtcctggtgcggcggctttggcaatgtctcgcccaccgagttcaagaaattcctgacccaacgcggcgataatctaacccacctgcgtctgaactcctgcaagtttctcaatgccagctgcattgagaatgtgggcattgtctgtgataatctgatagagttgagcctgcgcaactgtgccactgaaccgccgctgttgaacttctcctgtctggccaatctcaagaatctggagcgtctcgatctctttcaaacgtacttcgaaacggaactgctgctcagcatgctcgagggcaatcgcaagctaaagcatctgaatctgggtgagcttctagatagcttcagttttgttgcgtttaaccaattgcatttgatgcccattgctcaagcattttgtggtgtctcggtgaacatggacaatgtggccgcccatttggccacgtacaatacgcagctgatctcgctggatttgtggaaggcgcactttctgtcgtccagaggattgcaatcgctggcgcgtctccatcagctggaggaactggatctgggctggtgcatgagggaggcatcgctcggagatggcctgttccagctgctgtccaactgtcccaagctaaagaagctcttcttgtcggcggtgcgcggcaccaccgaacgcgatctcatgcatattgccgcgctgggcaagaatctggagcagcttgacctcatgggcattctgaacataacgcatgagcgtgtttatgacattctggtcaactgtcccaagctgcagttgctggacttgagtttctgtgacaacatcatggatcgggatttcgatttgctggcggaatggtcgcgacaatttaaagtggacatcaagagcagtcgacgtcactga

SEQ ID NO: 2571 - protein, 819 aa, DROSOPHILA
MDWNRGNRIQLLHAVQFGALCTSAHGGHCTTRGAVMQAKLNIRIISRSTICPDTAAAILGQQRQRQQPGEDEPRNRRNKWLPRLWPIGYAQRVPWYAVGELGLGRSLQAAVDTLRLTYGQRPRQLALAMSLLAYGEPAESSETDSPAAEAEPDVLVDFTAMLQRQRQNGDYGGWFGCDSKMQTTQSDQGYYLEQYVLGVLDFSSQYGIDYSISYTAANVIGRPTKFPAYGDYPETFPMRTYGDWWQRAPSATREIQPQNLPKLETHDYVVVYFEEFVVPTEVAIFETFNPGAVVRIWAYGLTKNWTCLWEATESDLSRPPPLDSRRFAPSLKKTTMLTKTLRIDFNHSRLNYYTEIDAIMLCGRTVTKTQNLLAKQQITQHSRTLVSPPPDAIGSTSGDGSGGSISHKLRTLKFQPNCGEDGATKLHEFINNDLSQFLADNCVDGEAAAPQICLTDLPFEILLRILSYLDLKSLFRVGHVSRTFYDISRHPLLYAEISLKPYWDVASSELLCTLARRATMLRKLDLSWCGGFGNVSPTEFKKFLTQRGDNLTHLRLNSCKFLNASCIENVGIVCDNLIELSLRNCATEPPLLNFSCLANLKNLERLDLFQTYFETELLLSMLEGNRKLKHLNLGELLDSFSFVAFNQLHLMPIAQAFCGVSVNMDNVAAHLATYNTQLISLDLWKAHFLSSRGLQSLARLHQLEELDLGWCMREASLGDGLFQLLSNCPKLKKLFLSAVRGTTERDLMHIAALGKNLEQLDLMGILNITHERVYDILVNCPKLQLLDLSFCDNIMDRDFDLLAEWSRQFKVDIKSSRRH

SEQ ID NO: 2572 - DNA, 5124 bp, DROSOPHILA
cctgcaaggagatgggttactagtgactccttagaagctgtcacaggtgcacgtaccttgggtggtgttgccacaggtgtacttttgccgtactcctggccggcattcactgtccatcaggcaaaaggaggccttgtgcccctgggccaccttccggtagttgaggtcgtaaacatcaaaggtggcaaaaacattcatgctgtggtagtgtctgtggcactggtgccatacccattccttgtagttagcgtatgggcttacatcggcggtgcccacattggaagccttaacggaaaagcgaagcagtatcctcgcagcgtgcggattcgtccttcggatctcgtaagcgtcggcggaaacacagtgctcttccatggcgcatgtgagccgcgacatgggcacggcctccaggcgggcggttctctcgatgtccaccagtccgatctccaggtcagccgaatggctaacacaggccgcaatgctgacattatggtttctggcattgcagaggttcgggtagtgggactcccggatgcagtcggctaggcgacgctcggttcccctgcacagagtgcccaccatgccccagggatacttccggctatccccgtgctccgttccctggcttgccttggaagcgtagcccaatcctagctgtcggcacaccacatttgcctcccgcatgctccacgaagtgctgcagatcgtaccccatgaggcgccaaagtcaaagctcacctccacgcgtccctcgcggaggacttgaataccggcgagcgctgccttgttagtggccagtcggaccatcatgtttctatagttgttctgcacgttgaggttggcccaaccttggctgagaaccactaggagctgcaacaattgaaaccggaacgaagccatcgcccattcagccccttctggtggagcacacccaaatcgcaaccagttttaaagtcaatggaacaatgcgccagtagggtaacaactggcaaatggggctacatgtgtaggaggtatattgtgcgttgtgcttcccaacggatcgacccacatctgcttggcaggcgggaaaacgtttgtatacaaaactcagctggcaaaatgcctattccgagcgcgcgtgctctggtttctgcggtttctttttttgggggtatggagtgcatgtgtaaactacttctgtgcgccggttaggactctagcaacttagtgatggcctctttcagttccgccggcttgaagacaccgcgttccgtgatgatgcctgtgatcagagaggcaggggtcacatcgaaggcggggttccagcagttaatgcccggggcagcgatgcggtgctctcccacgtgcgtcatttcccggtcgggacgctcctcaatgatgatgtgatcgcctccgggaatcgctagatcgatggaagtcagaggggcggctacgtaaaatggcacgtcgtggtgcttggcaaccacggcaatctggtaggtaccaatcttgttggccgtgtcgccattggaggccacctaaggaagggaagaaaccattaatcgaaaatagttaatcattaagaggcttacttacacgatctgctcctacaaccacagcagccacatttttggcccgcagcagagccgccaccatgctatccagaaccagagtggcggggaatttctcgtggaccagttcgtaggctgtgaggcgggctccctgattgtaaggacgagtctctgtgcaataaacgtgctctagagcgaaaagtgcaaaagtgcgtaagtaatcaataaatgtaccaaactctattaagtactcacccagttttcccagctcggccagttggcggaccactcccagagctgtaccgtacccggcggtggccagggaacccgtgttgcagtgggtaagcacccggacggatcccgtcgatccagcgggcgctttacctgccttcgccacgccctgtaggatcgcctgggctccattcgctccaatggcacggttatcggcaatgtctttttttagcatagcttcggtcgcgtccagaaatcttaaacagaagggggttaactttgtgtgctcgtctcgtagcccagtaaggaggttacctatgcttcatttgggtcacgtcgattgcctcgtccttgtaaagttcgttggccagggtgatgagctcgtcggctgcgatcttcatgttgaccgccgtaggcctggcggaaaccaaatagttcaactttccctcaatctcctgccgcagtgatttcttgttctcaaaatcctccgggttgatttccacggccagggagaggcagccaacgatagcgatggccggagcaccacgcaccttcaaagagtcaaaaatattagtttaaattgcttgttttatttttaatggtcccttaaacgcacccacttttcatgactatatgaaacgagtacccattaatagtcgtgatcaatcaagatgctaaatgagaatatttaaaatatcaggctgtcatgctgttgtcatgtctcaaatgagaccgttggggcaataatttcgctgctatattgtcgttattcataaacaagagcgaagagcagacagattaggtgggtcagcctatcttggcttatcagatgacgatgcaaaaggcggagtaaatagcttacatggaaaacggcgaggctccacgtgacaaggcgcgtgctcacacataaacgatcggccaccaatgggccatgggccatcatcttcttgttggggcattagcccagtgggaaccgatcgccaagtgacgtgcgcggagtagttttatttttggcaagcgtttttaaatttttaatttcaattacgttatttatagccgggcaagggacatacgacaagcgacaagagacaagcaagcgatcgttgcgcagattaggaaatgtaccaacaggcattttaatggcaatatgccggggaacgtggactattaagggaggcaggaaaaggcgctggcctaggcattctcacctgcatcttgttgatgaccttccagccatcctccactcctcgcaccaccacgtactttgactgaccgggcaggagcagctggtcgaggatctccaggctgccccgcgagtacttgatcgactgcaggctcatctctccaggggattgtgctgaaactggaaagggttaccgattaatgtgtgcactttttggaggaagaagcagggagacgggcaacccacttggaccactagtgggcgaatcgctgccaactaatcagttattaatcgaaggcgatcagtttcagtttcggtttcggtttgaaattcgtagctttaaacgctccctaacaacgactgccaggcaaacggatcggttagcaactgaacgagcctcacggttggggcgtcggaagagtttgtttcgcagacgagcgagagtgccgagaatggcgccggtagagcaggcggtacacaaaaagaacacagtccgacttccacgaatggtacacttatatgtaatttgagtgatcctgacgaataacaattgccaacagaccgagttaaacataacttcaatagatgctatcgatcagggtgtcaccttttcgtgcagtgtacttggccaagggcgtggcagtctggcggagggggggggggggacctcgtccgcgacatcgtcgattaattcgagtcggggacatcggtggctggggcttccctccgccgcttgccccattgataaacgttgggcgctcgcgttgaatttcttgctgacaagtgtagcccggcaagaaattaatcgcgctgcttatctgtcggccggttattgggcaattttgagtgtgccttaattaatgcgactgcaattagttgggccgcagcgtgacagcgacttgtccgctggtcctgtgccaataaaccgccagatggagtgcgtcgggaggaagggattgggcagtcatcactatccccatcaccataaccatcagcagttttggtgaatttgggggcaactggtggttgccgcaagctaacctttcgcagctgtgtagcagctgaatgactcccaacaccaggtggtactggtggcttccggggagcgaaatcaaaaatcaggaatcggtgctcgcggttatcgcatcggcaacgcgcacgttttgttacttgatttatttttaatttttgatttacgaatgctagtgcgggcagtgtggtctcctctttttccgcatagaataccaaaatcttcccgttccacaacaagcctgatttagctgttttgtttgcaacttttgtaaatcttacggctataggaagcattttcaggcaaactcggacctattatcattttgttacttttggttactttccagttatatacagcaagtatatttgtttaagccataactcaccatcccgccactttggtgaagtagaaagttcgtgaagtagtccctaggtggcgctagccaagcgccaaattcaaacggagcaaccgtttgccttaagttttcaaatatttcatttacgcattattacacacccagaatcaatcatgagcaaagtcagaggaccagctttgtaccgcctggtgccctcgaaaacgctcttcatgctgtgcgacgtgcaggagaagttcaagccggccattccgctgctaagttcgctcatcgaaaacactactaaactggtgagacagcgagaagtgacaggataatggtcgggttctaatggattcacattccagctggcagccggcaaggtcttccaagtgccactgctggtcaccgagcagtatcccgagaggctgggcaagaccgtttgtgagttggacatcaagcatgcctgtgccaatatttccaagaccatgttctctatgctggtggagccggtacgtaagagtatgactgatatcttcggtggcaagcccaagacggtggtgcttttcggtctggaggtgggttatggcttgagttagggattggtttagcaaaatgaccccgcttccacatgatttagacacacgtctgtgtggagcagacggccttcgacctggtaaatgatgaaatcgatgtctggctggtggccgactgctgtgcgtcgcgtcacaatcaggatcgggacttggccttggagcgcctgcgtcacatt

SEQ ID NO: 2573 - DNA, 1453 bp, DROSOPHILA
cgcgttgccgatgcgataaccgcgagcaccgattcctgatttttgatttcgctccccggaagccaccagtaccacctggtgttgggagtcattcagctgctacacagctgcgaaagtgcacacattaatcggtaaccctttccagtttcagcacaatcccctggagagatgagcctgcagtcgatcaagtactcgcggggcagcctggagatcctcgaccagctgctcctgcccggtcagtcaaagtacgtggtggtgcgaggagtggaggatggctggaaggtcatcaacaagatgcaggtgcgtggtgctccggccatcgctatcgttggctgcctctccctggccgtggaaatcaacccggaggattttgagaacaagaaatcactgcggcaggagattgagggaaagttgaactatttggtttccgccaggcctacggcggtcaacatgaagatcgcagccgacgagctcatcaccctggccaacgaactttacaaggacgaggcaatcgacgtgacccaaatgaagcatagatttctggacgcgaccgaagctatgctaaaaaaagacattgccgataaccgtgccattggagcgaatggagcccaggcgatcctacagggcgtggcgaaggcaggtaaagcgcccgctggatcgacgggatccgtccgggtgcttacccactgcaacacgggttccctggccaccgccgggtacggtacagctctgggagtggtccgccaactggccgagctgggaaaactggagcacgtttattgcacagagactcgtccttacaatcagggagcccgcctcacagcctacgaactggtccacgagaaattccccgccactctggttctggatagcatggtggcggctctgctgcgggccaaaaatgtggctgctgtggttgtaggagcagatcgtgtggcctccaatggcgacacggccaacaagattggtacctaccagattgccgtggttgccaagcaccacgacgtgccattttacgtagccgcccctctgacttccatcgatctagcgattcccggaggcgatcacatcatcattgaggagcgtcccgaccgggaaatgacgcacgtgggagagcaccgcatcgctgccccgggcattaactgctggaaccccgccttcgatgtgacccctgcctctctgatcacaggcatcatcacggaacgcggtgtcttcaagccggcggaactgaaagaggccatcactaagttgctagagtcctaaccggcgcacagaagtagtttacacatgcactccatacccccaaaaaaagaaaccgcagaaaccagagcacgcgcgctcggaataggcattttgccagctgagttttgtatacaaacgttttcccgcctgccaagcagatgtgggtcgatccgttgggaagcacaacgcacaatatacctcctacacatgt

SEQ ID NO: 2574 - protein, 364 aa, DROSOPHILA
MSLQSIKYSRGSLEILDQLLLPGQSKYVVVRGVEDGWKVINKMQVRGAPAIAIVGCLSLAVEINPEDFENKKSLRQEIEGKLNYLVSARPTAVNMKIAADELITLANELYKDEAIDVTQMKHRFLDATEAMLKKDIADNRAIGANGAQAILQGVAKAGKAPAGSTGSVRVLTHCNTGSLATAGYGTALGVVRQLAELGKLEHVYCTETRPYNQGARLTAYELVHEKFPATLVLDSMVAALLRAKNVAAVVVGADRVASNGDTANKIGTYQIAVVAKHHDVPFYVAAPLTSIDLAIPGGDHIIIEERPDREMTHVGEHRIAAPGINCWNPAFDVTPASLITGIITERGVFKPAELKEAITKLLES

SEQ ID NO: 2575 - DNA, 16489 bp, DROSOPHILA
aaaattagttttgtaaataatcaagtcatgaaatatgttcacgatctaagaaacaatcaggaactgcctgggaatggcaatataataaagaaattaaactataccaaagactttctaaccaaatctgcgaatatgaaacttgtaaatgtactgaaaacaagaaaatatatgtttataaaataaatgttacacgaattatatacaagagttttccaatttgaaaacctacatgtattatatatacatttgcggggtgttaaggtggggggaagttgtttgtgttctgttgtggcaataataatttgtatagttcgtttctttttgttcattattttattgttgtgcataaatattttacaactaaagctagacttaaagtattttcggatagagagggaaagagtgaaaaaaattattcggaaggagatagaagtaaaagagaactgcgcctggtaaaagccatttaaagttatttcaaatcgattaagtttgtatccactgagggtcgttgcgtttctagataactatgtatctataattttctagaatatctgtatttgaaccaaggaaagacttctctcgcatctgcatgtgtgaacaaatgtgtgtgagtgtggatgtgaatgtgtgggtgttgttgttttgggtatggcagctcgaagaatacgaattgtttaaataatttacacagcaaaaaaatatatatatatataaagtagtagagtattcgaattaaaagcagcagcactggaaaattttgatagacttttaaagcagccgaaatggttgtttacttaatttgtttcgccgtggttgttgttaagccaaagcatcgcagccaattatctacggttcggcaacaaaaagggttaagctcgcagaagattctcttctctggcaaatcttgcgactggataagggctaagactagaaataactaactatgctgattttctctggtttcttgtgtttttgttttgaatttttttttttttgtgacctattctggcaccactgtggtggtgtcatcaaatgtcgcctccgtcgtggttggcgtttctgtggttgttgtcgttgttgtcgttttgcgattgcgcaggcgtcggccacgccccttgcgacccatctttttgcgatgcaccacatgcgtctcggaactaaagctaactgcctcgctaactttgctgcccacatcggtggtgctggtggtggtgttgttagtgctgatggtggtgtttgtttgtgtgttcagattgatgctaccatcaatatgaccactaattgcaccactgctaattgtggttgatatttgggtgggtgttgtttctgaactgctatcgatggtggctgttgtttgtgtgcctatgtgattgtggttgtcggaactaatagcgccactgctaatctcacttgttattgtgcctgttgattgtgtattttcttggcgagcattgtccgcgtttgctgtttgtgtgttaccaccaatagctacggaactaacagcgccactgctaattgtgcttgttgtttgagcatttagttggttgtcattgtcaacagcggttgttgattgtgtgtttagaccaaactgacccataataacagcaccaattggcatggctgttactgtttcgctattggcttctgttttgggaattgttgtttgtgtgttaagctctggctcagtggccgtttcaatgctaaagattgtggtttcttcagccacctgatcgtcatttggcctgttggttgtcgtttgtataattggattagttttcacactaatagcaccattgattgtctgatcttgtgtgttaagtgtatcctgatcgatttcctgagcaccattgctaatgggcgcctgcaccaccagcggttggcgcacagagaaggcggaattcgagtcgctggcagcttcgggggccactgtggtttggctattctcggccagcgacttttgcaccttgctcagtatcacctgatcgaggttggctatcgaaatgaccagtggtgaggactcattggactcgggtcttaggaggggtacaatgggtcttacgtaagtgggtgccggtgtggtggtctctccggtttcgctggccaaactactgctactgccaatggttgtgctctcctccgtttcgccaatgattgtattactgctcagttgcttgccctttctggccgaatcaaatagtccctccagcgaaatggtagaggtctccaatgcggcagttagaacttcaggcaccaaggacttgccactgcgatcggtgtcagcgccctcggtttctggcagagaattcctaacgggcagcgagacaggacgttcagccgctgatgtgggttcggtgggcgtgtaatctgccactgtgctgtgaccatcgttgatctgaatatcactgccatccaccaagtggacatatttcaccacactgatctcgcccagctgctccacgtggggcagggactccaccattaaggtgctaaagtcatgattcgccttggacttcctctgagcagccttggcctgtttggaattaatctcgacaatgcgattaatctcgattaacttgtgcttgggcaccacttccgtttgtatggtgggatagaggcgtaccgttggctttctggtcgtgggctcctcttcttgaccctcaccctcgagaagggtgaacacatgcaacaaggttgtggccggcggtggtgcttgagtagtgctcgagatggtttgatcctgtgaattgatggaagtggcttcattagcattggtcgctgtttcaatttcggttacattttcagtttcagtttctgtttcagtttcagtttcagtttcagtttcagtttctggtggcgtgtctgtggtggtggctgtgtctgactgtgtgctgggtggtgctggtgatggtggtgtactgggtgtggtggtcacaaagccctgctcctgctgctgctcctcggtggtttcatcttccaccgccacctctgtaccggcttccacctctaatcccgtctcggattccaccttaaccacctttggcttcagagccggatgtttcttactgtgtttgtcaaagatcttcttgtttctcgcattcagtgcatcgatattcaaatcttctatcagggaattctcgctggccgtctccgcggcctctgtggatggacccgagtacttcctctcgtaactcctgttattgctgggtataaatggcgccggtttcagtggtgtcagcggtgtggtgcgttcataatcactggccacgggtttcaaggtcaaatttggtgaggctactcccggtggtcggttaaccacacgaggtcgctttgtggtgccaaaacggttggatggtgtgctatttccatttgccgagtttgatgggcgattgcgaggattgtatggtacatttccggatgcggtaggtggtgatccacttccggtggttccaaatgtgggacgactacccggtggagctcgattatctttgggtttgtaaggggaattaaacttcggtttgttatcctcttgtgcattgtcctcttctccacctggcttcacgtcctcttcttcttcatcctcttcttcgtcaccttcttcctcggaatcctcctcctcgtcttcctcctcactctcttctgcaccatcttcctgctcaggcttggacttatccaaaactggtcgggtcttcggcacaaaaggtcttcgcaatgtggttgcaaactgattctgcagtggttgctcatggcgctcttccacttcgtcatcgtcttcgctatttccctgagacttgaagcgatcggttccaggcaatctggatcctctcggatcacttctcacaaagccctctccacgattgcgaacactcgagttgaagggatcaaatcttccgttcttcctgcgcacgaatttagccgtaggtcgggaggtgctaaaggtcagtggtgcctttgtggtgccaccactggccgagggtggtgtgtagggtctacgtgccaccagttttcgtttaaagaagggtctggccgaggaaaccgatgaagagtcatcatctgttgaagattcttctctttggcttgagatgctcgagcccttctcggccagaagcttcttcagacgatcgttgatcacgccctgttctccttctcccctcgcctgctctgcctttactttgtccctcaacttttgcaactccgacacatcctgatcgtccttttggcccagggtcttaaatcgattgctaataactccatcctgcggctcacctcgtgcttgctgctccttgattcgctggcggagattaacaaggtcattatcctgatcagcgaatctggtgtggctgggaacgaaaggtttacgggtggtctcatcggaattatccacactagccgcagtacttgagtccacaggcctcaatttgcgaacaatcttgcggaaacgcttattgccggtggtgcttgtggtgttgttgttgttgttgttgctgttgctggtggtgctttgacctgctgttgttggtgtggctgtggtggtgtctgggttagtgtcagtggcgctattagtggtgctatctacattgatggtactattgctattgctatttaagggtctgcggaatttaagcacacgtatgcgctttggtgttggtctgctggtggttgtggttgttgttgttgtggttgcgttggagtcttcttcctcctcctcctccttctcctcttcgcgggaatcacccttagtctcggtctcttcagtctgctcatcgactagggttagtttagttacctgggcgcgctgacggcccccaaacgccaatcgtctggcggtgcttgttgtttggggttgttgtgttgttgttgggttggtgttggtggtggtgctgcctctggtgcggctcaattgataacgattctgaaagcgtcgtgtggaattaacatcattacctaaggcattcaaaccagccccactcgttttctccttcccctcattctctagactagcataattatcatcatcgttatcatcatcatcatcatcttcatcattatcattatctttatcatctgtactatctgccttaatattagctgtgactgtgactggtttgtttttgtttgtgtaactgtttgacttgaatcgattaatataattggctacggtgctgttactacgttgactagctacattcagtgcagtgctacggttagtaagattgttaaagttagtggtgccaaccccgaatatagtgctgtgttttagtgtgtggttactgttcgatacctcgacggagctatcgttatcttcatcatcatcgttttcatctccgttgtccgagtcagtttctgtatcgttgctatctgtctctgtctgtttttcagtggttgtcctgagtggttgtctttgcctgttggctagcaattgatttagtcgtgaacgtgttgtagtgcttgtgacttgaggatctacagattcttcttgatcatcatccccatcctcgttttcgtcgtactcctcttcgggttcttcctcgttatcttcctctggtcggtggtaaagatttctattgattgccaccagatttcgtcgcgtactagagctaactctcagtggtgcagcggtggtgcgacgtgcggcaaaattgagtggcctacgtcctggcaccgcagctgcaccctcctcctcgtcttcaggagtgggtttcagagcgcgatggcggtttgtttgaaggaagacagctcgcggcggtgctagctgctcctcttcctctccgtcgtaatcatcatcatcgccgtttgccccaccgtcggtggttgttgtttgcggtgttgtaaagcgattacgtgagcggttcaaggccgcatacggacgtcgtgtgcttatctcgtcgccgttcgttgatcccgtcgtggttgctgtgatggaagtcgcattaaaacgccgacgtgacagaattggtcgacgcgttgttctttttgtctcgccctgatctatttcattgtcggcactaggatttgcagttgtcgttgttgttgacccgctgctggtcgcattgaaacgtcggcgtattaaaagttgccgtcttggtgaagttgtagttgccgcttttggtgttgaactctccgtatcacttggatcgatctcattttcgagattctcatcagcgacaggggcaaccgtagtggttgttgttatggtgccattaaaacggcgacgaattaccaactgacgacgtgatgtggtgcttgctggtgtagtggtggtcgttgatgttgttgttgttgttgttgatgtggtttcagttttaggtccgctttcttcgagggggatttcattgtcatcgtctataaaggcttccagttcgggctcctcagtgctggtgtcttcagcctcttcgggagctttcttgctaacttggtcatctatttctttgattgcaaccttattttcttcagcatcatcgcttatctcctgttcaggagttactgtggtggactccgtttcttcatcttcatttccattatattcagtactactttcggctgacttctcagtggtcgttgtagttgttactctgcgactaatacccacataaggttgtcttgtacttttggctgttgtggttgctgtctcggtggttgaatcagttgcttcttcggtggttgtggtggtgcttcccctgcctctcaatctatttaagccggcatataggcgttttgtggttgattccacctttaactcttcttcattgtctttaccttaaataaataaaatggttttcaattagtttgattcgacttaacactcatactgccaggaaaatgaaattcaatcaaaagcgatttgacaaatcacttgtatttgcattactaattttgtttcagataaatgaaaatacttacgtatatcagaagaatctgagtcctctacagcattaacgggccttctgggtgtaaaaagtcgtctggtaggtagttttatggatggtggtgtcacggttgttgtgctcggcgatggtccttcattgtctttagtttcttcatcgtcctcttcgctgttttctattttagatggtatcggcgtcgttgagcgaatacggaaacgctgagggacgctgtagctcctcctggttgtggtgtctagcggttcactttgggtcttttcctgtaacctggtggacagggtcaagcgggtgcggtttaatctggtgtaggtgcgtaaagccctggcttcatcttcgcctctttccttttcttctagaagagaaaggcttacaatcttagaggtctcattgctcgagtctgttgctagtggtattgttttaaatgtttttccctgtcgctgcgcttttattctgcccacgggaatttcatcatcatcttcatcctcatcgatttcagcggttaattcatcatcatctagggtttcctctcctgatccgaccaaatttgcccccgggtgacctactttgacccgggggttttcaataaaaaatgaccgagctcggcattgatttccttggcctgcgccatagccacgcgatgtccttcggtctcttcgtcatcgcccagagaattatgtggcgtctcattttcactcacattgaacacatcatgaatttgttgcttaatatttacagtcacactttcgatatccggtggtgcgggggacttgtcgatataggtaattggtgaatcctttacatactgatagtactttcttctgtggtaaattggcaaagacagcttatcatcgccttcatcttctgcggcttcactacccttggtgattgtctggacttctagtttattttccgtttgcaaacggtttatggcattgctaagctgtaccttaagatcgcttaagtcttcttcggtggttgttgtttcaggaattgatgttgtcgttgtggtactagatttgagacgatttataaacttttgcttggccgctgccaactgatctgttgaagattcatcttcaacaggaactggtgtggtagttgttgtgctcacgggccttctataagcgagaatccttctggtgttgccctctatagaagtaggggtggattcttctgtggactcttcgtctactggagctggggtggttgttgtgctgacaggtcttttgaacgcaagaactcttctggtggtggcctcaatgggggcagcagttgcctcctcagtggactcatctgaagctggggtgcttgtcgtgctcactggtcttctgaagttgagaactcttctggtggtagcttctgcagatattgtgggttccgtagagcttgtagttggttcctcagtggttgtgctaactttggagggacgcttgaaagcgaagctagccctgcgggtgctagcctcaatattttgaggtgtttccgtagttgttgttctgattgttgtcggtctagttcttcggattatagtcctggctgtcgtgctcacacgtggcgcctcctcaacttcgttcccagcttcctgacctgcttcatactcgtattcttccacctcttcatgttcgatggtttccttgggtttcttaagtaggcgtcttcgcgttttggtaactgttgtctctgtttgggcctgtttcttgcgggtgctacgtgaggcaaagtccaaggccagcagcgaagaaagatcattactctggaatcgcacggatccacgattgcgtgtcactgtgcgaggcgtggtgctcgccgctggtgggtgggtcacttcatcgataatgtactcatactccgcgggtttctcttctatggttttagtgtgaatgcgtttcacaatcttttgaccagcgtcgagagtgcggacgtaggtggtgcgagtgcgggtgattccattgcctagactttcggtttttgtggtggtgcggtttcgaacagcatttaaggaaacccgaccagtggttgccttcacctcagcttgtggtggttgtgccaccgtatcttcttcattggatgtagttgattgactattagcaggtgtttcagtgcttgtggtgctgtggttgtttctcactcgcttgttggcatctgccgctagaagagaggagagatctccctccttgcggggcctaaaattgcctctgactataactcgacgtttaggcaaagcagcggtggtctcactctcatgttcaatatcctttgcctcttctgtagtacttgttgtgccttctgtggtagtgctggtacggaagaaactacgcctggtggagctactaacttcggaatcttctgcagttgctgtggttgtggcttctgtcgaacttggcgctggcgtagtgaatagcgaacgacgagtggtgataatattcgcttcagcatcatcatctacggagctgctactgatttcttcagtggtgctactaggagccacagtggtgctacgtctgaagaacgaacggcgcgttggaccctcggtggttgtctcgacttcaatctctggttctgtggggctgctaggttcttcagtggtgctgctagctgcttcagtggtcctagttctaaagaaagaacgacgtgttgtagtttcagtagatatctgggcatcactgtctgcttcagttgagctgcttggttcagctgtggtgctggttctgtaaaaactacgtcgttttggttcttctgtggttgtctgagcctcactctctgcttcagtggtgctgattctgttacgcacaataactcgacgcctttggtttacggtggatgtggtttcatcttctggcacaactgcaggagtagttgagctaaagcggttaaatgctcgccgtgtgagtttttctgtcgttgtcgaagaatcttcctggagactgactgggctgctagttgtgttagtgatttctataaattccgtactgctggcaggatcatcactggatccatcgttagaatcagaggcaatttctttttcaatggcttctgaattagtttcagtggtgctgcttacatcttcagattgtccagttgtgctgctaattggggcttcagaagagctgatttccgttgaagattctccattatcattctcagaagtagactttttgtcggtttcagcgcctagactggcttcttcagcgacgatatccaagtctgcggtgctgctggagctttcttcagtggtgctgcttacagattgttccgtagaactgctgacatctgaagtttctgatggcaaagtggtaatctcgagctgtggttgtgcagcttcagttacaatttcgggagattcctgttcggtcgccgtgttgctgtcatcagtattctcgcttccagcaggcgccttcgtctcacccctcttctcatcatcgattatttcagcagccacattttcatcttcggtggtgctctccacaatctgtccacctctgctaataggttggtgcggtggagttggtttggctgcatcgccgaaattcctcacaaagctggaactgcgtccggcggttagatgagcaccgccctcggaatcgcgaatgatggctttgtaatggatttgagagtcatctaagctcgctttgctagcagaacgttggatgctctggtagctgcgcgaaccgtgcgttggggtcgcggttgccacctcgagagccacttcggactcatcttcggcggaatttaggcggcgactgcggaacttggtggtggtttgaagctcgtcatccacaattgattcggtgttcaactgcttgccggcaaagcgtcgggagtccttgtcgtcgcccgctaaagaattgggaaccactgtgcgctgcgatgcaggacgtcgcaccgcacgccaagtgtacttggtatgctgctgtgtggtactgaggtcatcggtatcgattttgttggattgggattgacttaaactagagctaactacatcatgccttaagctatcattgccaccgttaccagctacttctacttgggattcttggtggtgcagtgaggaggtattggttcgtgtgttgattgcggttgctgttggaagactggcactcaccttgggcctatcccctggagatagtcgtgtcttcttcactacttgagcaactgcatcggtttcgttatcgttattatcggtattgttatcattatcggtttgggaaatagtggtggttgtggtgctaactgtgggtcgtgtgcgacgtcggggataaccaaagggtctgggactagaaaggtttggttcggaggttgttgtttgggtctgctctggttggggttgccttctgcccgggttggttctaatgctatttaaactactcaaaccgtttgttgttggactagcatcgttcgcagcttctgcattgttgttgttgttgctgttcttggtggctgttgttgttgttgtggttatgcgtcgacggttggtggttgcatacttgtattgagtcttggttttcgttacctcactgtcctcgtccacgttgttaacgtcattcagttcgttgttgcccgtggtggttgttgttgtggttttcggtgtcgttgttgtggtgtccagttcgggttgttccgttgttgttgtgcttgttgttgtcggtgttgatgtttctgagtcgggactgggagaaaggtgggtgggtgaggcttcactcaactcggtggctagcagggagtctgagctaatgccattagcggttgttgttgggacagtggatgctacaatcggtgtgggtgtggtggtggtggtatgcagattattagttatggatgtggtggtggttgaggtgctttcatttggttcagtggtttcgttagttgtggttgtggtttcggattgggcggtggtgctgggtgttgttgtgatgttctcttctgttggtaattggttattcagtttcacattgttgttgttattgctgctgttgtagtggctgttgttgttgttgttgttgttggtggtggtgctggccttggcagtctcagtgccggcggttgttgttgttgttgtagttgtagtttctggtgttgctgttgtggtggtggttgttctgcggccgatgctcgcatatttacgtgtgtttgtggattgtttgctctgtaccgtgacaatgtccttttgctcgtcctcgtactcttcctcttcatcttctgttggatcttcggaatcttcggcagtggcactcttagtgggtcgtgtacgctcgaagtatttgtaactgaaaagtgtagatttttcgattaatgacaatcaccttgaaatatatatcgtccactcaccgattggttgtcgaactgggcgccgcttccgtgacttctggagatgacgtggtgcgtccacgagtacggctcaaggtggcataggatttcacctgtgtctgggtctgttgctctgcctcttcgtgggattcttctgctggcggtgccaccgtggtgggcctagagcgtctcagacttgtgtaagacggagtgatagagctcaaaggacgacgggtggttgtctcaacttcggccaggttctcctcctcttcctgctgatctgcgtgctcctcctcatctccctgactcgcagatcgatggcgattgatggtcacatattgtttgcgttccttcaggaaaccatcgaactcagccaatttttcaatgccctcgttctgtggaccttggcgactgttgcccctcagaactgaggaatatttggagttggtgttggaggtgagagtcgatgaaccccttgacgaactgctcgaagtagtgggttctgtgcttgtctctgaagcttcgctgatcttgaaacgattgcggctgaaggaattcaatgttccaggtcgacttagcacacgatcatacagagatttgcttatagtcgacggagtagtggctgcaccagtggcagaattttccttcaatgtaatcgatccatccttgttacgcaaaagatgcttctccagttgctccacgccgcccactttgcgaatcaaatcgattagttccttaatcacctgtggatcctcctcagcatccgtggatttgcttggcgacagctcgtcagtatcttcttcatattccaagtcttcatcaacagtggatggagttgtcgtagtggttgtcgtagtgcttgttgtggtggtggtgcgtggatatactggacgagacgtgggagcagctgttactcgattggaacgcactgtggtggttgccggggttgtggatgtcactggtgccgccgttgtagatctaaggtggaaaaagatagtttagtaacgaaaataagaaatattacacattaaaacatactttttggtcttgcagggcacattgcgagcaaagtcgcaggaatcggcagccggattaaagtaaagtcccgatggacaagtgaacatgtgagccacaattcctagaccagacggtccactatccaggcaccagtagtactttttgcaatctcttggatgctggaagaatccctcctcctcgcacttgaagtccgaacctggatcgggagtcgttggtggtggcggcgtggtggatgccctgcctccaatgtaaagagatgatccctcggcttcggtcagtttgaaggtggtgcttggcggtggtgcctgagtagagctcacagctggtctccttgtggcactgggtctcctggagctgagtggagcttcggtcttgccatttagacggttcctattgctggcattatcgcgactgcgagatcttgatggcttctgtggtccacttggcttggccacctcgttgatgcccagtctgaaatggattgagaacattgcaatctttgcacgatgccaaagaaatccttttacttaccccaatgcctccaccatggcttccttggcagcctcgataagaggatatggctttccgttgcaggtgccgcggaaatcatcgttgtcgatggcccagaacataatgccgcccagtccctgggccaccacatattcggccttcttgcgcacgatagcctcatcatcgtagcccacccactgattgcgtctgtaggcatagggacccataacattggcattcggctgcaccacagtccactcggggtcgtccttgagggtctggcagatctggtggggattaaagagggttagtcattcctcaaaactgatattcacatatatctttagcttacctcatagtaagccaggtatcccttttccctggtggcatcaccctgttctcccggaccctctgccggtgctcccagttcggtgctctcctcgttgatcaaagtataggatcggccataggtgggtatgcccagaacaagcttgtcacgatctgcacccgctttcagatagtatttgatggagtagtcctgcacggatataagaaaagctatttagtaaaataatggatacttttaaatatgctgcaaactcacaatatttaactcggcatcgtaattgtactcggagtcttcctccagcgaataaagcggagcatgatggttaaccgatggctcgtgggaagaatggaaatcataggtcagcacattgaaccaatccaaatacttgttcaacttgggcacatcgtaacccttgtcaatgtactcgatgccagcaggaactgccatggtcaataggagacgagtgcgtccggtcttctccgcttccctttcgaattcggccctaagctcttggacaaactgggcatagttatcacgatcccgggacttgccgccctctcgatgggctggatattcccaatccaggtcgatgccatcaaaatggttctgccgcaggaatttcaagatgttcttgatgaactgctgccgacgctcgttactagccaccaatggagagaatctggaactcgcctcgttccatccgccaatagcaatcatggtcttcagctgtttgttgtacgttttgagtccagtgaacttggcatagccacctggatgaaagagagagaaagagagagagggggcaatatgaagggatgcatcgtcatcagacggacaggaaattaaagccgagtcaaattaactcgccggaaggacgggggcgtgtctgcgtttgtctgtccactcaccctgttcgatgtcctggtacttgtcaaagggcttcatttggttatccttggtgaatccaccgaacgcgtacaccaaatgtgtacacaggtatggatttatgttctgcggattgaatttggctgtgcccggccgatagacactccagttcgtatagtagcagaccacgcgaccctcgctgctggcttctgtttttgatagaaacgtaattgagatgggaacaaattactacaggataccggatgtcattttagaaccacctaccatttatgcaataggcgagagcgcagagcaggaagagcgtttgccaggccgctccacgccggaactgcaatgaaggaaaaagaacattagcgaattacgacaattataatatatcgattcgatcataaagattttggccagcacgaggcggaagccatcggcgggcaggccaatttgcataacgagatcgtagatccgatcgccaacagccatcagcattgacacagtgacatctatggatggatgtggaaggggtaccgcacaaatctgggcgaaacaaaagaccaaagacacgaactcgaagaagatgtggttcccatgaaggtcgaccaaccaatcgcctcttacataatcatgcatggtatgatgtgacgagatgaatttcatatgcaaatcgtcgagctaatcagatgcatgtgccacgccccatttttggtgttataagaggggcggctgctgccgatgactaggaagttgtagtacacttattgtttacggagcaccactgtgcgctcactatgactcatagtcataaatatcttaaacggattttcatattaaaatgccaaagtgttacaacagcagccacaatgggcccaaatcattttggattttggtcagcaaccgaaagagaaacaacaccagattacataagaaatccgtaccaaaaactcgactttgattgcgtatgcgtgtgtgtgagacatgccggtttttgttttctgtttctttttatgtttgtattttttgtttttttttttttttttggactcacacacactatgtaatcgttcattcatcgaagtgaattttacacatagcgaacaaaatatgcttggaaataaaaattgatcaagtcaagacatcagcatcatcaccatagccatcaccatcgaaaagcatctgccgaacaggttggattgccgtggctcataactaattagcaagctggctttaagacctctctatatactgtatagtgtatactatatacgatgtgattatgagatgaacaatcaagtttgctaattgcattaacgcgccgaaggggaactttcttttcgcaaaaaaaaaaaaacaattatctacaaataaagggaagttttctatacaaattgttaggtactaaaatttggaattaaatttcatttaagacagccacgtctttgccgacagaagaacatcacttttgaaggccagttttgttcacaagtcagaa

SEQ ID NO: 2576 - DNA, 13497 bp, DROSOPHILA
atgctgatggctgttggcgatcggatctacgatctcgttatgcaaattggcctgcccgccgatggcttccgcctcttccggcgtggagcggcctggcaaacgctcttcctgctctgcgctctcgcctattgcataaatgaagccagcagcgagggtcgcgtggtctgctactatacgaactggagtgtctatcggccgggcacagccaaattcaatccgcagaacataaatccatacctgtgtacacatttggtgtacgcgttcggtggattcaccaaggataaccaaatgaagccctttgacaagtaccaggacatcgaacagggtggctatgccaagttcactggactcaaaacgtacaacaaacagctgaagaccatgattgctattggcggatggaacgaggcgagttccagattctctccattggtggctagtaacgagcgtcggcagcagttcatcaagaacatcttgaaattcctgcggcagaaccattttgatggcatcgacctggattgggaatatccagcccatcgagagggcggcaagtcccgggatcgtgataactatgcccagtttgtccaagagcttagggccgaattcgaaagggaagcggagaagaccggacgcactcgtctcctattgaccatggcagttcctgctggcatcgagtacattgacaagggttacgatgtgcccaagttgaacaagtatttggattggttcaatgtgctgacctatgatttccattcttcccacgagccatcggttaaccatcatgctccgctttattcgctggaggaagactccgagtacaattacgatgccgagttaaatattgactactccatcaaatactatctgaaagcgggtgcagatcgtgacaagcttgttctgggcatacccacctatggccgatcctatactttgatcaacgaggagagcaccgaactgggagcaccggcagagggtccgggagaacagggtgatgccaccagggaaaagggatacctggcttactatgagatctgccagaccctcaaggacgaccccgagtggactgtggtgcagccgaatgccaatgttatgggtccctatgcctacagacgcaatcagtgggtgggctacgatgatgaggctatcgtgcgcaagaaggccgaatatgtggtggcccagggactgggcggcattatgttctgggccatcgacaacgatgatttccgcggcacctgcaacggaaagccatatcctcttatcgaggctgccaaggaagccatggtggaggcattgggactgggcatcaacgaggtggccaagccaagtggaccacagaagccatcaagatctcgcagtcgcgataatgccagcaataggaaccgtctaaatggcaagaccgaagctccactcagctccaggagacccagtgccacaaggagaccagctgtgagctctactcaggcaccaccgccaagcaccaccttcaaactgaccgaagccgagggatcatctctttacattggaggcagggcatccaccacgccgccaccaccaacgactcccgatccaggttcggacttcaagtgcgaggaggagggattcttccagcatccaagagattgcaaaaagtactactggtgcctggatagtggaccgtctggtctaggaattgtggctcacatgttcacttgtccatcgggactttactttaatccggctgccgattcctgcgactttgctcgcaatgtgccctgcaagaccaaaaaatctacaacggcggcaccagtgacatccacaaccccggcaaccaccacagtgcgttccaatcgagtaacagctgctcccacgtctcgtccagtatatccacgcaccaccaccacaacaagcactacgacaaccactacgacaactccatccactgttgatgaagacttggaatatgaagaagatactgacgagctgtcgccaagcaaatccacggatgctgaggaggatccacaggtgattaaggaactaatcgatttgattcgcaaagtgggcggcgtggagcaactggagaagcatcttttgcgtaacaaggatggatcgattacattgaaggaaaattctgccactggtgcagccactactccgtcgactataagcaaatctctgtatgatcgtgtgctaagtcgacctggaacattgaattccttcagccgcaatcgtttcaagatcagcgaagcttcagagacaagcacagaacccactacttcgagcagttcgtcaaggggttcatcgactctcacctccaacaccaactccaaatattcctcagttctgaggggcaacagtcgccaaggtccacagaacgagggcattgaaaaattggctgagttcgatggtttcctgaaggaacgcaaacaatatgtgaccatcaatcgccatcgatctgcgagtcagggagatgaggaggagcacgcagatcagcaggaagaggaggagaacctggccgaagttgagacaaccacccgtcgtcctttgagctctatcactccgtcttacacaagtctgagacgctctaggcccaccacggtggcaccgccagcagaagaatcccacgaagaggcagagcaacagacccagacacaggtgaaatcctatgccaccttgagccgtactcgtggacgcaccacgtcatctccagaagtcacggaagcggcgcccagttcgacaaccaatcgttacaaatacttcgagcgtacacgacccactaagagtgccactgccgaagattccgaagatccaacagaagatgaagaggaagagtacgaggacgagcaaaaggacattgtcacggtacagagcaaacaatccacaaacacacgtaaatatgcgagcatcggccgcagaacaaccaccaccacaacagcaacaccagaaactacaactacaacaacaacaacaaccgccggcactgagactgccaaggccagcaccaccaccaacaacaacaacaacaacaacagccactacaacagcagcaataacaacaacaatgtgaaactgaataaccaattaccaacagaagagaacatcacaacaacacccagcaccaccgcccaatccgaaaccacaaccacaactaacgaaaccactgaaccaaatgaaagcacctcaaccaccaccacatccataactaataatctgcataccaccaccaccacacccacaccgattgtagcatccactgtcccaacaacaaccgctaatggcattagctcagactccctgctagccaccgagttgagtgaagcctcacccacccacctttctcccagtcccgactcagaaacatcaacaccgacaacaacaagcacaacaacaacggaacaacccgaactggacaccacaacaacgacaccgaaaaccacaacaacaaccaccacgggcaacaacgaactgaatgacgttaacaacgtggacgaggacagtgaggtaacgaaaaccaagactcaatacaagtatgcaaccaccaaccgtcgacgcataaccacaacaacaacaacagccaccaagaacagcaacaacaacaacaatgcagaagctgcgaacgatgctagtccaacaacaaacggtttgagtagtttaaatagcattagaaccaacccgggcagaaggcaaccccaaccagagcagacccaaacaacaacctccgaaccaaacctttctagtcccagaccctttggttatccccgacgtcgcacacgacccacagttagcaccacaaccaccactatttcccaaaccgataatgataacaataccgataataacgataacgaaaccgatgcagttgctcaagtagtgaagaagacacgactatctccaggggataggcccaaggtgagtgccagtcttccaacagcaaccgcaatcaacacacgaaccaatacctcctcactgcaccaccaagaatcccaagtagaagtagctggtaacggtggcaatgatagcttaaggcatgatgtagttagctctagtttaagtcaatcccaatccaacaaaatcgataccgatgacctcagtaccacacagcagcataccaagtacacttggcgtgcggtgcgacgtcctgcatcgcagcgcacagtggttcccaattctttagcgggcgacgacaaggactcccgacgctttgccggcaagcagttgaacaccgaatcaattgtggatgacgagcttcaaaccaccaccaagttccgcagtcgccgcctaaattccgccgaagatgagtccgaagtggctctcgaggtggcaaccgcgaccccaacgcacggttcgcgcagctaccagagcatccaacgttctgctagcaaagcgagcttagatgactctcaaatccattacaaagccatcattcgcgattccgagggcggtgctcatctaaccgccggacgcagttccagctttgtgaggaatttcggcgatgcagccaaaccaactccaccgcaccaacctattagcagaggtggacagattgtggagagcaccaccgaagatgaaaatgtggctgctgaaataatcgatgatgagaagaggggtgagacgaaggcgcctgctggaagcgagaatactgatgacagcaacacggcgaccgaacaggaatctcccgaaattgtaactgaagctgcacaaccacagctcgagattaccactttgccatcagaaacttcagatgtcagcagttctacggaacaatctgtaagcagcaccactgaagaaagctccagcagcaccgcagacttggatatcgtcgctgaagaagccagtctaggcgctgaaaccgacaaaaagtctacttctgagaatgataatggagaatcttcaacggaaatcagctcttctgaagccccaattagcagcacaactggacaatctgaagatgtaagcagcaccactgaaactaattcagaagccattgaaaaagaaattgcctctgattctaacgatggatccagtgatgatcctgccagcagtacggaatttatagaaatcactaacacaactagcagcccagtcagtctccaggaagattcttcgacaacgacagaaaaactcacacggcgagcatttaaccgctttagctcaactactcctgcagttgtgccagaagatgaaaccacatccaccgtaaaccaaaggcgtcgagttattgtgcgtaacagaatcagcaccactgaagcagagagtgaggctcagacaaccacagaagaaccaaaacgacgtagtttttacagaaccagcaccacagctgaaccaagcagctcaactgaagcagacagtgatgcccagatatctactgaaactacaacacgtcgttctttctttagaactaggaccactgaagcagctagcagcaccactgaagaacctagcagccccacagaaccagagattgaagtcgagacaaccaccgagggtccaacgcgccgttcgttcttcagacgtagcaccactgtggctcctagtagcaccactgaagaaatcagtagcagctccgtagatgatgatgctgaagcgaatattatcaccactcgtcgttcgctattcactacgccagcgccaagttcgacagaagccacaaccacagcaactgcagaagattccgaagttagtagctccaccaggcgtagtttcttccgtaccagcactaccacagaaggcacaacaagtactacagaagaggcaaaggatattgaacatgagagtgagaccaccgctgctttgcctaaacgtcgagttatagtcagaggcaattttaggccccgcaaggagggagatctctcctctcttctagcggcagatgccaacaagcgagtgagaaacaaccacagcaccacaagcactgaaacacctgctaatagtcaatcaactacatccaatgaagaagatacggtggcacaaccaccacaagctgaggtgaaggcaaccactggtcgggtttccttaaatgctgttcgaaaccgcaccaccacaaaaaccgaaagtctaggcaatggaatcacccgcactcgcaccacctacgtccgcactctcgacgctggtcaaaagattgtgaaacgcattcacactaaaaccatagaagagaaacccgcggagtatgagtacattatcgatgaagtgacccacccaccagcggcgagcaccacgcctcgcacagtgacacgcaatcgtggatccgtgcgattccagagtaatgatctttcttcgctgctggccttggactttgcctcacgtagcacccgcaagaaacaggcccaaacagagacaacagttaccaaaacgcgaagacgcctacttaagaaacccaaggaaaccatcgaacatgaagaggtggaagaatacgagtatgaagcaggtcaggaagctgggaacgaagttgaggaggcgccacgtgtgagcacgacagccaggactataatccgaagaactagaccgacaacaatcagaacaacaactacggaaacacctcaaaatattgaggctagcacccgcagggctagcttcgctttcaagcgtccctccaaagttagcacaaccactgaggaaccaactacaagctctacggaacccacaatatctgcagaagctaccaccagaagagttctcaacttcagaagaccagtgagcacgacaagcaccccagcttcagatgagtccactgaggaggcaactgctgcccccattgaggccaccaccagaagagttcttgcgttcaaaagacctgtcagcacaacaaccaccccagctccagtagacgaagagtccacagaagaatccacccctacttctatagagggcaacaccagaaggattctcgcttatagaaggcccgtgagcacaacaactaccacaccagttcctgttgaagatgaatcttcaacagatcagttggcagcggccaagcaaaagtttataaatcgtctcaaatctagtaccacaacgacaacatcaattcctgaaacaacaaccaccgaagaagacttaagcgatcttaaggtacagcttagcaatgccataaaccgtttgcaaacggaaaataaactagaagtccagacaatcaccaagggtagtgaagccgcagaagatgaaggcgatgataagctgtctttgccaatttaccacagaagaaagtactatcagtatgtaaaggattcaccaattacctatatcgacaagtcccccgcaccaccggatatcgaaagtgtgactgtaaatattaagcaacaaattcatgatgtgttcaatgtgagtgaaaatgagacgccacataattctctgggcgatgacgaagagaccgaaggacatcgcgtggctatggcgcaggccaaggaaatcaatgccgagctcgaagaaaaggaaagaggcgaagatgaagccagggctttacgcacctacaccagattaaaccgcacccgcttgaccctgtccaccaggttacaggaaaagacccaaagtgaaccgctagacaccacaaccaggaggagctacagcgtccctcagcgtttccgtattcgctcaacgacgccgataccatctaaaatagaaaacagcgaagaggacgatgaagaaactaaagacaatgaaggaccatcgccgagcacaacaaccgtgacaccaccatccataaaactacctaccagacgactttttacacccagaaggcccgttaatgctgtagaggactcagattcttctgatatacgtaaagacaatgaagaagagttaaaggtggaatcaaccacaaaacgcctatatgccggcttaaatagattgagaggcaggggaagcaccaccacaaccaccgaagaagcaactgattcaaccaccgagacagcaaccacaacagccaaaagtacaagacaaccttatgtgggtattagtcgcagagtaacaactacaacgaccactgagaagtcagccgaaagtagtactgaatataatggaaatgaagatgaagaaacggagtccaccacagtaactcctgaacaggagataagcgatgatgctgaagaaaataaggttgcaatcaaagaaatagatgaccaagttagcaagaaagctcccgaagaggctgaagacaccagcactgaggagcccgaactggaagcctttatagacgatgacaatgaaatccccctcgaagaaagcggacctaaaactgaaaccacatcaacaacaacaacaacaacatcaacgaccaccactacaccagcaagcaccacatcacgtcgtcagttggtaattcgtcgccgttttaatggcaccataacaacaaccactacggttgcccctgtcgctgatgagaatctcgaaaatgagatcgatccaagtgatacggagagttcaacaccaaaagcggcaactacaacttcaccaagacggcaacttttaatacgccgacgtttcaatgcgaccagcagcgggtcaacaacaacgacaactgcaaatcctagtgccgacaatgaaatagatcagggcgagacaaaaagaacaacgcgtcgaccaattctgtcacgtcggcgttttaatgcgacttccatcacagcaaccacgacgggatcaacgaacggcgacgagataagcacacgacgtccgtatgcggccttgaaccgctcacgtaatcgctttacaacaccgcaaacaacaaccaccgacggtggggcaaacggcgatgatgatgattacgacggagaggaagaggagcagctagcaccgccgcgagctgtcttccttcaaacaaaccgccatcgcgctctgaaacccactcctgaagacgaggaggagggtgcagctgcggtgccaggacgtaggccactcaattttgccgcacgtcgcaccaccgctgcaccactgagagttagctctagtacgcgacgaaatctggtggcaatcaatagaaatctttaccaccgaccagaggaagataacgaggaagaacccgaagaggagtacgacgaaaacgaggatggggatgatgatcaagaagaatctgtagatcctcaagtcacaagcactacaacacgttcacgactaaatcaattgctagccaacaggcaaagacaaccactcaggacaaccactgaaaaacagacagagacagatagcaacgatacagaaactgactcggacaacggagatgaaaacgatgatgatgaagataacgatagctccgtcgaggtatcgaacagtaaccacacactaaaacacagcactatattcggggttggcaccactaactttaacaatcttactaaccgtagcactgcactgaatgtagctagtcaacgtagtaacagcaccgtagccaattatattaatcgattcaagtcaaacagttacacaaacaaaaacaaaccagtcacagtcacagctaatattaaggcagatagtacagatgataaagataatgataatgatgaagatgatgatgatgatgataacgatgatgataattatgctagtctagagaatgaggggaaggagaaaacgagtggggctggtttgaatgccttaggtaatgatgttaattccacacgacgctttcagaatcgttatcaattgagccgcaccagaggcagcaccaccaccaacaccaacccaacaacaacacaacaaccccaaacaacaagcaccgccagacgattggcgtttgggggccgtcagcgcgcccaggtaactaaactaaccctagtcgatgagcagactgaagagaccgagactaagggtgattcccgcgaagaggagaaggaggaggaggaggaagaagactccaacgcaaccacaacaacaacaaccacaaccaccagcagaccaacaccaaagcgcatacgtgtgcttaaattccgcagacccttaaatagcaatagcaatagtaccatcaatgtagatagcaccactaatagcgccactgacactaacccagacaccaccacagccacaccaacaacagcaggtcaaagcaccaccagcaacagcaacaacaacaacaacaacaccacaagcaccaccggcaataagcgtttccgcaagattgttcgcaaattgaggcctgtggactcaagtactgcggctagtgtggataattccgatgagaccacccgtaaacctttcgttcccagccacaccagattcgctgatcaggataatgaccttgttaatctccgccagcgaatcaaggagcagcaagcacgaggtgagccgcaggatggagttattagcaatcgatttaagaccctgggccaaaaggacgatcaggatgtgtcggagttgcaaaagttgagggacaaagtaaaggcagagcaggcgaggggagaaggagaacagggcgtgatcaacgatcgtctgaagaagcttctggccgagaagggctcgagcatctcaagccaaagagaagaatcttcaacagatgatgactcttcatcggtttcctcggccagacccttctttaaacgaaaactggtggcacgtagaccctacacaccaccctcggccagtggtggcaccacaaaggcaccactgacctttagcacctcccgacctacggctaaattcgtgcgcaggaagaacggaagatttgatcccttcaactcgagtgttcgcaatcgtggagagggctttgtgagaagtgatccgagaggatccagattgcctggaaccgatcgcttcaagtctcagggaaatagcgaagacgatgacgaagtggaagagcgccatgagcaaccactgcagaatcagtttgcaaccacattgcgaagaccttttgtgccgaagacccgaccagttttggataagtccaagcctgagcaggaagatggtgcagaagagagtgaggaggaagacgaggaggaggattccgaggaagaaggtgacgaagaagaggatgaagaagaagaggacgtgaagccaggtggagaagaggacaatgcacaagaggataacaaaccgaagtttaattccccttacaaacccaaagataatcgagctccaccgggtagtcgtcccacatttggaaccaccggaagtggatcaccacctaccgcatccggaaatgtaccatacaatcctcgcaatcgcccatcaaactcggcaaatggaaatagcacaccatccaaccgttttggcaccacaaagcgacctcgtgtggttaaccgaccaccgggagtagcctcaccaaatttgaccttgaaacccgtggccagtgattatgaacgcaccacaccgctgacaccactgaaaccggcgccatttatacccagcaataacaggagttacgagaggaagtactcgggtccatccacagaggccgcggagacggccagcgagaattccctgatagaagatttgaatatcgatgcactgaatgcgagaaacaagaagatctttgacaaacacagtaagaaacatccggctctgaagccaaaggtggttaaggtggaatccgagacgggattagaggtggaagccggtacagaggtggcggtggaagatgaaaccaccgaggagcagcagcaggagcagggctttgtgaccaccacacccagtacaccaccatcaccagcaccacccagcacacagtcagacacagccaccaccacagacacgccaccagaaactgaaactgaaactgaaactgaaactgaaacagaaactgaaactgaaaatgtaaccgaaattgaaacagcgaccaatgctaatgaagccacttccatcaattcacaggatcaaaccatctcgagcactactcaagcaccaccgccggccacaaccttgttgcatgtgttcacccttctcgagggtgagggtcaagaagaggagcccacgaccagaaagccaacggtacgcctctatcccaccatacaaacggaagtggtgcccaagcacaagttaatcgagattaatcgcattgtcgagattaattccaaacaggccaaggctgctcagaggaagtccaaggcgaatcatgactttagcaccttaatggtggagtccctgccccacgtggagcagctgggcgagatcagtgtggtgaaatatgtccacttggtggatggcagtgatattcagatcaacgatggtcacagcacagtggcagattacacgcccaccgaacccacatcagcggctgaacgtcctgtctcgctgcccgttaggaattctctgccagaaaccgagggcgctgacaccgatcgcagtggcaagtccttggtgcctgaagttctaactgccgcattggagacctctaccatttcgctggagggactatttgattcggccagaaagggcaagcaactgagcagtaatacaatcattggcgaaacggaggagagcacaaccattggcagtagcagtagtttggccagcgaaaccggagagaccaccacaccggcacccacttacgtaagacccattgtacccctcctaagacccgagtccaatgagtcctcaccactggtcatttcgatagccaacctcgatcaggtgatactgagcaaggtgcaaaagtcgctggccgagaatagccaaaccacagtggcccccgaagctgccagcgactcgaattccgccttctctgtgcgccaaccgctggtggtgcaggcgcccattagcaatggtgctcaggaaatcgatcaggatacacttaacacacaagatcagacaatcaatggtgctattagtgtgaaaactaatccaattatacaaacgacaaccaacaggccaaatgacgatcaggtggctgaagaaaccacaatctttagcattgaaacggccactgagccagagcttaacacacaaacaacaattcccaaaacagaagccaatagcgaaacagtaacagccatgccaattggtgctgttattatgggtcagtttggtctaaacacacaatcaacaaccgctgttgacaatgacaaccaactaaatgctcaaacaacaagcacaattagcagtggcgctgttagttccgtagctattggtggtaacacacaaacagcaaacgcggacaatgctcgccaagaaaatacacaatcaacaggcacaataacaagtgagattagcagtggcgctattagttccgacaaccacaatcacataggcacacaaacaacagccaccatcgatagcagttcagaaacaacacccacccaaatatcaaccacaattagcagtggtgcaattagtggtcatattgatggtagcatcaatctgaacacacaaacaaacaccaccatcagcactaacaacaccaccaccagcaccaccgatgtgggcagcaaagttagcgaggcagttagctttagttccgagacgcatgtggtgcatcgcaaaaagatgggtcgcaaggggcgtggccgacgcctgcgcaatcgcaaaacgacaacaacgacaacaaccacagaaacgccaaccacgacggaggcgacatttgatgacaccaccacagtggtgccagaatag

SEQ ID NO: 2577 - protein, 4498 aa, DROSOPHILA
MLMAVGDRIYDLVMQIGLPADGFRLFRRGAAWQTLFLLCALAYCINEASSEGRVVCYYTNWSVYRPGTAKFNPQNINPYLCTHLVYAFGGFTKDNQMKPFDKYQDIEQGGYAKFTGLKTYNKQLKTMIAIGGWNEASSRFSPLVASNERRQQFIKNILKFLRQNHFDGIDLDWEYPAHREGGKSRDRDNYAQFVQELRAEFEREAEKTGRTRLLLTMAVPAGIEYIDKGYDVPKLNKYLDWFNVLTYDFHSSHEPSVNHHAPLYSLEEDSEYNYDAELNIDYSIKYYLKAGADRDKLVLGIPTYGRSYTLINEESTELGAPAEGPGEQGDATREKGYLAYYEICQTLKDDPEWTVVQPNANVMGPYAYRRNQWVGYDDEAIVRKKAEYVVAQGLGGIMFWAIDNDDFRGTCNGKPYPLIEAAKEAMVEALGLGINEVAKPSGPQKPSRSRSRDNASNRNRLNGKTEAPLSSRRPSATRRPAVSSTQAPPPSTTFKLTEAEGSSLYIGGRASTTPPPPTTPDPGSDFKCEEEGFFQHPRDCKKYYWCLDSGPSGLGIVAHMFTCPSGLYFNPAADSCDFARNVPCKTKKSTTAAPVTSTTPATTTVRSNRVTAAPTSRPVYPRTTTTTSTTTTTTTTPSTVDEDLEYEEDTDELSPSKSTDAEEDPQVIKELIDLIRKVGGVEQLEKHLLRNKDGSITLKENSATGAATTPSTISKSLYDRVLSRPGTLNSFSRNRFKISEASETSTEPTTSSSSSRGSSTLTSNTNSKYSSVLRGNSRQGPQNEGIEKLAEFDGFLKERKQYVTINRHRSASQGDEEEHADQQEEEENLAEVETTTRRPLSSITPSYTSLRRSRPTTVAPPAEESHEEAEQQTQTQVKSYATLSRTRGRTTSSPEVTEAAPSSTTNRYKYFERTRPTKSATAEDSEDPTEDEEEEYEDEQKDIVTVQSKQSTNTRKYASIGRRTTTTTTATPETTTTTTTTTAGTETAKASTTTNNNNNNNSHYNSSNNNNNVKLNNQLPTEENITTTPSTTAQSETTTTTNETTEPNESTSTTTTSITNNLHTTTTTPTPIVASTVPTTTANGISSDSLLATELSEASPTHLSPSPDSETSTPTTTSTTTTEQPELDTTTTTPKTTTTTTTGNNELNDVNNVDEDSEVTKTKTQYKYATTNRRRITTTTTTATKNSNNNNNAEAANDASPTTNGLSSLNSIRTNPGRRQPQPEQTQTTTSEPNLSSPRPFGYPRRRTRPTVSTTTTTISQTDNDNNTDNNDNETDAVAQVVKKTRLSPGDRPKVSASLPTATAINTRTNTSSLHHQESQVEVAGNGGNDSLRHDVVSSSLSQSQSNKIDTDDLSTTQQHTKYTWRAVRRPASQRTVVPNSLAGDDKDSRRFAGKQLNTESIVDDELQTTTKFRSRRLNSAEDESEVALEVATATPTHGSRSYQSIQRSASKASLDDSQIHYKAIIRDSEGGAHLTAGRSSSFVRNFGDAAKPTPPHQPISRGGQIVESTTEDENVAAEIIDDEKRGETKAPAGSENTDDSNTATEQESPEIVTEAAQPQLEITTLPSETSDVSSSTEQSVSSTTEESSSSTADLDIVAEEASLGAETDKKSTSENDNGESSTEISSSEAPISSTTGQSEDVSSTTETNSEAIEKEIASDSNDGSSDDPASSTEFIEITNTTSSPVSLQEDSSTTTEKLTRRAFNRFSSTTPAVVPEDETTSTVNQRRRVIVRNRISTTEAESEAQTTTEEPKRRSFYRTSTTAEPSSSTEADSDAQISTETTTRRSFFRTRTTEAASSTTEEPSSPTEPEIEVETTTEGPTRRSFFRRSTTVAPSSTTEEISSSSVDDDAEANIITTRRSLFTTPAPSSTEATTTATAEDSEVSSSTRRSFFRTSTTTEGTTSTTEEAKDIEHESETTAALPKRRVIVRGNFRPRKEGDLSSLLAADANKRVRNNHSTTSTETPANSQSTTSNEEDTVAQPPQAEVKATTGRVSLNAVRNRTTTKTESLGNGITRTRTTYVRTLDAGQKIVKRIHTKTIEEKPAEYEYIIDEVTHPPAASTTPRTVTRNRGSVRFQSNDLSSLLALDFASRSTRKKQAQTETTVTKTRRRLLKKPKETIEHEEVEEYEYEAGQEAGNEVEEAPRVSTTARTIIRRTRPTTIRTTTTETPQNIEASTRRASFAFKRPSKVSTTTEEPTTSSTEPTISAEATTRRVLNFRRPVSTTSTPASDESTEEATAAPIEATTRRVLAFKRPVSTTTTPAPVDEESTEESTPTSIEGNTRRILAYRRPVSTTTTTPVPVEDESSTDQLAAAKQKFINRLKSSTTTTTSIPETTTTEEDLSDLKVQLSNAINRLQTENKLEVQTITKGSEAAEDEGDDKLSLPIYHRRKYYQYVKDSPITYIDKSPAPPDIESVTVNIKQQIHDVFNVSENETPHNSLGDDEETEGHRVAMAQAKEINAELEEKERGEDEARALRTYTRLNRTRLTLSTRLQEKTQSEPLDTTTRRSYSVPQRFRIRSTTPIPSKIENSEEDDEETKDNEGPSPSTTTVTPPSIKLPTRRLFTPRRPVNAVEDSDSSDIRKDNEEELKVESTTKRLYAGLNRLRGRGSTTTTTEEATDSTTETATTTAKSTRQPYVGISRRVTTTTTTEKSAESSTEYNGNEDEETESTTVTPEQEISDDAEENKVAIKEIDDQVSKKAPEEAEDTSTEEPELEAFIDDDNEIPLEESGPKTETTSTTTTTTSTTTTTPASTTSRRQLVIRRRFNGTITTTTTVAPVADENLENEIDPSDTESSTPKAATTTSPRRQLLIRRRFNATSSGSTTTTTANPSADNEIDQGETKRTTRRPILSRRRFNATSITATTTGSTNGDEISTRRPYAALNRSRNRFTTPQTTTTDGGANGDDDDYDGEEEEQLAPPRAVFLQTNRHRALKPTPEDEEEGAAAVPGRRPLNFAARRTTAAPLRVSSSTRRNLVAINRNLYHRPEEDNEEEPEEEYDENEDGDDDQEESVDPQVTSTTTRSRLNQLLANRQRQPLRTTTEKQTETDSNDTETDSDNGDENDDDEDNDSSVEVSNSNHTLKHSTIFGVGTTNFNNLTNRSTALNVASQRSNSTVANYINRFKSNSYTNKNKPVTVTANIKADSTDDKDNDNDEDDDDDDNDDDNYASLENEGKEKTSGAGLNALGNDVNSTRRFQNRYQLSRTRGSTTTNTNPTTTQQPQTTSTARRLAFGGRQRAQVTKLTLVDEQTEETETKGDSREEEKEEEEEEDSNATTTTTTTTTSRPTPKRIRVLKFRRPLNSNSNSTINVDSTTNSATDTNPDTTTATPTTAGQSTTSNSNNNNNNTTSTTGNKRFRKIVRKLRPVDSSTAASVDNSDETTRKPFVPSHTRFADQDNDLVNLRQRIKEQQARGEPQDGVISNRFKTLGQKDDQDVSELQKLRDKVKAEQARGEGEQGVINDRLKKLLAEKGSSISSQREESSTDDDSSSVSSARPFFKRKLVARRPYTPPSASGGTTKAPLTFSTSRPTAKFVRRKNGRFDPFNSSVRNRGEGFVRSDPRGSRLPGTDRFKSQGNSEDDDEVEERHEQPLQNQFATTLRRPFVPKTRPVLDKSKPEQEDGAEESEEEDEEEDSEEEGDEEEDEEEEDVKPGGEEDNAQEDNKPKFNSPYKPKDNRAPPGSRPTFGTTGSGSPPTASGNVPYNPRNRPSNSANGNSTPSNRFGTTKRPRVVNRPPGVASPNLTLKPVASDYERTTPLTPLKPAPFIPSNNRSYERKYSGPSTEAAETASENSLIEDLNIDALNARNKKIFDKHSKKHPALKPKVVKVESETGLEVEAGTEVAVEDETTEEQQQEQGFVTTTPSTPPSPAPPSTQSDTATTTDTPPETETETETETETETETENVTEIETATNANEATSINSQDQTISSTTQAPPPATTLLHVFTLLEGEGQEEEPTTRKPTVRLYPTIQTEVVPKHKLIEINRIVEINSKQAKAAQRKSKANHDFSTLMVESLPHVEQLGEISVVKYVHLVDGSDIQINDGHSTVADYTPTEPTSAAERPVSLPVRNSLPETEGADTDRSGKSLVPEVLTAALETSTISLEGLFDSARKGKQLSSNTIIGETEESTTIGSSSSLASETGETTTPAPTYVRPIVPLLRPESNESSPLVISIANLDQVILSKVQKSLAENSQTTVAPEAASDSNSAFSVRQPLVVQAPISNGAQEIDQDTLNTQDQTINGAISVKTNPIIQTTTNRPNDDQVAEETTIFSIETATEPELNTQTTIPKTEANSETVTAMPIGAVIMGQFGLNTQSTTAVDNDNQLNAQTTSTISSGAVSSVAIGGNTQTANADNARQENTQSTGTITSEISSGAISSDNHNHIGTQTTATIDSSSETTPTQISTTISSGAISGHIDGSINLNTQTNTTISTNNTTTSTTDVGSKVSEAVSFSSETHVVHRKKMGRKGRGRRLRNRKTTTTTTTTETPTTTEATFDDTTTVVPE

SEQ ID NO: 2578 - DNA, 4570 bp, DROSOPHILA
ctcagagttccgtgaaaattgccaaggttgactgcacggcgccggagaacaagcaagtgtgcatcgaccagcaggtggagggctatccaactctcttcctttacaagaatggtcagcgccagaacgagtacgaaggcagccgctcactgccggagctgcaggcctatctgaagaagttcctcggccacgacgagctctaaagcatctgccggttcacagggaatcagcagtagtcgaatgatcaaataatcgcccgccaaattaattgtaatcgtaatttttctttctccagcataaacctctgtgaggagtccgcatttaatcaatatatccaacaacacccaaacgacaacgcgctagctgaaattgataaattcaatctgagttccttttacttttttttcgtttttgtccctcttccttagctgtttttgtagaattttttttatacttatttgtttagtgtttacgtaaatggggcacgggactgtgtgcgcgatgataagccatttagcgaacttacatttcaattttaaagtcattttgagtagcctacgttttaggaaaatttgtcaacacaaagctaataaatatcaattggaaaacaataggctgctgtttaaagtattttattattatctgtacaatatggtttatttgaataattgtttgggaaaaaccactatataatgttctgagaagagctaaaaaacagatgtttgtgggtttttcgaataaataggagtatgcaaatttttaagctgacttattggcgttctttaaatatttgtttaacacactttaaaatccatttagattttgatgccacttaatagtggagcagacaggtttttttgatttgaaattttagcagcgcgcgctgttgtcgataacaatttatcgattacagatctagtcgagtcatcgaaaacgggaagtttcaagtattttaatttgggctgccagatctacgtaatggataaatgtatttatatggcacttaattaaatgttgtgttatttttatctaaaattgcggaacccgggaaaatacaactgaaaatgaaattgcatttgtcggatccacaagaatacaattattacggatgcgacgaatccatccatatatcgcatatgaagtgccatcggtctgccctgctgtttgcaatccatgcctggcacactgctgctgcgatataaatcgtatcgtgtctgcatctgtctgtcgttgtttttgcatttgaagtgagactttttgccgtgtctttggctcgtccttacgaagccgtcccgtaggttgtccttgtgcacgttgtcagcgcagaacaaatccctagccgggtgccagtctatacctaatatccccgtttcccgatgaacgacaacggtaacggcggagcagcgccagtctccggtggagtgtgcggtgttggtggtgcgcacggagcggctggtggcgctgatggtgctggtggtgctggcggtggcggcggatgcggggctggcggtggaggtgctggtgcaggtccgggcgggggtcccgggggcggagcagctgctgcggacctggctggcgaggcagctggaggagcagcaggtggtgatgcagccattaataaccaagctaatgccaatggaaccagcgagagcccagcgaaaggacttaattctagcgaggatctggacgccaagcggcgcaagtgtcgcgaaacggaagaaggccaggatgaagccagcacggtgggtacaacgccaaaaatgtgatcttatttgccagattaccagccaagtgtgttatcaacatttattgattttgtccactatgagtggggactagctcagaccatagtattaagtcaagttgatcctgggagaatgtgccctaatcctgatcaaatcttacccatctagatgatcgatgcgaatagtgtgctcaataagatcgccaacctgtacgccgaacagctgatgtcggacatagtgctactggtggacggcaaggagtttcccgcccaccgcgtcatcctctgtgccagcagcgacgtctttcaggtgatgctaatgaatccggagtggaacgagtgcagcaagcacgtgatcgaattgcacgaggaagcctgctgttcggcggtgtttccgcagttcatcaagtacctatacgttggccaaatcgaggtcacgctgcagacggtgatgccaatgctggcgctgagcgacaagtacaatatacgcgacctgatcgatctctgcgtggactacatgaacaagcacgtggccaaggcggccaccagcgggttatcttgtgtcctggctgcaatatacgctctccttcacgcccacccacaacgatctcaccgaaacactcaagcggtttctcaaatggaacctcgagatggttgccgagtcgcgggactttgttgaaatggacccggccatactgatactgctgttgcagcagaacgatctggttgtcaccagcgagtacaaattgtttgacatcctgcagacgtggctgctgcatcgtcgcgaacagatggaggccactggcagtggcggtttcatggaactgatcgaacagactgtgtcccacatacgcttcggcatgatgacgccgcgccagctctcacacctgctaatggatccgctggtcgagtatcacaaagagttcctcgtcgagcgcattgccatcggcatgagctatcaatcgggccatgaggatcgggtgcgagaggtgcgagccaccgaatcgggtaagctgcagtttacgccgcggctatattggaacgacacctggagcgtcgacatcgatgtgcacaactttaccgcgatcgaggattataagaactatgtgacctgcttcttttcgcagcgacacattgccgagactgaggaggacggtaagtagtggccgatagctgacttcgattgatatacagaataagttaacgattacttaatcgccagatccctgcatgacatgggaaatcgagtttttcccgcgaggcgttaggtataacaaggccaaaatggtatggggcgaggacgtaccaggctgctctttgaacacagtgcgtctacgggttacctgcaagcatcaaaacatcggagaggagcgatttaaggtgattaagcggcaaccgtaatattctgttgggaatcaacgagtattggcgctagtttcccagtgtatttgtagtattttgtatttgtagttgtatattctttcatgggttattcctattttcagatcgccgtgctgatcgttggcatgcaaaaccagattatgcacatccgcacagttgtagagcgtacggagtacttctccgatacgtcgcgcgtcgtcaacctggacaacctgctgccgtacgaggagctggagcacacatcactgtacttgagtccccatctgacgggcaccgctcgcaacacgcttaccctgcacgtggtcatcacgccgatgggctcccacacctgccgagatacgccgccgtttcagttctaaaaaaaaaaaacacaaattatgaagcggtcctgtgggcatctcaactatagcactccgtacttcccggcgcatccacaggcacctcatgcatccacagccaccactgtatttcaaactaccatttaacatgtgtatgtatgtaaaaatccaatgcgactgcgaatcccatgggctcaacctttgcgatcttaactggcggtctacaccggcccccaatcgatcacaactcgattgcaatatgatttgttattagtttattgttttatattacactatttcctttaagttaggcgcagcgagagttactgagtgagtgagttcgtaggcagagccatattaaagtgattgattggacacgacgcccatttggtactgtattcaccttaccatttcgcagaattaccgcaaatgaaaatggactatggaaaggagtttttctaataaacgttaaactgtaaactaaaaaagaaaaccataaaatcgccgacgacatggctgagaaagagagagagggtcactatttggctatttgccatctcgtttgcatgaggcatcagttttaatgttttacagcgcccgcttaggcttttggatccctttttacgagtgcgtttatggcccgggatcaacatgtcgcgtctcgggggcctatctttatgtgtgctctactgtccatatagtctacagtgcggaacatcaaatatgtcatatttagatgggactctgggctctggtctccggatatccagatatccagatagccagatagccaagacataacgaatatacatgcacagatgtgtgaatcggttcaggtatcggccatcaatcgaattgatttaatcttggcgttaatgtagttgttaaataaaatgtctcttcaaaaatcagctgtggtctattattattatgcgttttcattagactgaactaaagagtgtagaattactgtcatttaacgatataatttagtgatttcggttttaattaaattattgcctaacgttgaccagtcattttgtaaaataacgtctctgagaaacctggaataaaggtgtgtaaaactata

SEQ ID NO: 2579 - DNA, 2207 bp, DROSOPHILA
ttaattaaatgttgtgttatttttatctaaaattgcggaacccgggaaaatacaactgaaaatgaaattgcatttgtcggatccacaagaatacaattattacggatgcgacgaatccatccatatatcgcatatgaagtgccatcggtctgccctgctgtttgcaatccatgcctggcacactgctgctgcgatataaatcgtatcgtgtctgcatctgtctgtcgttgtttttgcatttgaagtgagactttttgccgtgtctttggctcgtccttacgaagccgtcccgtaggttgtccttgtgcacgttgtcagcgcagaacaaatccctagccgggtgccagtctatacctaatatccccgtttcccgatgaacgacaacggtaacggcggagcagcgccagtctccggtggagtgtgcggtgttggtggtgcgcacggagcggctggtggcgctgatggtgctggtggtgctggcggtggcggcggatgcggggctggcggtggaggtgctggtgcaggtccgggcgggggtcccgggggcggagcagctgctgcggacctggctggcgaggcagctggaggagcagcaggtggtgatgcagccattaataaccaagctaatgccaatggaaccagcgagagcccagcgaaaggacttaattctagcgaggatctggacgccaagcggcgcaagtgtcgcgaaacggaagaaggccaggatgaagccagcacgatgatcgatgcgaatagtgtgctcaataagatcgccaacctgtacgccgaacagctgatgtcggacatagtgctactggtggacggcaaggagtttcccgcccaccgcgtcatcctctgtgccagcagcgacgtctttcaggtgatgctaatgaatccggagtggaacgagtgcagcaagcacgtgatcgaattgcacgaggaagcctgctgttcggcggtgtttccgcagttcatcaagtacctatacgttggccaaatcgaggtcacgctgcagacggtgatgccaatgctggcgctgagcgacaagtacaatatacgcgacctgatcgatctctgcgtggactacatgaacaagcacgtggccaaggcggccaccagcgggttatcttgtgtcctggctgcaatatacgctctccttcacgcccacccacaacgatctcaccgaaacactcaagcggtttctcaaatggaacctcgagatggttgccgagtcgcgggactttgttgaaatggacccggccatactgatactgctgttgcagcagaacgatctggttgtcaccagcgagtacaaattgtttgacatcctgcagacgtggctgctgcatcgtcgcgaacagatggaggccactggcagtggcggtttcatggaactgatcgaacagactgtgtcccacatacgcttcggcatgatgacgccgcgccagctctcacacctgctaatggatccgctggtcgagtatcacaaagagttcctcgtcgagcgcattgccatcggcatgagctatcaatcgggccatgaggatcgggtgcgagaggtgcgagccaccgaatcgggtaagctgcagtttacgccgcggctatattggaacgacacctggagcgtcgacatcgatgtgcacaactttaccgcgatcgaggattataagaactatgtgacctgcttcttttcgcagcgacacattgccgagactgaggaggacgatccctgcatgacatgggaaatcgagtttttcccgcgaggcgttaggtataacaaggccaaaatggtatggggcgaggacgtaccaggctgctctttgaacacagtgcgtctacgggttacctgcaagcatcaaaacatcggagaggagcgatttaagatcgccgtgctgatcgttggcatgcaaaaccagattatgcacatccgcacagttgtagagcgtacggagtacttctccgatacgtcgcgcgtcgtcaacctggacaacctgctgccgtacgaggagctggagcacacatcactgtacttgagtccccatctgacgggcaccgctcgcaacacgcttaccctgcacgtggtcatcacgccgatgggctcccacacctgccgagatacgccgccgtttcagttctaaaaaaaaaaaacacaaattatgaagcggtcctgtgggcatctcaactatagcactccgtacttcccggcg

SEQ ID NO: 2580 - protein, 291 aa, DROSOPHILA
MNDNGNGGAAPVSGGVCGVGGAHGAAGGADGAGGAGGGGGCGAGGGGAGAGPGGGPGGGAAAADLAGEAAGGAAGGDAAINNQANANGTSESPAKGLNSSEDLDAKRRKCRETEEGQDEASTMIDANSVLNKIANLYAEQLMSDIVLLVDGKEFPAHRVILCASSDVFQVMLMNPEWNECSKHVIELHEEACCSAVFPQFIKYLYVGQIEVTLQTVMPMLALSDKYNIRDLIDLCVDYMNKHVAKAATSGLSCVLAAIYALLHAHPQRSHRNTQAVSQMEPRDGCRVAGLC

SEQ ID NO: 2581 - DNA, 2264 bp, DROSOPHILA
ctgaggatagcgtggcgccatggtgtacatcgaccatagtgagtgcaattgacttgggtacacccttgaatttccatcacatttcgcattggcctaattccacagatgggcgcgtgtgggagaagcgtccgtgggactggcgacggattgtggagctatttgtcgggatatggtttgccattaagcagctgtaagtctaccactagactgcacgtcgtgccaaatagctaatgctgtatgatttcccccacagattcctaacattccttgctccctttacgggcaacaataaccaggccaatccgcgtcgcggaaatggatggggtggcggtggaggatggggcggcggcggcggaggtggtggcggcggtggaggaggaagacctggatcaggatcaggtggactaagaccaaaccgccggatcggccgcattcagccgactatgagctgcaatatgcccgctggaggcggatgaggatagtagcgacatccggttcccaagactcttgggaggatgtcgcgccgacagaaggctggtcgtgtatagcagcaccctgaatgacccagatatcacggtttatcccgcccatgtggcgcttatgacgcagttgtcttaaactcgaactcgagcgggcaattgctgattacgattaaccactgattcctgggtcgctgcttcgtggccgtcgtcggttccatttatcaactattagctccaatacatagctacaggtttttttctatcggtctgcgggtttatattcgttaatttacaattgcaaattcgaagtcacagtacccaaataggaatacatagttattctggtgaaatacataaataaataccaaccataacttttgcaaaagctctgttttaatgagttcataaaaaatgttttttaaattcaaaaatgtatttatttcaacatatgagactatcgacatcagcgtaggctatgcgatatttgttgtatcatcagctgctttgcttgtccatctctaaacaccacgtcaatttttttttttatacacaaacaaatcaaaatattcagcttcggcccagatctggaaatatttgaaagaaacaaaagatattgcatgctaatttagctttaaaatggcgtacgtcgatcaaagtaagtgcaagtgaatgagcatatgatctccagaatgctaagcccttcgttttgcagatggtcgtctgtgggagaaacgtccatgggacttgagacgagttttggacacattcgtgggtatatggttcgccgtcaaacagttgtgagtgctaaatgggtgttaagagcttaggattccttaacccatatccctcctttcaggcttgcatcgttcctgtctccattcactggaaatgatagcaacggagataactcccgtcgaggaaatggatggggaagtagtagctggggcggagggggcggtggtggtggcggcggaggcggtggcggcggaggcggtggcggaggcggaggcggtagcggttatcgcggaggtggattaaggcctaatcgacgaattgggcgcattccgcccccctcccaatcctgcaatgccggaggatgctgcggctgagctgcttaaccaaaatgctccaataaataatccaactcacctctgtgatgcggcaattaaaatagataggtttttgtttaccgtttatattaaagctatgttttagtcataatgattttgattaattgagaaaattcaaaatatgcaatcatacatacaatgcaatacaatacatacatacaatcatacaaacaataaactttttaatatccgaacttacaatgaatcgtactttcagatgcttttgacttatttttgcaacaatttctctatttctattttcaataattaaccacccctttcacttttcaattgattttgtaaaattaatttttggccaaaattttcgcattttttgtaaggggtaccatcatcaaaatttgcaaaaaaatgaaaaatcctagaattcccaaacttgaatgcaaatcgattggaatttaaaaaacaaactcaacgatgtatgacattccatatttgagtcattattttcaatgttttgatcaaaataccgaatatttttttcacaaaaaatctggaaactacttttggcaaaaaactcaattttcaagttggcttttttggctataacttgtctaaaaatggtcacagagcaaaaagaattaccattttatactccttatgaccaatactaacaaccccctatcactttaaa

SEQ ID NO: 2582 - DNA, 659 bp, DROSOPHILA
ctaaacaccacgtcaatttttttttttatacacaaacaaatcaaaatattcagcttcggcccagatctggaaatatttgaaagaaacaaaagatattgcatgctaatttagctttaaaatggcgtacgtcgatcaaaatggtcgtctgtgggagaaacgtccatgggacttgagacgagttttggacacattcgtgggtatatggttcgccgtcaaacagttgcttgcatcgttcctgtctccattcactggaaatgatagcaacggagataactcccgtcgaggaaatggatggggaagtagtagctggggcggagggggcggtggtggtggcggcggaggcggtggcggcggaggcggtggcggaggcggaggcggtagcggttatcgcggaggtggattaaggcctaatcgacgaattgggcgcattccgcccccctcccaatcctgcaatgccggaggatgctgcggctgagctgcttaaccaaaatgctccaataaataatccaactcacctctgtgatgcggcaattaaaatagataggtttttgtttaccgtttatattaaagctatgttttagtcataatgattttgattaattgagaaaattcaaaatatgcaatcatacatacaatgcaatacaatacatacatacaat

SEQ ID NO: 2583 - protein, 118 aa, DROSOPHILA
MAYVDQNGRLWEKRPWDLRRVLDTFVGIWFAVKQLLASFLSPFTGNDSNGDNSRRGNGWGSSSWGGGGGGGGGGGGGGGGGGGGGGGSGYRGGGLRPNRRIGRIPPPSQSCNAGGCCG

SEQ ID NO: 2584 - DNA, 2776 bp, DROSOPHILA
actcttcctacagaaagttcttccaaccaaattcaagctgataatgattctacagttttctggaaaagtgtagtgcagggggaatgccaaaatccgagggagacctgccagaagcattaaccttgacggaatacagacaatccctgggtggcagacgcatgtttgacgggggagaacgggttaacatgttggcggcaaaggtaaaggtcaagttgctcccgcagattgttgacaaaccaaagtgcgaaccgaatgctcgtatagaattctctctgtaggaacgaaaccagttttggcatgtgtataatgaaacacccataaaataaaggtgggaggaactagtccaagacacgcgaatcggttgaaagaacatctattcccaaaaattctgaataccggatgacgatggtgatgatgacgatgatgatggtggtggtggcctttctgatgatgatgatgatgcactacaccttcaattctgtctatgtggacatttctatttttagcaaactgcagtggccgaaaataaacggaaggcctgccgccggtggaccattgaaatactatagctatggaatatcgagattttggttaggaacaagctgttagtatagctggctatgccctgccaacgtgataattccaaacccatatatcttttctggtctctcacctggatttgttgtcgttgactttagctggtgttcactgtagttgacatacccactgcccctccaatcccgcctcccgcgcactccactcgattcgcactgccgacaacaattattaaggagaccgccagcgaggcttgtttttaataaatttacttaaacgccacaagcgaaccgtccgaggccagtgttgccagatgcattacattattcaatcagctgttgattgggttattcgctttgcgtttaccaacaccaaattatctatcgataggtacatgcttatggtgaacaataccaatgacttgacattgcagctggtccatctctagtagcatgttgagatatttgttgaacctaaaacacccgtaagaaacatatctccgtaaaactgtgcaataaatcgagggtggctggagcttccctgaggatagcgtggcgccatggtgtacatcgaccatagtgagtgcaattgacttgggtacacccttgaatttccatcacatttcgcattggcctaattccacagatgggcgcgtgtgggagaagcgtccgtgggactggcgacggattgtggagctatttgtcgggatatggtttgccattaagcagctgtaagtctaccactagactgcacgtcgtgccaaatagctaatgctgtatgatttcccccacagattcctaacattccttgctccctttacgggcaacaataaccaggccaatccgcgtcgcggaaatggatggggtggcggtggaggatggggcggcggcggcggaggtggtggcggcggtggaggaggaagacctggatcaggatcaggtggactaagaccaaaccgccggatcggccgcattcagccgactatgagctgcaatatgcccgctggaggcggatgaggatagtagcgacatccggttcccaagactcttgggaggatgtcgcgccgacagaaggctggtcgtgtatagcagcaccctgaatgacccagatatcacggtttatcccgcccatgtggcgcttatgacgcagttgtcttaaactcgaactcgagcgggcaattgctgattacgattaaccactgattcctgggtcgctgcttcgtggccgtcgtcggttccatttatcaactattagctccaatacatagctacaggtttttttctatcggtctgcgggtttatattcgttaatttacaattgcaaattcgaagtcacagtacccaaataggaatacatagttattctggtgaaatacataaataaataccaaccataacttttgcaaaagctctgttttaatgagttcataaaaaatgttttttaaattcaaaaatgtatttatttcaacatatgagactatcgacatcagcgtaggctatgcgatatttgttgtatcatcagctgctttgcttgtccatctctaaacaccacgtcaatttttttttttatacacaaacaaatcaaaatattcagcttcggcccagatctggaaatatttgaaagaaacaaaagatattgcatgctaatttagctttaaaatggcgtacgtcgatcaaagtaagtgcaagtgaatgagcatatgatctccagaatgctaagcccttcgttttgcagatggtcgtctgtgggagaaacgtccatgggacttgagacgagttttggacacattcgtgggtatatggttcgccgtcaaacagttgtgagtgctaaatgggtgttaagagcttaggattccttaacccatatccctcctttcaggcttgcatcgttcctgtctccattcactggaaatgatagcaacggagataactcccgtcgaggaaatggatggggaagtagtagctggggcggagggggcggtggtggtggcggcggaggcggtggcggcggaggcggtggcggaggcggaggcggtagcggttatcgcggaggtggattaaggcctaatcgacgaattgggcgcattccgcccccctcccaatcctgcaatgccggaggatgctgcggctgagctgcttaaccaaaatgctccaataaataatccaactcacctctgtgatgcggcaattaaaatagataggtttttgtttaccgtttatat

SEQ ID NO: 2585 - DNA, 646 bp, DROSOPHILA
tagtagcatgttgagatatttgttgaacctaaaacacccgtaagaaacatatctccgtaaaactgtgcaataaatcgagggtggctggagcttccctgaggatagcgtggcgccatggtgtacatcgaccataatgggcgcgtgtgggagaagcgtccgtgggactggcgacggattgtggagctatttgtcgggatatggtttgccattaagcagctattcctaacattccttgctccctttacgggcaacaataaccaggccaatccgcgtcgcggaaatggatggggtggcggtggaggatggggcggcggcggcggaggtggtggcggcggtggaggaggaagacctggatcaggatcaggtggactaagaccaaaccgccggatcggccgcattcagccgactatgagctgcaatatgcccgctggaggcggatgaggatagtagcgacatccggttcccaagactcttgggaggatgtcgcgccgacagaaggctggtcgtgtatagcagcaccctgaatgacccagatatcacggtttatcccgcccatgtggcgcttatgacgcagttgtcttaaactcgaactcgagcgggcaattgctgattacgattaaccactgattcctgggtcgctgcttcg

SEQ ID NO: 2586 - protein, 108 aa, DROSOPHILA
MVYIDHNGRVWEKRPWDWRRIVELFVGIWFAIKQLFLTFLAPFTGNNNQANPRRGNGWGGGGGWGGGGGGGGGGGGGRPGSGSGGLRPNRRIGRIQPTMSCNMPAGGG

SEQ ID NO: 2587 - DNA, 4197 bp, DROSOPHILA
atttttctttctggtaagaagattttgtatactgcttatatattttaaggtgcttttcccatgaatttggcaagactgaacggtgatttttaaatggcgttcaaagaatttcgccacttttcacactggactctggtcgagtaatttatcgcttactttgcggctgttgtttttattaatgagtgcagcatggaagaccgaatgccgagcatttttcctcactaggtgggctatcctgtccgctccttgttgctgcaagtgcagaatttgtttgtttatttgtttgttttgttagccagcagccgcgccataaactattttgcacttttcgcaatatttcagccagctgcatgttggtgtgtgtgtcgtggcactttccgaattgtagagcggaatatttcatacacagacaacacacacatgcccacttgtaaatgcaaaacaccaccgaatattgtaaataaaagtgaacaaatattgcacagcaatagaaataaaatgggtgacaccaaaagagggacacacaggcggcaagacgccagcggcaactgcgactgcccccggcattgtccgcatttaaatatttgcacaacatttgaatgctttcccattttgcatttgttgaaatgcaaactcgtcccgagcgaaacacatgcccttctgctccagtgatttgtccattaacccgacaatgggcgagcaaaaaccaaaacaaaacaaacgggacttataatcaaaaggccgaactaacagataccgagcactgacttttcaaatccgctttttaattctcttttttcatttcaatgtagacgaacaactttaaaagaattctcctcacacttagctttactttttgaatattttcatacattaaaatgaacatcaaatgaaatgagcatgttctatactactggaacacctcgaattccgaggagtatcatacttaatagtgtaaaatacgagcagcttgtgctcattgtgcgatcttcagcttaatttaacttacatcaacattaatgccggcaacggcgaagacaaatgtgggcttggcctcgcgtggaacgtagcggtagaactcctcctgtccgaagtaccagcgtaccgcgtaaagcgccgcctgcgaaggaacggaaggaaaatgcgttaatgaaaagcttgagtggtgaatagtcgaggagctgtggcagccgaaggagccgagcggaaggagcagccaggacaataggcgacgggcggcaggaggcagaagactgctggagcgacggcgtcgacggcaagacaaagtgcaagtaattataataattaagcatgccgccgacgacaatatcctccgtattgttgacttggctgctgttccccgcgagtatacctggaggaagtgtcgcttacctgctccaaatcgtattgacaagacaatgtcgctgcatttcccattaatacggcctctggtacaaatatcttcaggtccttcaggcagtgagctgaaagagtgcggtggcattaatattaaagacagtcccaaaagtcgtttaaccgtagaatctcccgaatgacttgtcccacatgtcgtatacgcaaccgtacgaattcgattttcgggggccaacgggaaacggaaaggcggtctacactgggcataaaaaaaaaagaaataccgaaaaacccaattacccaaccgggcggcaaaggaatggtatcagacatgaactaccggcaactccacttccatgttaatttatgacaatgtcgagggtacggcccaaaaatttaacttgcattaaatgcaatttatttattttattccatttcgtttcgatttcgatttgcaattttcgtttgaaccggctgaatagcgcaattcaacgcgagttgccgcaactatcaacattaaacatggctcattcgaatcaattggaaatttaaaaataaattccaataaagagatgtgccaatatgattattccataagcacaaaacgttaaattaatttacgtgaagagcagaaaatgttttatttgccattgagatatgcaattaaagttaaataatttttttaaggttttaatacgtttaaatgctcctttaattgccaatgatgaaatcgtacacatttacagatatggccttaaaagaatttccacacatcattttaggtatagcaaatatctgcatgtggaatgatcttattaattttacttggaacattattcaattacaaggtgaggtaccctaattaaatttcggggtgttcttcttacccacttatatacttaatgtgatctatacatttatttaaatgaataaagataaattcaactaaatgagtaaaagttcggacctaaatgtatatttcgagatcgcgggaaacacaatttgttaatcaaaccgagcacttgattaagtgccggctcagagcgaatgaaaatatattaaaatgttttaatattcattgtcttcttatcctgactcataaaagcccatgataaatatgtagtttcggtctggaagggtagtgtactcaataaatgacctgtcctcgcaacggttcatacacatgtcattcgaaaagttttcatcgatttgtgggatcggcgggatggcgacggaaacaagtggagtgacaggcatgtggttggccaaattatggcaactttaattgaacaaaccaatattaatcaaaggccaatgctcgcccattcccgggccatttaataaattgactacttcaccgccgttcagcggaagagttggttttttgcttggtcaatgggtggatgaatgggtggttcagtccataatatatgtgtataaacagttatttggtagattaaataatcaattttaaccacggcccgcaacacgcagttggcataataaattcagcttgtttaacatgacagactgcctcaagtggtggggaattcggaaacggatggggatgaggaagaggaagccctgcaatatgccatttatatgtgggtcgtttgaacacttaccactgagcaataactctgagattataatccagctcaacgccagcatattgaatgccgtatgcaaggctcccggtcggcaggcgctgctcattcttcgtccttttcgtccttcttctggccggctccgtatcctttggctggccatgtctgtttgttgccgctatagtcgcaatatctgctgctgctcctgttgctgctgtaaaaagagttgcagtgcatgagaaaaagtttgaagcaccatataatcatatttgagatgatgctttcaggcttattgataactggctggctacttgtcaaagtttcagcagtagcagcaaattgaaatgttgctcttccatctagcgccatcatcagtctatttatccgctctctcagtgcgctttgtttctgtctatatctctgcactttgtaccacggagtacattctatgtcctatatgtgtcccccttctgccgtttgacaactttctaaggctttcaatgacacgcgtccgtaagtttcaacagctcgacgtgcttaaaaagtttgcaacaagacaaaaacctttaactaaacagcacacaacaggcgcttctctgtgcgtgtgagccaaatggcattaagcatacgcagcgttcgcccagacgagaccaaaccagaccaccccagagcagacagatgcatcagaacacacactgattgacagctgggggctttatttggcatacaggagactgaggcggtgcgtctgggacaactgaaatagattggatatgtgaacagtggacagttctggagaggagggatctcgagaacagggtggatactagtgaccaaaacattgaaaacaattgtcagttgctggttgcatttgtaacttggctgacaggacaagacgtctgcgtcgtgtatcaattagaccgcaaaatcagcaagaccaattgtttggcttccatttggccgcaaaaacagaagctaatggtcaaaagttacaaatggcccgcaagcatacactgcacatacagatacagatacagatacagaagcggagatactgcggtacagaccaggatattttgataatgatatcatcacatcaacgcattaactcaaggcgccctaagcacataagcctgggtcggggcttatatgtcatttactgcatcgtcttacggtcgagtgcgcagagcgttttgcttccaattttgaatggcaa

SEQ ID NO: 2588 - DNA, 410 bp, DROSOPHILA
agcagcaacaggagcagcagcagatattgcgactatagcggcaacaaacagacatggccagccaaaggatacggagccggccagaagaaggacgaaaaggacgaagaatgagcagcgcctgccgaccgggagccttgcatacggcattcaatatgctggcgttgagctggattataatctcagagttattgctcagtgctcactgcctgaaggacctgaagatatttgtaccagaggccgtattaatgggaaatgcagcgacattgtcttgtcaatacgatttggagcaggcggcgctttacgcggtacgctggtacttcggacaggaggagttctaccgctacgttccacgcgaggccaagcccacatttgtcttcgccgttgccggcattaatgttgatgtaagttaa

SEQ ID NO: 2589 - protein, 118 aa, DROSOPHILA
MASQRIRSRPEEGRKGRRMSSACRPGALHTAFNMLALSWIIISELLLSAHCLKDLKIFVPEAVLMGNAATLSCQYDLEQAALYAVRWYFGQEEFYRYVPREAKPTFVFAVAGINVDVS

SEQ ID NO: 2590 - DNA, 4867 bp, DROSOPHILA
tgagtcctggctacgaaatcgagttagttatgccaattaatgcggcaattgtcgaaaagcgagctcctgccgactcaacgatgttccctaatcaccaataatccgcattaattgccatcaatttgggctttggccatgtccatgtcctgcggtcagcagatgtccttcaattttcgaggaccaccagcggacagattgttaaaatatttcagggttttaaaaaatcactacgatttctctctgtatgagcaagaatcactggtccaatgtcagcagaaaatattatggatacaatatttcctgttgcttatatctctgttcgcatttgtatctaaccaactcaaaactagatggttcttcaaaatatcaaaatacctgagtactaaattaatgggaaaacctaagtaaaatcagatcccatcgatcgtgataagctattctaaatcgaatcgttggggttactcaacgattgttttgattgattagaaaagagattatttgatgaaagtgccagacacttggatttcccccccagctaagaaccacaaatagttgttatcgctaatgctcggagataagttaaaatgaaaatattaattcgcggttgggttttccaattgttttggtctgataattttatttagattctcagtatgtgaggcaattcacggtcgcattttataatcatttaattttcgatttctgctggcctgctggccaactgtgataggaagttcattttttgaaagggtaaatccaaattaaaataggcgttttagttcattaaggtggaatcctaaaaagttagaatctaagaaatattatggaaactttaattaaaagaaaaaatggcttttcattttgattcagggattggatagttttcaaatgtttcgtagttaagctgaaagggatttcctaaaagtatcgggaaaaccttttgagaaatgaaaacaaatacttcatatttttgtaaatactttttgtgtgtgatttttgttttttatttggttttgtttcaaattcgatttttgtgttagatctcttttcgcgctaaaacttatggctagacaaaaaaattgatttctcgcttagacgactagttaaacataatgattaaaaatagctaaattcgcatattatccatcgaaaaaaataggttctcaaaaaaaaaaagttatgagtgttacaactagttagctatgtacaaattgtgttgttgttgttttgtgttgaaatgaaattgaactaaagtttgctttcttggtattttctttttgggctgagtttttgagttttcgtgttttctgctgggatttgtaaaaaatcctggtgaaaatcgagggcctgtgattcaaactcgtcgcacgattttatgagtccgagcataaaacttcgccggagtctgatttccaggattggggtcctttgtcctatatccattatccattatcctctatccataacttttgctcagctagttgatgctgctgctcccgctgccgtttatccttctatcccactgatgaggctgctccgtttgccggccggaggcgtcgtaacttataacactatatcacaattataatttttgcccgcttgccgctctgcgtcgccgctgttatatcactttgttttcttcattcctccagatttttggggatcagatgccctagtagggccgccacacggtcttctgctgcacggcggcgctcttgatcttggtggtcgtttccggcgacggctggcggctgttggctaccgctccaggaccgctctcgtggtagagcggcttcatggccgagggcgccttcaggtcgcagcgcatgcgaagtggcgccacatccaggctcttgtccaggtcgaactccgatttgaccacgtcgatctgctcgtcgtcggagtcgccgtcactggcggactgctcgtggatggagctcgtctcgatggaggtgtttagcttcagcaggacgtgttgctgggtgggcgaggagctggagggcctggaggaggcggggctgacgtggaccggctcgctctggtggtgcagggcagcattgcgggcccgcaagccagctgccgcggcaaagttatacggatggaaggcgtgtggcgtggctgccttggcggcggctgcggcggccacatggttgaatgggaactgcggaatggcatagggcgtggcaggcgccgctcccggtggcgatggcatcatggccgccggttgtcccgccgccgctgccactgctgccgccggatggggatactcagatggctgaaccgccgacgaggagctggtggccaccgatggattgggatttggcgacaccgaggaagccgaggacttggccagtgccggatgatgcacctgggccgcctgggcggctgcctggtggcggaagtagtccgcatagccgtaggtcatgtacgccgcatccagccaagcgggattcagcatgaacgggttaaacgcgccgggatggggatagccatagcctggaaggataaagaaaaagggcgggaagtcagtaaagcacaactcgtatttcatcggaatgcgtttttaaaaaggttggggggatggtgggggattttggttggcggcaatggatctcaagatccttggatatgtgtatcaaaaccgaattgcaaaaggataagcaaaaataatgataaaatctttaagataaagtgatcaatgcaatcatttcaaaacagactgatcatttaaagttgagcttaaaaatggcattagttatttaagatcataactagttagtgttggcaaatgttttcaaaactatgaatattgtaattgaagatatgcaaacggtttctgaattggttttttggggatctttgggagtggattaaactgaaaacataatggaaactaaaaaactcactttgcttacttcttggctcccgtggcccgtcgacggtcaccttgatggctttgctgtagctggcgatctgcaccggataggtggcaatggtgatggtcagcgtgaaggacttgccgcgtcccgatcgtcccacgaagcgcagatcgttgaacttggccacctggttcttcatggtcgtggtgcagttcctcagctcgccgcagtagttttcgtcgttgccgcacttgatggacaccagggtgccatcgggcacgtcgtccagggcgatcaccttgaaggctccgggcagcgacttgttcgaccgccagtgattgggcagggcgctgcagaggatcgagggcgatccggtctgggccagctcgccgtgatactcctgcagcatctcgtgcaggctggcgaacatgtcggtcatcgagctgggcatcttggcggagttctgcggactggtggtggcgttgctgctcgagctggtgttgttcgtgctgagatctggtgtggagctgcccgtgctgctggccgagtgggtgctcgtgttggccagactctgggcgggattgatggcgattgcggaggcggtggtggcattgctactctgctgcggcccaggaccctgggctaccgcggccgctgcggcggctgctgcggcggcggcagcggccaggacctgtgtgttgttggccaccatcgttggacccgctggcagatgcatctcgtatccgaatgtggaaatcgtagccgtaatcctggggctgtcgacaattgccggttttctattgcggattctcggtatgcacttcactttatcgggggtcacttggaaaaaattcgtttgtttgttgttattggattgtttcgcgatttcgaactctgcttctttcgagcctgtttctgttttccaaagtcgaaaacgatatatttctctgtgcgttctcgacacgctaaagtcgctgagtgaactgattctctgctgcgatcgttggcagtatttaaagtggaatgcgctgctcgccgcctctgtcgacggctctgccggcgtttgtgccccgtcccacttgcacggcgctagcgccgtctctttcccgcccattatcctgggcggtatggtggtgtggttggctacctacgcacacaggcgcgcctttaagggtgccggggcaggtatatatcggtatatcgagcaaccaccattgccgccgcaacaacaaccacagcaaaaaatttcccatttttccattgcggtctctctgtgtgtttgtgtgtgtgtgtgtgtttggctgtcgtgttagtgtgcctgtgtacgtgagagagaagtcgcttgttacttgtggccaaaaaggaaaaaataacagcggaaaaaaggaaaatcgcatgggcgagagcgagaaagagagagagagagtgatggcctggaaattgcaccaaagaaaaactcaaaaaagaaatacaccgagacttttccactctctcgctctggctctcgcttcctctctcgcttttccccacgggcggtctggaaattgtgtgcgttttccttttcttcgctttgaattttattttttcgccacgcacgccaaaagaaaaacggccgtgcaacagtttcccattttccacttccagcggcgcgcgtgttttggcggccctcctgcggaggggttcgtcgaggggggcgggggcgggtggtacaggtaggcacccatggccaaacggggggttcccttcaccatctccttctcgttcccttgccttccctttcccgagtagctaggatgccaggggcgtcctgccgacaggacatgaggactcaattagtcagtgcgaggagggatcaggttgcgaaattatcataaatattatcacaagcatcaggagagctatatcactatgactttgggataaaaggatttaagccttttaatttcatgggtgatacgattgtggagtttggaaaattttggaacatg

SEQ ID NO: 2591 - DNA, 2457 bp, DROSOPHILA
atcagttcactcagcgactttagcgtgtcgagaacgcacagagaaatatatcgttttcgactttggaaaacagaaacaggctcgaaagaagcagagttcgaaatcgcgaaacaatccaataacaacaaacaaacgaattttttccaagtgacccccgataaagtgaagtgcataccgagaatccgcaatagaaaaccggcaattgtcgacagccccaggattacggctacgatttccacattcggatacgagatgcatctgccagcgggtccaacgatggtggccaacaacacacaggtcctggccgctgccgccgccgcagcagccgccgcagcggccgcggtagcccagggtcctgggccgcagcagagtagcaatgccaccaccgcctccgcaatcgccatcaatcccgcccagagtctggccaacacgagcacccactcggccagcagcacgggcagctccacaccagatctcagcacgaacaacaccagctcgagcagcaacgccaccaccagtccgcagaactccgccaagatgcccagctcgatgaccgacatgttcgccagcctgcacgagatgctgcaggagtatcacggcgagctggcccagaccggatcgccctcgatcctctgcagcgccctgcccaatcactggcggtcgaacaagtcgctgcccggagccttcaaggtgatcgccctggacgacgtgcccgatggcaccctggtgtccatcaagtgcggcaacgacgaaaactactgcggcgagctgaggaactgcaccacgaccatgaagaaccaggtggccaagttcaacgatctgcgcttcgtgggacgatcgggacgcggcaagtccttcacgctgaccatcaccattgccacctatccggtgcagatcgccagctacagcaaagccatcaaggtgaccgtcgacgggccacgggagccaagaagtaagcaaagctatggctatccccatcccggcgcgtttaacccgttcatgctgaatcccgcttggctggatgcggcgtacatgacctacggctatgcggactacttccgccaccaggcagccgcccaggcggcccaggtgcatcatccggcactggccaagtcctcggcttcctcggtgtcgccaaatcccaatccatcggtggccaccagctcctcgtcggcggttcagccatctgagtatccccatccggcggcagcagtggcagcggcggcgggacaaccggcggccatgatgccatcgccaccgggagcggcgcctgccacgccctatgccattccgcagttcccattcaaccatgtggccgccgcagccgccgccaaggcagccacgccacacgccttccatccgtataactttgccgcggcagctggcttgcgggcccgcaatgctgccctgcaccaccagagcgagccggtccacgtcagccccgcctcctccaggccctccagctcctcgcccacccagcaacacgtcctgctgaagctaaacacctccatcgagacgagctccatccacgagcagtccgccagtgacggcgactccgacgacgagcagatcgacgtggtcaaatcggagttcgacctggacaagagcctggatgtggcgccacttcgcatgcgctgcgacctgaaggcgccctcggccatgaagccgctctaccacgagagcggtcctggagcggtagccaacagccgccagccgtcgccggaaacgaccaccaagatcaagagcgccgccgtgcagcagaagaccgtgtggcggccctactagggcatctgatccccaaaaatctggaggaatgaagaaaacaaagtgatataacagcggcgacgcagagcggcaagcgggcaaaaattataattgtgatatagtgttataagttacgacgcctccggccggcaaacggagcagcctcatcagtgggatagaaggataaacggcagcgggagcagcagcatcaactagctgagcaaaagttatggatagaggataatggataatggatataggacaaaggaccccaatcctggaaatcagactccggcgaagttttatgctcggactcataaaatcgtgcgacgagtttgaatcacaggccctcgattttcaccaggattttttacaaatcccagcagaaaacacgaaaactcaaaaactcagcccaaaaagaaaataccaagaaagcaaactttagttcaatttcatttcaacacaaaacaacaacaacacaatttgtacatagctaactagttgtaacactcataactttttttttttgagaacctatttttttcgatggataatatgcgaatttagctatttttaatcattatgtttaactagtcgtctaagcgagaaatcaatttttttgtctagccataagttttagcgcgaaaagagatctaacacaaaaatcgaatttgaaacaaaaccaaataaaaa

SEQ ID NO: 2592 - protein, 510 aa, DROSOPHILA
MHLPAGPTMVANNTQVLAAAAAAAAAAAAAVAQGPGPQQSSNATTASAIAINPAQSLANTSTHSASSTGSSTPDLSTNNTSSSSNATTSPQNSAKMPSSMTDMFASLHEMLQEYHGELAQTGSPSILCSALPNHWRSNKSLPGAFKVIALDDVPDGTLVSIKCGNDENYCGELRNCTTTMKNQVAKFNDLRFVGRSGRGKSFTLTITIATYPVQIASYSKAIKVTVDGPREPRSKQSYGYPHPGAFNPFMLNPAWLDAAYMTYGYADYFRHQAAAQAAQVHHPALAKSSASSVSPNPNPSVATSSSSAVQPSEYPHPAAAVAAAAGQPAAMMPSPPGAAPATPYAIPQFPFNHVAAAAAAKAATPHAFHPYNFAAAAGLRARNAALHHQSEPVHVSPASSRPSSSSPTQQHVLLKLNTSIETSSIHEQSASDGDSDDEQIDVVKSEFDLDKSLDVAPLRMRCDLKAPSAMKPLYHESGPGAVANSRQPSPETTTKIKSAAVQQKTVWRPY

SEQ ID NO: 2593 - DNA, 21667 bp, DROSOPHILA
agctgacgtcttttgcaacccgactgtgaaatacatttatttattagaccctcttaatttctttgtttattcgtcattgttgaccaatgacacgtacgcggtccgtctgtgtgtgagaatgtgctttttattatttattaactttatgggatgtccactgcactactgacccattccaatcagcaccccgtttgcaagcagaaggcgctgattggaaaacaccaattgcagtgcaattgctgataagaacatttaaagttctgattgaatagtaaaagagcaaaaacgaagcgcaacatttatcaattcgtctctttagtttgacaagagatcttaaaacatttgctatttataattttacatttataaataacttattgcaggataactcctgagaacattgtcattattttatcattacattcctaaaaagctaacatggggaaaaatacaaatgaaatttaaactatggcgcttgttttgatactgcgatttagatggctgccacatagtttgactttgccacccgtggagctgaagtgactggaaatatatctttaacaacttaaagttgcctaactagtgcaattatgcgcttcaataatgttttaaaaatagtagaaattgggacagcgctgccaataacttcgaaaatttaaaggcaatccagtggcaccactggcaagcgagtaggtacaggtggcacctctaccagtcgagtttgcacaggtggcaccactagcaagcgagttggctcgattaatgttacttgatttactatcgactatgctacttgatttaaaggtattatatgaaaaaactttcatttcaagtttgaagcattttttcttttagctaggtaaaaactaaccgactacagaataaccatttacatatcttagactcaaacgctctgacaaaagagcgcctaacgggaggccaaatgccgttcaccaaaaagcatatatgacgtgggcatttttcggctgactcgcggctggtcacactgccgggcaaccgaatcgaaaaaacggcgattcgacatttttgtgcgagtgtaaggttcgattccgatctggctggttgtctgacggacgtgctgcgtctattttgttgtgtttttttgcgaacgagcgaagagcgacaggacctctgcgcccgtattcaaagtaataagcgattcgatagccaaattaaaattgtgtgcttgtttctcgtgtatcttgtggtgtttgtgcgatccaaatcgagtggtcaacttacattccctttcatccttttcgtggtttatttttttttgcaagtgccggaaaaattcgaattggttgttcatcaatatacaacagttaactgtatagtaaagtaagaaatggtccactgttgtcgttgtttttaaaaggtgtaaagtaagagtaaatgaatataaaaggcgcaacgagaatttcttgaatcatgttcaaataagcataagcaagcattcgattaatttacatgcgcgcatgtgtgcaatcccaaggactttgggaacaagaagaaccgcgcgcacaaggagcatgcgaagcaacagggaaaaatcataaacgacagaaattgctgcccttttatttgatttttgtgttatgtttttttttttgatgattttgagttcgctgtcgcagcaataatataagaattacaaacacacagacgcaagtgatatacgaccaccactagagatcgcacacacacacgcaacacttaggcacacatagggagatagagtgagagaaggaggaaaggaaggacggaaaggaagggacgaagcgcaagcttatcttttcgcttttcgagaacgcgaacgaagacgataaaagcaaagcaaacaacgcacacacgtaaataaaacagacatcggctgtttaacaaacacacacatgtgtatatcaaaaaagggacaaagcaaagcgaagaatatcagcctttggttcttctttcctttgcacatgtgcctggaaaatatccttacgaacacactcccatacgcatacgcatacgaacgacaagcacgtgaaatttttgttcccttgctctttgcccttctctcttctgccctcgtgcatcgctctctcacttccattattcgtcgctaatcaaacgctctcttcactcttttagctgatttttttttattgttgcaatgcaatattcgcggaacgaataacaacaacatacataactcaatattcaagtgcaaagcaaatacaaatcaaacacaaaagaaaaagcaacgaaataaagatatatagaaaagaaaaacaaaacgaaaaaattcgcacattttttctgtcttgtccagtggaaaatacaacaaataaacaacaacggctaaatcaagttaacaatctgttcaaaaccaatcaacaaaatgtctgctgatattctgcagaaatcaagagagcaggatgattcgcactacttcgagcgtggcgatatatccaaatacgtaacggtaagtttcccaaaattctcaaaaactacgttttcctccgtttttaactgttcggtcattatattcttgttcttgtgttttttttttctcaaaattcggtattgtttaaagtgttatttttcaagatgtggttttacccagagttatgaatgaaattgaataaatatgccatgactaatttacaaaactaattcaataggtctcttatgttgtttttatattgcatgcagatgtgcgcatatgcatttttgtcttggtatttgggcttccaagaaatttagtaaaactcaaattgctaattcactaaaaaaaaaagtcaagcacttggtaagcaaaattagagaagctccatatagattgagtgaaaagaaaacttaaaatattttccagtcaacttaaaacatgcctaaaccacatgtttttttttggtttattcatttcggcagttgcattttgcgccgcatttgtgtcgcattgttaaaggcaatatgtgcatcgtttgcttaatttcgataacttgttttccatttttcacttcgttatatttccgttttgttacacttgtatttgttgtttgttattccccattataaagctgattcataattatactttcggtttgtcaactcacaaaaaacagcaacaaatagagagtgtgtgtgtgtgatggtggtgaaaaatgaaaataagcgacagactataaagtggactaaataattctctgataaggatttgtgataagtgtattggagaagggggcggggcatccttgcatatcactctctcccacccgctctttctccctctcgatccgctcccttacgctgtgcaccttctctttttgtcccttctcttcgtatttatttgttacaattggcgtcatcgcagcagcatcattaaaagcagcagcaacaacagcaataacaccactcgtgatcatttactgtttgtatatacatacgtatgtatgtgtgtggtgcatgtgtgcgtgttgctggcagcgacgttggcagcgcagctgttgatcgacaacaaattcgattaactcaagttccgggtttgctttggatggatttttgtgtttttaatgatttctgttgttttatttatacatattatttcgttcatttgttttttttgggtttattgattgctctcggatgagttaagtttttaatattttttttatgttcaaaagctctgctgcagcgattacgtgaaaagttttgcggtttttcgtgtaaaaacgagaggggagcaaagtaagagacagatggagcagtgttgggctcacttttgttttgattttcttgttcttgtgcctgcgcttttttttcgcaaatttgcgtaaactaaaatgcaaagccaaagggtcaagtagagtcatagaaaggaaaaaataacattgagcaaggagaaaaacaacaaacataataaaaatagggccaagccaggttgacgtccgataaagttgcaaatgcttgttgaatgaactttgcaatcgattatcgataggcaatcagcaacgattcgcactgaaaattgtttgatatatttttgttgtcattatgcagcagtttttagccacaaaggcaacaacaaattgctgcagaaagcgaaagggcaccacaaacactttcaagcaaacacaggcaaataggaaatgctgccgcgcaacttttttattaggcgacaaaattgttgcaactccttctttgcaactcttttataagattatgaaagatatttgcataaggaaattatattttttaaatcaatttcattttttaactcgtctttgtttcggctataagttaaaatatgaacgaaaaacaataatgtcacaatctttgcttttgaatttataaaaacattttggttttggcttttgttacatttactgcgccacttcgttcgggaatgtgcactgagaagaggtaggcggtggagaagagaaagggtggaaggggagaatggagaatgaagtgccgaaagagaagagaagggagcagcgccaactttgaaattcactttttcgcataacttttaatttctcgttttcttggtttcgtcttgattttattatgaaatttatatgcatgtacattgtattaccatgtgatatgcagttaaatgcagtttgcagtgaaacctcgataaaagatgtatattaaaactctgctcttattttagcaagagtattatttgacttcttatataaatcttaaatctattttactacaatgcccttgtttcctaaatcaattattattattcgtattttattttattatccatatttaaatgaaggtttagtcaagtagtagctgtgtagcgtgtgaccactgtagtgtgtctcgtcggtttgcttggtttgtgtttttttttttgtatgtcggcttctccgttttcaggctgaaaagtaaaatgtgtaaaatgtgcttagtttgttatatcgaaattcccgtacgtaatcagcggtattgcgtttcagcaaactccccctcctctgctctttgcccaactcctctgcactcctccatccagccgtttcccccggcccgctctcagcgctaccctctcctgctgagaagaggctcacttacacttgcagagcgacaaacggcgactactttttacgaatataattccatttcctgccaaggcgataacaacaacgtcgtcgttttattttgatctgtgtgtttttctctcctcctccctcttcttcttcgtctgggctgcttcttcttcttgtgcgatgtgtgtttgtcccgacgccattgctgcgcgaagaagacgaagaagaagagcaatcagatcggcgggggagaaggcgaagtagtaggagttcaaggaggagaaggaggaggagcaaagagcgagtgtagcgaccaccaccgctacctacctaaacaaaaaaggcaactcttcaattttcaatcctcacccttctccattatatctgccccccacctctgctccttcttcgttaaccctcaactccgccgaacgtcatttcatttcgatccgatccgaaccgaaccgactcgactcgattaatagccccatccctaaagtccaggtccaataccgcatgagcccatatacccattccaaacgaaccgattcgaaatcgcaggctcaagtccccgatccgctcgctctgtctcttttactcactcacccacactggcgcacattgcaagcgcagcgacagtgttgccagacataacttatattgaaatttgcttgaaacatctataagttagatacatattctgctatgcattaaaaacggactgtgcacatatacatacatatgtacatatgtggttcttttgacattttaagctcgcaatgtttttgaaaagatgtcttaacgtcttccgaaagaagctaaaagtacacctgctaactgtaagaactgaaatcgttttcaatagaacttgactatatgaaggcattaagtgtataggtttgttcctgtgatatgttttctagaacatgcacctgctgttgcctagaattctggcagtttcctattgaacctggctataaaaaggctaaagtgagcatatcaactaaactcactacccaacagggcacttaaactcatgaaaacgcacatgaggacatgaggccggggcagcaacaacaactaaagtaataagtacaacagcaacaacaacaacaataacacattgtcagcatattgactggctgacccttgagatacccttggagtggaagcgagaggtaaatggttgaagaggggggggattctcagttcgtcaagagtttattagtcgatgggggttgaaattgaggatcaccgctactgattttccatctacaactaaacgtacatatagaaaacaatacaaagcaaatccgttctacttgtttttattcggacttttaaagaaattgttggttaaatgtgaaacaagtgtaaatatagaatagattttaaaatacatacgccacaatgtaatattcgcttaaattgagctgttcgtaattctttgttgctgccgcttcgatgaaaataaattatgaataagttatttgcgtgcgaagctactgactgcttattattattattattattatttttattaataatagtgtttttgctgttgcctggctgtcctcttatcgtgcagttgtaaaaaatacatataagaaaaacatgcacatcaaataaatacgcaacacatatatacatatctacgtacgtacatacattcatatatatgtatttgcgctctcttgcctttgtcgtcgctttgctatctcgcccacaccaacgcatttggcagtatgcccccactcctcggcgctctcgctctttctctctatctggcctggcctggcttgatggggagaaggagagggagaccgagcgagcgagccaggcaggcgtgcgcagtggggcccatttaccgtgggccagaacgggatggagcatagaggcgaagacacttcatattctattgtcattttgttgttgtggctgttgttgtaatctcgaaattgtcttggctgtactgttgttctcattgttgttggtattattgctaatggccgctcaattgagtgccaaagtacatctcgcccctccctcgctctgcggccccttccaccccctctcccacacaatcatctgcttgtttgttgtttgcatgcacaggaagaaattggatttgaaataacataaagagctatttcacagaagtgggatttgaactcggacaataatcatgtcttatctattattaagttagtccttttcttaattaactttataaataaatatatgtccttatcattcaatccgattttgctctcagtgccctgaaaggcgggtgttttgcactcagaatcgatctgaagtttgaacattttcccggattctgggaatgtgtggaatattttattatccacggcatattattattcgcagaatacgatattcccgcctgtatctctcggctttacagtttgcttcgcttaataacttcgttaatatgtacatacatatttccattatgctggctggcatttgcttttcacgcttttcatgcgggccaccctacaaaaagtgttgcgcttgcaaacctggtttttttccccatacatatatatgtatatattttggtgtttcagctttttttctgattgccaatccacacaacgaaatccaccgaaaaatccaatccaatcgaatctattatataataaagtcgcgatcaaatgaggacgctggcagcgcagtctatgtcagcgtcggcagagagccccgtttgtttagtagatttccattcacatttactgtcgcttttttgaattcgttgtttttgcttttgcctttgcgtttgtttttttcccttgtggctttacattttggcttttgttttgcgggttttgccgatggtgctgtctctgtttggcacacacacaatcacactcacactctgcaactggttttgcaggaccacaaagataacaaaaaacacatgtgagtttttgttttttgtttttcctctgttctaagcaacccccgatatattttaatcacgatttcgatcggatttttgtttttgagagtcccacaaccacgtgttcaacacattttcaacatgttgatcttgctctccatccctctctctctctctacacagataaaaatatgaaattacttatggatttttaaatgtaccaatctctgaacctttgctaaattcagaaaggaaatcatattagttacgaaactttaacatttatttttttttttttttattaatatttacatcttttaagcattatagacaccctccttttttctgcgtgtatcccttattgtttgattgttttcggccttttctgcttcttgttctttgttttgtttgtgcgggttatcaaatagccgataaattattggcgcaggaaaaaggaatggggggatacaaaaagagaagggtaggttaaaaagaaatgaggagaaccaaaagggatcaaaacaacctgcggaaagagatgataaaaaaaaggtagagatctactactactacctactgatcttttgctatctttaccgcaatatcatcccttcccatttaaggagactcctataatttttatttgttaccgtcaaattaacgtattttatacataatggctatacacatcatatttagtggtcacaccatatgaatcaaaaacatctcaaaggtattcgtagatagtcaaatgccaaaccttctagaatccaaaaattgtatcacgcttttcgtgccttcgaagctgttgacaataacaaacaagtttatttattggttgtttattaaagtgttttgaatgccgtcaattcgatgatccaaacaaatcttttaaatggaattctaccgcgaatacttagtagagcttatcaaatcattattttctgacgtttcattgtaacttctggaaaattccaagtgcccgtcgaattaaatcttcggctttcgagcgatcgccggtgtttcgatctcgtaataaagacgatctctcccgacttttcgttttatatttgttttttattttcttagttctttttaaagtttgtatacatttatcgttgttgtttttttttagttaagttattattgctctcggtagttattgttggtcttgtgctcgtatatcagttgtgcgctttgcttatcgcttttgagtagcaacaaaaacagcagccagcgaaagattattactgtatgaactaactaacccaataataagtattcttatcacattaaatcacacacacacgcacagagacacagacgcacacacacatacaggcagatacatagctgcactttagaacgcgcgtgtgtcaacagagaaagagcttcgtttcttctcaatctatacttaaaatgtgtgtttttccttcttttattttttatgatttacgtgcctggcctgcacttggtttaactgagagaaaagagcacatacaagtgtgcataggagtgtagataggagttgtttgggggttggggttgaggtttcggcgaaagatgagaagggggtcactgccactgccatgtgctcacaacacaaacacggccacacatttgccgggccgactgataagcagagaagaacatcaagagagtgtctacactctctagagcagcgaacacagaacgtaaaaacatggccacaagaaccagagatattgctaggcttacgtttgtcacaagatgatgaatatcatcatcacataattccccacttaacaccataaatgttgcagcacagccacactggcagggaattgtgaaaagcggccacactaaaggtcagtggccagaacattcaagagatgttcatcattttaaatatcaattcatttcgaagtcgtcaattgtggaataatacattatgatgatgacttctttattataatagcttcgttttcaaacgttagctatcaaattcatcattgtttgaattgtttatgtccagctgatttcgacatttccctcccttataagctttcctgtcaccatccatgacatgtttttcgtaattcgggctttatatagaaacagtaaaaaacacacaaatcaatttcgaaatgtttgcggctgaccggtatacacatccatacatatgtatgtacgtacatttgtacatactttaaagcttagcccttctctgccctcgaaacggatcggttcggatcataatgttttgggatcgcattttaatcgagttctcggttagcagctagggatttattttatggcatttgtccccaagggaaaaacatgcagtaaaatgtaagtgatggggattggaagtgggactgcttgggagtatgggggaggcatcaaaagtcactccacaacacactcacactcacacatacgcacgccaaaacaatcggagggaacccaaccgaaaacgagaccctcgataaggttcgacgctctggacaccccgtcgtctgataaggagactcacagactgccgactgaaaatgggggatactaaaaaagaaaacaaaaaaaaactatagaggtggtggaagagggttgcaagtggagcagaggttaaggcaagggcaatggggatcgcgatcgggatcggtttcggttttggattgtagatttcccgaaccgagcctatacaaattctagaacaacacataatgtgtgagcaccacttcttcgtggtttatctgtacaaacaacccaacagtgtggtgttatcttgaatttttccagaatgtttgaactccaattgtgatgactataaacttctgattcaataaaaacgtgtgaaacttgagctgcttcgcttatagccggaagtttttgtttataagaccagctcctggaactagaaatatattgttttaatgcgaactctgtatattttcgtattgcgtgagggcaaaaaactgggaaataggtaattgaatccagcaaaatatgtaattggaaagtttgatcgttaaaaagaaatgctgaaagtgctgcttttctcttttccggttggattgtttagatataaattactaagtaattttttgtttgaattgaatttcctgaatcaaacaaattgaatagttttgtgttagttaataattataatattatatagcatattgatatggcatggcttatgtggtcaaacatggggcttttcatgtaacataatgggtaatatgagctaatttcgtgttttaggttaagattaccttgaaaatgatagcttccactttttctttcaaccatctgataccatctctatcactattttcgtctccctcccactttgctcccattcgaaactctccatttcgattgcataacggtggctttgtgctccccatcactccctctcgatctccgaactgctgttgtgtgcgcgcgcgagtgtgtgtgtgtgtgcaaaaggtctccatcacccatctccctttctccactttacctctccattcccctctagccccactcttcttctctctcctcgctttttgcatttgtttgactggtttgcttaagcaaaacaaaaacggcaattgcaacattttatatgtatttcccttcctttttgcaaaaacagagagagatatagcaataaaaaaaaaatactacgcagacgcaacgcgttgcgacagaggaagaagaagacaatgattattatgttttattttatttgattttatttttatgcacatcgattaaagacggaactctcttggatacgaaactcgatttgtgagtggatggatttgttggtttttgtttattgactttagtgttgtttctgtgccggattttgtatctgtacagtgagctcgcttaacagttaaccgaacaatcgaagatattaacataatgttcaatgttattttacaaagcttgcagttaacctctgaacttaaaagaaatcgaataggcaaatttcgtctatgccatggtttttatccatcgagaccagtatctactgtacttctcttggatttttttttcaaaactatgcttttatggttgttgtgctcctaatttagcaaggccaagtcgttgtgaagttttcttttattgtgttttattatgtgattttcgttgttgccaattattattatgtgagccggttcgacaaaaaaaaaaaaacaaggaaaagaaacaacaaagcgtacgagaaagaagcgaaaagaagagaagaggaagagacaacggtggacgcttggcaatgaaacgaaacgaaactggcacggcagttgcgcatgcgtcttttcgtcttcccttctctgcgcgtcccccgtcgtttatccaccaactccccatcgccccattcccccctcaaacactctcgctatctatgccttcttatttcgcttaccaaatattaacaaccgaccaacgaacggatggacaatgcaaacgacacgaaaatgtgaaatgctccattcgacgattcgacctagacctcaatcgatggcttggatgatggcccaaacccaaaacccaaaaccaaaacccaaaactgaatactgaatagtgaatagtgaatactgaatactgaatactgaaaactcaaaactcaaaactagaaaccgaataatcgaacacaaccagttgaaaagcctaaaacgaataaccaaaggcagttaaataatttaaacaaattataagcctttgacaatgttatgttaatttatttatttcccttcttctaccaaatcgtatcaccaataggcaccagttgagattacgaaatgatcaaatgtagctttgctgaaatgttagaacttttggtaccgtcgtattgccatgttttctaggaacttgtagttcgttactcaatccttgcatgccttgtttataaatccgttacttttattgtgcaaacattcgaagtagtttttgcacaaataaacaaattgacattgtttactgaaactgaaacaaattcaagaaagaattgttgcatcttaagtaagctccatttgcggctattaagttatttctatataattgattattggtttatttgtaaatttccttgtgatttctctgcttatttgtgtttttaattttttttttaaattttctgcgtttatggtttttaaacctttttggtaactattacacttagagaagtaatacaagttaattaaagttcgattcgcaggcgtttattaagaaaatgtagtatttattaaggctagaattgcagttctttttcgttcagtgcagcttgttgcttatcagttgcagatcgtgtttggaataaaaaacacgcaaagaaaatcagtggaatgggaatggaaatggaaatggaaatggggatggggatgggggatcgtctgttctagattgttttgttgtgagcttgcggggccgtcaatcgatcaaaagtgatcactgatcagcggccgagaatggaaagggggaaatgcagtccaatgcaatgcaatccaatgcaatgcaaaatgcaatggaaatggagatggaaatcgacatcgaaatggaatgcatgcgaatgagaatgaaaatgaaaagcaatgaaaaactcgcatgacagccgcatgtgttaattaccaattcaaatttaccaacaacaattaaactcgatgcgatacgattgcttttgtttcggcctaacaaaatcaaaaaaaaaaaaaaatatactaataataataataaaaataaatctatagagaggggctacgatttttgttttcttttaatttgatctgcgtctggctgctaatcaaatttcgatggatagaaatctcgcactttgcatagaaaatttgaagcttaccttgaactttaattgaaccgtaaagaccgtgtgtgtaaatatggaaatcagatgcgtacatatatcgcatctcagatcttggacctttatctttatctgtgggcttcggcttcgatcgttcctatagctacttacatacatacatatacccatccctaactaaatggaaataacttgatttaattgctaatgttattcccccgggcgattaatagatgcgatttatacccgtacacagtggtggtcaaaataatagtgttgtcgtttctaagttgttgatttaaatatctggttaatatacaattgaataaagttctgctgttgaatacagataccgttgactgcaatcgaaatcctatttgccgatccaccgctgtattcagatacataatatatatagtagcgccacgccccctcgcctctttccgtctctttttagccgttcgtgcgcaggttggtcgggtattataaataacactcaataataactttgtattcatttccaattcgcatatatgaacagaataaagattgtctgggtgtgtgagtttggttttttttttttacattttttttttcgttaattttatttttaccattgtattggtgttagctcatcgaggttatggatattgcgtcgtcgtcatcgcgacgttgttgttgcttttattggtacggctttataaaccagttagtccaaccgaaaaaaattaaaaaaaaagagaaaaaaaaaccaacaacagcaggtcttcagcatctcgcacacactctcaaaaagtcgggtgtatctgtgtgaacgtgtttatgagacacaaacaagtaagcagcaacaacaatcgccgatcttacctaacagccccgtgagccaagacctgaaacaacacaacacacactcgataagctatatatacacatctgcataactacatagtagtggttcgtttcatatgtaagccgtgagttgtaccaaaagtaatgccaaatctcccaagaaccgattaccagtgcggatcttaattatcgtagaatttatataacgcaatattgtaagcttccattggtttcaacttttaaaacgaacatcagatgtattacttgaaaggcttaaccaagaaaggtgtccaatatatatctatatatatataatatatctagcaaatcttgcacgatgaaaaatatatatacatttatatagtttctttgaagtaaatgttaggcaatctaaacgagcttgaaaaaagaaaacaggtaataagacgtttattacagcacctccgcattgtatgtaatgtttacaagcatttaaagtgaattgttgtaaaagctcagttgccagggaaagattcaaaggctatagaaacattgctatatgcaactgaaaagtatagggaaaaactaaccgaatttaaaatgtttccatttgtataacgactgaagtagtttcggctaacagctccttaaagagtgtttaaaagtatagcacccttggctttagttatgtgattaaagttcaacttgatgtattttcacttggcaagtttgtatctcaaccgcagatggaatttcaaaaatgggtaattttgcaaacaattaagaggcatcaaggtctattgcctgtaactctccgctgcttgactctttttctcttagccaaacatcttgtgattctccattcgtccctctcatttagcacccactcactcacacacactctctctctctctctctctctctgtctagtcttctgtttttattttcttaacccaccgcaacaatgaaacggaaaacagaaaaaccaggcgatcaaaacacaagtggcaagaaacggtgggaatgaaagcaaagggggcagaagagagtcttctatcagcaggaaaaaagctaagaagaagtagaaaaataagccaaagcatgactgcaagaaaagtaaacttattttcattttcaaatgaaagggaaattctcgactagacgaaagaaagagaagggagagcaagagcgagagatttaaagccaccaatagagagagagacggctaatgggcgacagaaagagagcgtagcttaatacataacacgaggggaaaacaggaaagaagaaaagaaaaacaagagtttttaaaaaaggaccccagactgtgccccttactaccccctttgtcttctgacaaaatgggtcttaatcttgtttttacacaaacgcaacgcagaaacgcagggcgtgaagtgaggtagattgtcttaaagttgtttttcgaactcgaacacgtttttaaaggaaagaaaaagacgtctctcctttgccgtttaccccttgccatgccattcattttatccacccattactcactcactcaccccacaaatcgagtttatgcgattggctctttgcgaaatcagttcacgaatcggagtcataacttgaccatgaattcgacccgacgtcgttgtccccaaaacagctgtgcaaaattaaacaaaactaattgacacacaaataatcgtaaaaaaaaagcgtcgtgtttgaaggttatcgttgggtttttcgttgcggaagtgagatttcttcaccgataccgattttcacttttaaacggagtgcgttcaagttgctaagccaaacaaaattttgggttacgatccagttttcactttcgattgataaaattatttgcgataatattacattttagttttcaagacatggatttactttgcaatcatgccttctctaaaatgttgtcaaagcttaaaagaacttggcatttaataatcaaaataatatttataatgatatattataattatactggaatttagactaaaatgttcttatggtctctgtaacaactataatattatcctaatgagttgattatctatgagataacaaaacaaacaaaagtgaaggcttactacaatatttagttatgaaatcgttaaatgaagacatttacattttgtgtctttgcacatgtaatacttttcaagggtggcctcggctggatttttacgcgggtttgcaaatgaagaaatcgtaaattaccaggcataaacttggctcttatttatgggacttggttgcaagccaaaggcagaaaggcaaaatcaaaagcttgagcaggaggcagcaaccgtatccgcagtcgcaaagatgccgtaagcgttgaagttggtcaaaaagaaaaaaagaaaaaaaaaatatatatataaaagaaacagcgccaaaggtttgctaaacttgttgcgcttgctcgttaatgtttatgtatttttttccttttagttttttgctgctgtctgcgcagagttacagaccgaaattgaaactgaaactgggaaacagggttgccaggtgctcgtcaatgtcagctgactaattgacgatgcaatgcaggaagttcgttttcatttcttataacgaaaggaaaaacccagagatgattaagcaagacagttttggtttttagttatgtacgcatacatatgcgtacttgtattatttcaaagaaatatcatttaggttacagaactgccaatgcatctatcattttagatttggtacttattgtgcaaatacggcgtaattttttctttccaaaccttgcaatcgagtagacaagtgatactcacccttcaatgccaatgccaatggtgaaataaaagtgaagcacaaatcaagagaacacgatgccaaatgggacaaaagataagataggcgatcgacgacaagaacattgtgtatatatggtttctaaactgattggccaggcaaattaattaattgaacatttaaattgttttgtttcgtttcgttttgtttcgttggcccgtgtccagcccgtttctggaatggaatggaattacttatgaaatttcaaggaatgtgtactgttgaaatcgggccaaagataacctaaatgaagtgcatgcatatgtatgtatgtatataagtatttatttgttatgtgcctcatctgatgtctggtcgtctttttatgtgtcttgaaatcccccagccccattcacatcccaatctctcgagataacgacattctaagtgggctatatcgttctgtaatcgcatggggctccatatttatattgttgagcatctggttagtccgcagcgcaaatctaaatcttatgtcttgataaagtttatatgcccactatggttaaaataatcctatacttcttcttcactgcgtttttatgtttttattaaatacaaaaatccctgacagctgtgataattctatgttaagcttttatgttaattataagttttgatttttttttaaattttttttttaaattttgcggttttgcttttgagtcatgtttctaatcttttattgatttgacacccttggcaaccctgttttcagttggtgcgcatgcgccaccgtctcgtgctgtccctcttgctctcactggcattgccacacaccctcaatatctcctttcctctcccacttgttgagcaagccaaccagtttttcgtctgcaaattgagttgaggttttgtcgtttttttcttcttttttttttacattttggtcaagggggggggagggaggggaagcttacgattggaggaatggggcttgctgaggcggttgattactggttgcttgtgtgttgggaccccaaaaatcttgttgttgtctttttgtggtagctccggcttttgagcttcgctttttctgagcctcagcttttctgcctttcgtgttgttggcttgaacttgagctctatacatatgtaattggttggttggttggttgtgattgctgttgctgttgctgctagttttggccacgcttgatggagtgggctaagtgcccaagtctgtgtatcatcggagtgtctctgcgtctatgtgtgtgtgtgtgtgtgtctgttaactggttgcataacatgttacagcatcgcacgaaaatgaacaggccaagtcggacgttgcgtcccaaaaaaaaaaaaaaaaaaaaaaaaaatgtaaaaaagaaacaaaaccgaaactgatgacgacatgaagccagggggcgggatggggggtgtttgtattgaaagagtggtaacaaagtggtaagaaaaaggggcaaagagtggctaaaaagttaaggccagaagggaaaaaagagaggtagctggtttttcttggctctggtgtttaatgtctggaaaattataacatttttgtatgccttttgcaatatttctcagtcgtctagctgtttttcccaagtgtgcctgtgtgtgtgtgtgtgtgtaggtttgttgggtttttctgtttttgcttataggtcaagttaaaagtaaaagtgagtttggctttttgctttgtgctgcttttgccttttgattttgtttattttttttttttttgtacgggcgtcgtgtgcttcttttgacgtcctctttttttatttattttttattttggtagttttgcgaaatatgcgctagttacgtatacgcccgagcgacacacagaaattgatttttggcttttcgtcttttgcattcgcagatgaacgatcacttgggtgatttcgattgcaacgaggtgcgcaaggaaataaggatgctgctcgcccacggcgccaacttggatcagcagcaccagcagcagccacatcgccaccatggcggtctcacacgaaccatttcacagccggcccagctcatccagcagcagcagcagcaacaccaacagcagcagcagcagcagccagctgttgccagtctggtgaccatcaccgagaacctgggcaacatgaacctgcaccgaaagctggagcgaacccaatcggagccactgccgccacagcagccgatgaacacatccaggtaagctggcgaggaataccccgaatttaggagccaaagggttaaggaattctagccatctagagctgattgtattgaaaaatccaatcaaggcacaacataaatacaattaacttgcagtcttatttgactgtttaggaagtacagtgcatcagagtttcttaatccttgtctattgaatctaatctcttagactaaagctcaaatttagttaagttaagcctaaacccttcacaagaacgaactacaagtaattgcggtatttgaacactttcagatacaagaccgagctgtgccgcccgttcgaggaggccggagaatgcaagtacggcgagaagtgccagttcgcccatggaagccatgagttgcgaaacgtgcaccgtcatcccaagtacaagacggaatactgccgcaccttccacagcgtgggcttctgtccctacggaccgcgctgtcactttgttcacaatgcggacgaggcccgcgcccaacaggcggcccaggcagccaagtcctccacccagtcgcagtcgcagtcgcagcagtcgtcgtcgcagaacttctcgccgaagagcaaccagagcagcaatcaaagtagcaacagtagcagcagcagcagcagcagcggcggcggcggtggcggcggcaacagcatcaacaacaacaacggtagccaattctatctgccgctaagcccaccgctgagcatgagcacaggatcggaccgggaatcgcccaccggatcactgtccctcagccccaccaactcgttgaccagcttcccgttccacgatgccctgcagcatggatatttggcatcgaatggcgccaagagcaacagttccgcctcgtccacatcatcggcctctggaatgggtctgggcatgagcatgggcatcggccagggcatgatcatcggtcagggcttgggaatgggacatcatggaccggctacaccgccggagagccccaatgtgcccatatcgccagtgcatacaccgccaccgtacgatgtggtggtcagtggatctggagcgggcaacaatagcgttggcagcaagcagctcctgcagaagagcgtcagcacaccgatgcagcaggaggataccgcccaggttgccggttttcaaccgtctcagctccggtgtggaggcctaccagcagcagtccaatttgggactctaaacgcgtggcagtctgcgaaacaaaattgaattgaaacaccatccagcatccaactcacgcccatccaagcatccctccatcaacaaaccagcatccttgacaaaatctcagtaacgaccaaaccatggaaactgaaaacaaaactactctcgcagtccaatttgaaacgcaaatatgccaaggcaaatggatttccggtggcgtaacttcgttgcagaataagtgtatatcaagtatacgccaaacacagacaccccttaattatgaaccgatccttgatatcaattctctcattgctgtgacagtcaaacgtaatcgttatacaataatcgttatatgagaaggaccgaattacggactactacgggacaattagttagatagatacgtaaatgacaaacaaacaatccaagcaaacgatgatcttaaactataactaaatactaaaaactaaaaactaacaaaaagaaaacaaaaaaaaaaaaacatagctagcatgaatgctatagctaaacaaaacattcttatgaactggacaagatacaaagacggagataacgaaaaggactatttgggaatcttcagcgaatgttgctcaaatcaaatcaacaaaccccacggccaacgacgaatgtgaaaatcgttcctgcatttatagaaactactgcagtgcatccattagtaaaacccatgcacacgcacacctgtcgcttttgttcaatacttatacggcacacactttggataggtctcatgtaaaaattgattaccggctgcttgtatatatatatatagatatgtata

SEQ ID NO: 2594 - DNA, 2183 bp, DROSOPHILA
gtcacactgccgggcaaccgaatcgaaaaaacggcgattcgacatttttgtgcgagtgtaaggttcgattccgatctggctggttgtctgacggacgtgctgcgtctattttgttgtgtttttttgcgaacgagcgaagagcgacaggacctctgcgcccgtattcaaactgatttttttttattgttgcaatgcaatattcgcggaacgaataacaacaacatacataactcaatattcaagtgcaaagcaaatacaaatcaaacacaaaagaaaaagcaacgaaataaagatatatagaaaagaaaaacaaaacgaaaaaattcgcacattttttctgtcttgtccagtggaaaatacaacaaataaacaacaacggctaaatcaagttaacaatctgttcaaaaccaatcaacaaaatgtctgctgatattctgcagaaatcaagagagcaggatgattcgcactacttcgagcgtggcgatatatccaaatacgtaacggtaagtatgaacgatcacttgggtgatttcgattgcaacgaggtgcgcaaggaaataaggatgctgctcgcccacggcgccaacttggatcagcagcaccagcagcagccacatcgccaccatggcggtctcacacgaaccatttcacagccggcccagctcatccagcagcagcagcagcaacaccaacagcagcagcagcagcagccagctgttgccagtctggtgaccatcaccgagaacctgggcaacatgaacctgcaccgaaagctggagcgaacccaatcggagccactgccgccacagcagccgatgaacacatccagatacaagaccgagctgtgccgcccgttcgaggaggccggagaatgcaagtacggcgagaagtgccagttcgcccatggaagccatgagttgcgaaacgtgcaccgtcatcccaagtacaagacggaatactgccgcaccttccacagcgtgggcttctgtccctacggaccgcgctgtcactttgttcacaatgcggacgaggcccgcgcccaacaggcggcccaggcagccaagtcctccacccagtcgcagtcgcagtcgcagcagtcgtcgtcgcagaacttctcgccgaagagcaaccagagcagcaatcaaagtagcaacagtagcagcagcagcagcagcagcggcggcggcggtggcggcggcaacagcatcaacaacaacaacggtagccaattctatctgccgctaagcccaccgctgagcatgagcacaggatcggaccgggaatcgcccaccggatcactgtccctcagccccaccaactcgttgaccagcttcccgttccacgatgccctgcagcatggatatttggcatcgaatggcgccaagagcaacagttccgcctcgtccacatcatcggcctctggaatgggtctgggcatgagcatgggcatcggccagggcatgatcatcggtcagggcttgggaatgggacatcatggaccggctacaccgccggagagccccaatgtgcccatatcgccagtgcatacaccgccaccgtacgatgtggtggtcagtggatctggagcgggcaacaatagcgttggcagcaagcagctcctgcagaagagcgtcagcacaccgatgcagcaggaggataccgcccaggttgccggttttcaaccgtctcagctccggtgtggaggcctaccagcagcagtccaatttgggactctaaacgcgtggcagtctgcgaaacaaaattgaattgaaacaccatccagcatccaactcacgcccatccaagcatccctccatcaacaaaccagcatccttgacaaaatctcagtaacgaccaaaccatggaaactgaaaacaaaactactctcgcagtccaatttgaaacgcaaatatgccaaggcaaatggatttccggtggcgtaacttcgttgcagaataagtgtatatcaagtatacgccaaacacagacaccccttaattatgaaccgatccttgatatcaattctctcattgctgtgacagtcaaacgtaatcgttatacaataatcgttatatgagaaggaccgaattacggactactacgggacaattagttagatagatacgtaaatgacaaacaaacaatccaagcaaacgatgatcttaaactataactaaatacta

SEQ ID NO: 2595 - protein, 448 aa, DROSOPHILA
MSADILQKSREQDDSHYFERGDISKYVTVSMNDHLGDFDCNEVRKEIRMLLAHGANLDQQHQQQPHRHHGGLTRTISQPAQLIQQQQQQHQQQQQQQPAVASLVTITENLGNMNLHRKLERTQSEPLPPQQPMNTSRYKTELCRPFEEAGECKYGEKCQFAHGSHELRNVHRHPKYKTEYCRTFHSVGFCPYGPRCHFVHNADEARAQQAAQAAKSSTQSQSQSQQSSSQNFSPKSNQSSNQSSNSSSSSSSSGGGGGGGNSINNNNGSQFYLPLSPPLSMSTGSDRESPTGSLSLSPTNSLTSFPFHDALQHGYLASNGAKSNSSASSTSSASGMGLGMSMGIGQGMIIGQGLGMGHHGPATPPESPNVPISPVHTPPPYDVVVSGSGAGNNSVGSKQLLQKSVSTPMQQEDTAQVAGFQPSQLRCGGLPAAVQFGTLNAWQSAKQN

SEQ ID NO: 2596 - DNA, 6804 bp, DROSOPHILA
gtcgttaatgctttaaaatggccaggatactcaccctcgggctcattctgatcctcggccagtgaggtgagtcgcttggggcgctttttcgtttgctgcggcgtcaccgaagagttctcctgactcttcgctgccggagcactgtccctcggtttggcctccgcctccggctggcctgtgccgtagaagaggtggtccagctcctcaaagtgggcctaaaaaacacatatgacgccatgttgacagtgtcggaatttcgtctcctgatcctggcttaccttgcgcaggacctcgagctccctgcgcaggtccgaaagcgagcccagcacgcccaagatgtcctccatatctagcgactgtatctgacaaactgcaaatccggattcggttccttcgattttatcgtttttttcaaatggcggcaattgcgacgcgcgtcagcatttgataacatgcctttaattgtgcactgttgacagttaacagctcgtcgggtgctgtaaggcgcatttatgcctctgctttccaacactgcacgggcgataaagttcccgcgcaaaatgaaaaacacaaccaaaacttgttttttgagtgaatattgggagatatttatttgaattctttaaaataatattattgggttatttaaatagttacgtactggatttctagccctgtaaattttgaaagtataacattaggtgaaccagttccaatacgttcccgccactaccatctctagaaagcagtgctgcacggctccccaaaaaacatattgtaaacaaatttgagggaaaatggtaagggaaagaacaaaaaggaacatttaaattataaatatagattacggaagagaattaatttgcgtaaaggaccggaaatatttcaaacaagtttcagcaaacgtccagtgctgcacaagcacttccgacgatagtatcgccatggcgagctgaccagcaagcccatctctagcacatttgttaaaaaatttgcaacaagccaacgaaaatcgaccaggaacggtggacagccaaaaccgcgcgctctgcgacgaccaccgtgggatgcacatacgtatgcgcagccgtgccgcggagtagacacagtgcccgcgatccgcgaccagcgaaccgccaaaccccgagaagccagctgcagcagatccacagatcgcgccgcagatccagatcatgggcctcgacttcgacgcagtggaatactgcaaaggggtgaagacccagcagtcccagccgcctttcgcctgtcccgtccgcggctgcgaccgcagctacaagaccatcatgggtctgcaataccatcttatgaagtacgaccacgacaacccacagccgctcacgcccgtgctgactccgagccgcaagaaggcgcgctcacgctccggcggccaccactccacgcctcgtccgcacaaggatcaccccacgccgggtggcggtggagctgaggccagaaacggctgctcctcggccagcgcaggaggtggatcggcgagcggagtcagcgcccggcagtacgccaatccagagtcactggtgtcctacaacgaggaggaggccacggtgacgtttaacttggacgggaagagcgtgcgcctgggcatcgacgacgccttgccgctcgtagaggacgaagagttcgccgccctagtggccaggggctgtattctgaatgccgacgcaccaccgctggaggagaacgcgccctgggcaagggtccaggtgcccgtggccagggtggccgagattccggactaccgagtgtccgacgccccgccacggccgctggcctactatcgcttcatcgaaaagtccctggaggagctggacggggaggtggagtacgacgttgacgaggaggactccgcctggctggagcacatgaacgaggagcgccagcgactcggcctgaacgccgtgggcatcgacacgatggagctgctgatggaccggctggagaaggagtcgcacttccaggcggcggccaacggcacacccacaggcgtcgaggtggacgacgacgcagtctgctgcatttgcctcgacggcgagtgccaaaacaccaacgtgatacttttctgcgacatgtgcaacctggcggtacaccaggactgctacggtgtcccctatatcccggagggccagtggctgtgccgccgatgcttgcagtcacccagtaagcctgtgaactgtgtgctctgtcccaatgcgggcggcgcattcaagcagacggaccacgggcagtgggcgcacgtggtgtgtgcgctttggataccggaagtgcggttcgccaacaccgtctttctggagccaataggtgcgtagctcgatctcccagtttctttgatcccagttccaaataacatctgagttctttttatagattcaattgagaccattccccccgctcgttggcgactcacctgctacgtgtgcaaggagaagggcttgggagcctgcatccagtgccatcggaacagctgctacgccgccttccacgttacatgcgcacagcaagcgggcctctacatgaccatggacacggttaaggacgggcacaacgattcgtccatgcatgttcagaagtttgcctactgccacgcccacacgccggccgacgccaagctcaagatgaacgtgcctgacttcgaggacacgcgtcacaagatgaaggaggcgcgcaaggcgttggccaagaagcgctccacagcgcccgtggtgctgattccgactattccgccggaccgcgttcaggagatagcaacaatggttacgatgcagcgcaagaaagagttccttgaccgcattatcgcctattggacgcttaagcgacactaccgcaacggggttcccctcctacgacgcttgcagagccaagggaacaaccacggcgtgatacagcgcaacggcattgaaggatcgccggacaccggcgagctgtaccgccagcttaagtactggcagtgccttcggcaggatctggagcgagcgcgcctcttgtgcgagttggtgcgcaagcgcgagaagctgaaagtggcttttgttcgcatttccgaggaggtggtcatgctgcagctcaatccgctggaggcggcactgaacaagctgctcgatgctctggaggcgagagacagcatgcagattttccgagagccggtggacaccagcgaggtgcccgactacactgacattgtgaaacaacccatggatctgggcacgatgagggctaagctgaaggagtgtcagtacaactcgctggagcagttagaagctgactttgacctgatgattcagaactgtttggcgtacaacaacaaggatacggtgttctatcgtgctggaatccggatgcgcgaccaggctgcgccgctctttgtccaggtaaggaaggagctgcagcgggatggcctgctggcgcgatcacaacgctaccacgtcgaccacgtggaagcggaggtggaacaggagctacgcttgctgctggcggcgccggccagcgagggcatcgtccagaagctgctcattctagccgacaagtcgcaggtgctgaagaacccgacgtatcgcaccaagaagataaagcagattcggttggagatttctcgaatgcgcaaaagcctccagaaggcgagattcgcagcagtgagtattgatttttaccctatatggttccaaaactaattcatatttttccacagcgtcactcctcgcacgctaaccaatcccaaagcgacgatgaagacacgttgggcggttcgccttctaagaagcgcacccggaaacgattcaatagcagtggggtggacatggaactggggcatgatgatgatgatgaagaagaggattccgatgaggattcgatgggcgaggatactgtttccaaggacttgctcaattccacgcaaacgccgccctgcagccccattaagagtttaaacaacagcagctctcccgtaggcatcaatagaaggtaagtaacttgatgaagtccctcgaccattaaccttcctggtacttttccaccaggcaaatagctttagtgtttacaagagcttttccaatcgaaatcgtaacctttaggtttctagttatggatgttctttaattttgaatattctttatttggtggtcaatccaatacttaaaatctgtaaaatccgtttcagaaccgccatattgttaacgcgcaaggcacaggctgccctaaagagaccgtcggagccgttgacgacgcctgttaaagaggagcagcacaattcgcagtcgtccaacacgcaatccaccagcggtagctcatcctccgtcaccacggcggccacggccgcgtctagtggagcgggcactctgaatcacgtcctgtcctccgcaccgccaactgcctccagcttcgcgttgacgcagaacaacagcagtggcggtggagctctggcatcgggaactggaataggagggtcgtcctcagcgggaaccgctgcagcggcgagcttgacctctacggccctcgcaatgaacagtaagctaagcgcgaatctgcctgtcaagtcgcccaaaagaccaggacgctatcgtcgggtgccggaagtgaggcacagctcctccatgtcaccaaagaagtcgcccaatccggcggtgaccgtcagccaggcactacccatgcccgagaccctaccctttgaacgaataccggacagctttcgggtgtatagagccaataatcagcgcgacgttagtgacagcgacgacgctccctcgcagtcgagcagtccgtgcagcagttgctcagacttcagcatgtcgggcagctgctctgactttgacagcgatgaggctagcgaaggcgatgctgatggagatcctgacagagatggcggaaggagtcgcagcgaggagagggactccacgtcgcaggagggcaccaccgacgccatggacatgcagcacgccagccttaacaatgttcagggaaacaacggcaacatggccattagcagcagcagcggaggaagtggtggcagctccagcgaagatgacgagcttgaggagcggccactgagcgcgcggcagaacaagccgatgaaggtgggaacgcgaggaacgcccactcctacgacaatggcacgagcagtagctttgtcagcgggtcggggacgtggcaagcggcgaagcaatctcagcgagtccaccagctccacggccacgccaccgccactgcgaagagctggaaagctgcggtcagccacgcccaacgcctctcccctggtgaacaacatcaaggcgcgtaggaacaccacggcggctggcagtgcacctctcacgaataataaccgcagcaagcacagtgaggattccgcctcgtcggagaggcacaataaccactcgcacggccagaagccggcgctggagccgcttcagctggtttgggccaagtgccgtggctatccctggtatcccgcactcatccttgatcccaagacgcccaagggatttgtgtacaacggagtgccgctgcccgccccacccaccgatgtgctggcgctgcggaagaactgcctcgacgagattgtgttcctggtgcttttcttcgatgttaagcgcacctggcagtggctgccggccaacaagctggacatcctcgggatcgacaagcagctcgaccagcaaaagctggtggagtcgcgaaagccggcggagcggaaggccgtaaagaaggcgtaccaggacgcgctacactaccagagccaagtctccgacttggagggccaaggacccgatccgatcatgtgaaagctgatggcccgattgcaactgtaggcgccgctcgaaagaattcagccatttagttagctcccccacaagggatcgccgtatttttatatctcgttgttgttacttgatactcgaagatgacgcagttgaagaaggccctccattagagtatttcgttggcgaatttccaatttgcactgcaagtgtctttaattttcgtttgttgccaagccaagtcaccaaggatcgtttaccccaataccattatgtacagtacagtttttgtaataggcgcagttggcgaaatcgttggaggatccttacccttgtacattatttggcttttgagacttcgattgtgaaatgttaagtagatccaggaatcgctcgaactacagcaacatggaatttataacctcaagacgattcacgcgaaatcaaatcaatgtttaagttaaatagttttaagctctcctactgttaagcccggaatcaacattataagcacaaaaccaaccgctaaaaccaagcaagcagtcgcctcaagttaaagtcgtgtaaaaactagccgctatataggggactagagatgattataaacatttacaaatagcattacaaattgtatagatgtgagtgtgtgtgtgcgcgtgagtctccataaatcgatttatctctatatgcaaatagtgtacgtcttgatttccacatgaacaaataaaccatttgattattgcgatgtattaaagagatgcggattattattattattattattattattattattattataattactgtgtgtaattaatgcaacactttcgtatgcctaagtggaacgcgtagataattaagtattgaagtagttggctcccgtaccccccagctccgccacccaaaaactcaatccacaccagtccaccacctttgcccttaaaaagatcgaacattgtttaaacctaatggtaaatacaagcagaaaaataaatgttttaaacgaaatcatttcacttta

SEQ ID NO: 2597 - DNA, 4486 bp, DROSOPHILA
agccaacgaaaatcgaccaggaacggtggacagccaaaaccgcgcgctctgcgacgaccaccgtgggatgcacatacgtatgcgcagccgtgccgcggagtagacacagtgcccgcgatccgcgaccagcgaaccgccaaaccccgagaagccagctgcagcagatccacagatcgcgccgcagatccagatcatgggcctcgacttcgacgcagtggaatactgcaaaggggtgaagacccagcagtcccagccgcctttcgcctgtcccgtccgcggctgcgaccgcagctacaagaccatcatgggtctgcaataccatcttatgaagtacgaccacgacaacccacagccgctcacgcccgtgctgactccgagccgcaagaaggcgcgctcacgctccggcggccaccactccacgcctcgtccgcacaaggatcaccccacgccgggtggcggtggagctgaggccagaaacggctgctcctcggccagcgcaggaggtggatcggcgagcggagtcagcgcccggcagtacgccaatccagagtcactggtgtcctacaacgaggaggaggccacggtgacgtttaacttggacgggaagagcgtgcgcctgggcatcgacgacgccttgccgctcgtagaggacgaagagttcgccgccctagtggccaggggctgtattctgaatgccgacgcaccaccgctggaggagaacgcgccctgggcaagggtccaggtgcccgtggccagggtggccgagattccggactaccgagtgtccgacgccccgccacggccgctggcctactatcgcttcatcgaaaagtccctggaggagctggacggggaggtggagtacgacgttgacgaggaggactccgcctggctggagcacatgaacgaggagcgccagcgactcggcctgaacgccgtgggcatcgacacgatggagctgctgatggaccggctggagaaggagtcgcacttccaggcggcggccaacggcacacccacaggcgtcgaggtggacgacgacgcagtctgctgcatttgcctcgacggcgagtgccaaaacaccaacgtgatacttttctgcgacatgtgcaacctggcggtacaccaggactgctacggtgtcccctatatcccggagggccagtggctgtgccgccgatgcttgcagtcacccagtaagcctgtgaactgtgtgctctgtcccaatgcgggcggcgcattcaagcagacggaccacgggcagtgggcgcacgtggtgtgtgcgctttggataccggaagtgcggttcgccaacaccgtctttctggagccaatagattcaattgagaccattccccccgctcgttggcgactcacctgctacgtgtgcaaggagaagggcttgggagcctgcatccagtgccatcggaacagctgctacgccgccttccacgttacatgcgcacagcaagcgggcctctacatgaccatggacacggttaaggacgggcacaacgattcgtccatgcatgttcagaagtttgcctactgccacgcccacacgccggccgacgccaagctcaagatgaacgtgcctgacttcgaggacacgcgtcacaagatgaaggaggcgcgcaaggcgttggccaagaagcgctccacagcgcccgtggtgctgattccgactattccgccggaccgcgttcaggagatagcaacaatggttacgatgcagcgcaagaaagagttccttgaccgcattatcgcctattggacgcttaagcgacactaccgcaacggggttcccctcctacgacgcttgcagagccaagggaacaaccacggcgtgatacagcgcaacggcattgaaggatcgccggacaccggcgagctgtaccgccagcttaagtactggcagtgccttcggcaggatctggagcgagcgcgcctcttgtgcgagttggtgcgcaagcgcgagaagctgaaagtggcttttgttcgcatttccgaggaggtggtcatgctgcagctcaatccgctggaggcggcactgaacaagctgctcgatgctctggaggcgagagacagcatgcagattttccgagagccggtggacaccagcgaggtgcccgactacactgacattgtgaaacaacccatggatctgggcacgatgagggctaagctgaaggagtgtcagtacaactcgctggagcagttagaagctgactttgacctgatgattcagaactgtttggcgtacaacaacaaggatacggtgttctatcgtgctggaatccggatgcgcgaccaggctgcgccgctctttgtccaggtaaggaaggagctgcagcgggatggcctgctggcgcgatcacaacgctaccacgtcgaccacgtggaagcggaggtggaacaggagctacgcttgctgctggcggcgccggccagcgagggcatcgtccagaagctgctcattctagccgacaagtcgcaggtgctgaagaacccgacgtatcgcaccaagaagataaagcagattcggttggagatttctcgaatgcgcaaaagcctccagaaggcgagattcgcagcacgtcactcctcgcacgctaaccaatcccaaagcgacgatgaagacacgttgggcggttcgccttctaagaagcgcacccggaaacgattcaatagcagtggggtggacatggaactggggcatgatgatgatgatgaagaagaggattccgatgaggattcgatgggcgaggatactgtttccaaggacttgctcaattccacgcaaacgccgccctgcagccccattaagagtttaaacaacagcagctctcccgtaggcatcaatagaagaaccgccatattgttaacgcgcaaggcacaggctgccctaaagagaccgtcggagccgttgacgacgcctgttaaagaggagcagcacaattcgcagtcgtccaacacgcaatccaccagcggtagctcatcctccgtcaccacggcggccacggccgcgtctagtggagcgggcactctgaatcacgtcctgtcctccgcaccgccaactgcctccagcttcgcgttgacgcagaacaacagcagtggcggtggagctctggcatcgggaactggaataggagggtcgtcctcagcgggaaccgctgcagcggcgagcttgacctctacggccctcgcaatgaacagtaagctaagcgcgaatctgcctgtcaagtcgcccaaaagaccaggacgctatcgtcgggtgccggaagtgaggcacagctcctccatgtcaccaaagaagtcgcccaatccggcggtgaccgtcagccaggcactacccatgcccgagaccctaccctttgaacgaataccggacagctttcgggtgtatagagccaataatcagcgcgacgttagtgacagcgacgacgctccctcgcagtcgagcagtccgtgcagcagttgctcagacttcagcatgtcgggcagctgctctgactttgacagcgatgaggctagcgaaggcgatgctgatggagatcctgacagagatggcggaaggagtcgcagcgaggagagggactccacgtcgcaggagggcaccaccgacgccatggacatgcagcacgccagccttaacaatgttcagggaaacaacggcaacatggccattagcagcagcagcggaggaagtggtggcagctccagcgaagatgacgagcttgaggagcggccactgagcgcgcggcagaacaagccgatgaaggtgggaacgcgaggaacgcccactcctacgacaatggcacgagcagtagctttgtcagcgggtcggggacgtggcaagcggcgaagcaatctcagcgagtccaccagctccacggccacgccaccgccactgcgaagagctggaaagctgcggtcagccacgcccaacgcctctcccctggtgaacaacatcaaggcgcgtaggaacaccacggcggctggcagtgcacctctcacgaataataaccgcagcaagcacagtgaggattccgcctcgtcggagaggcacaataaccactcgcacggccagaagccggcgctggagccgcttcagctggtttgggccaagtgccgtggctatccctggtatcccgcactcatccttgatcccaagacgcccaagggatttgtgtacaacggagtgccgctgcccgccccacccaccgatgtgctggcgctgcggaagaactgcctcgacgagattgtgttcctggtgcttttcttcgatgttaagcgcacctggcagtggctgccggccaacaagctggacatcctcgggatcgacaagcagctcgaccagcaaaagctggtggagtcgcgaaagccggcggagcggaaggccgtaaagaaggcgtaccaggacgcgctacactaccagagccaagtctccgacttggagggccaaggacccgatccgatcatgtga

SEQ ID NO: 2598 - protein, 1430 aa, DROSOPHILA
MGLDFDAVEYCKGVKTQQSQPPFACPVRGCDRSYKTIMGLQYHLMKYDHDNPQPLTPVLTPSRKKARSRSGGHHSTPRPHKDHPTPGGGGAEARNGCSSASAGGGSASGVSARQYANPESLVSYNEEEATVTFNLDGKSVRLGIDDALPLVEDEEFAALVARGCILNADAPPLEENAPWARVQVPVARVAEIPDYRVSDAPPRPLAYYRFIEKSLEELDGEVEYDVDEEDSAWLEHMNEERQRLGLNAVGIDTMELLMDRLEKESHFQAAANGTPTGVEVDDDAVCCICLDGECQNTNVILFCDMCNLAVHQDCYGVPYIPEGQWLCRRCLQSPSKPVNCVLCPNAGGAFKQTDHGQWAHVVCALWIPEVRFANTVFLEPIDSIETIPPARWRLTCYVCKEKGLGACIQCHRNSCYAAFHVTCAQQAGLYMTMDTVKDGHNDSSMHVQKFAYCHAHTPADAKLKMNVPDFEDTRHKMKEARKALAKKRSTAPVVLIPTIPPDRVQEIATMVTMQRKKEFLDRIIAYWTLKRHYRNGVPLLRRLQSQGNNHGVIQRNGIEGSPDTGELYRQLKYWQCLRQDLERARLLCELVRKREKLKVAFVRISEEVVMLQLNPLEAALNKLLDALEARDSMQIFREPVDTSEVPDYTDIVKQPMDLGTMRAKLKECQYNSLEQLEADFDLMIQNCLAYNNKDTVFYRAGIRMRDQAAPLFVQVRKELQRDGLLARSQRYHVDHVEAEVEQELRLLLAAPASEGIVQKLLILADKSQVLKNPTYRTKKIKQIRLEISRMRKSLQKARFAARHSSHANQSQSDDEDTLGGSPSKKRTRKRFNSSGVDMELGHDDDDEEEDSDEDSMGEDTVSKDLLNSTQTPPCSPIKSLNNSSSPVGINRRTAILLTRKAQAALKRPSEPLTTPVKEEQHNSQSSNTQSTSGSSSSVTTAATAASSGAGTLNHVLSSAPPTASSFALTQNNSSGGGALASGTGIGGSSSAGTAAAASLTSTALAMNSKLSANLPVKSPKRPGRYRRVPEVRHSSSMSPKKSPNPAVTVSQALPMPETLPFERIPDSFRVYRANNQRDVSDSDDAPSQSSSPCSSCSDFSMSGSCSDFDSDEASEGDADGDPDRDGGRSRSEERDSTSQEGTTDAMDMQHASLNNVQGNNGNMAISSSSGGSGGSSSEDDELEERPLSARQNKPMKVGTRGTPTPTTMARAVALSAGRGRGKRRSNLSESTSSTATPPPLRRAGKLRSATPNASPLVNNIKARRNTTAAGSAPLTNNNRSKHSEDSASSERHNNHSHGQKPALEPLQLVWAKCRGYPWYPALILDPKTPKGFVYNGVPLPAPPTDVLALRKNCLDEIVFLVLFFDVKRTWQWLPANKLDILGIDKQLDQQKLVESRKPAERKAVKKAYQDALHYQSQVSDLEGQGPDPIM

SEQ ID NO: 2599 - DNA, 3792 bp, DROSOPHILA
ccgtaaaaaggggggaattgtatttcaatggatatttcaaagctgattttcaatataaaatataataggtaataattctaaggcattgttatgattttgttttaacactctatttgctttattccgccaggtaaacacgactagctgttcgattcaggtgtgattatttatatagcgagcaaattaggtagtaggcagccacaaaggtttgtcgaggtgacatcatggcgaccttgagcaaatctagtgcttagtgtttgtggctaacaaaacgggctcaaatgtcgaccacaaatgtttgtacttggcagcaaactgcaaaatgtgcgtgcatttactcacttctggcgactttccttctcgaccgtctcattggcgaagggaacgccactgatggcgatgccgccgactattaactcctgcatgtttatgggctcacaaattcgcgctggccacttagtcgggaatttgcgctaaacaataaacgaattccgcggattccaggccaaaattaaaaattattttccgccttgctcgctctccaacgattcaattcgattcgattcgattcggtaaacaaactgaagttcttttgggaactcgtgggagagacaacactgttctttttggccaaccaacgacgactggccgacgaataggaatgccttcgaaaaatgttttcagttcgagttgatgtggtgaattcgcgcgacgaggtgcgtgcgccaaaggtgttttgtgtgggtgcgacgaggtgggaatccggcatcgcctgccaacgaacttccacctgtgggagctgtgccagcgattttgaactcgtaattggccaatgaaatgagcaatgcctgctaaatatgccgacaattttaggcttaaaaacattcaaagttacttataactataagctaaagaagattgggataccaacttgaaaaggtatgcagaatagtaagcagtgtgtttcactatgtaataagaaacatataaacatttaacgaaaaactcttatattttattgagctccatcatttttaaattcgaaagctaaaagcccgccaagctacagtttcgtcgttaccgcaaacgaccaacgcacatacgagcactgctagcgctggctggctcttgagctggccacactgtcgatcgacatcgctgttatcggagccaagtgccatatctaagaaagcgcgagacgaaaagaagaaaagcagacgccgcagaaatacggcaaaagatattggtattgcacgcgaaccaaacgagctagaagtcaaacgaaatgggtaaggaaaaggcggccgcctcctacagcattggcgacctggtgttcgccaaggtgaagggctatccgccctggccggccaaaatcaccaagagcaacaacaacaagaagtacaatgtttacttctacggcacgggcgaaacggccaacatcaagttggaggatctgttcccgtacgccagcaacaaggagcgcttcgccaccgagaagatcatgaagcgggccaagttcatcgaggccatcgatcagatcgagagcgccttgcgcggcgaggactcggcgcccattgatttgctcgacggcgcggagccagttgctccgcccacaactggtgatggcgtcaagacggaggagcccaagccggagccgggaccggagccagccactgctgcaccagtcgcagcagcggccgagaagcccaagaagagcggcacccggaagaccaaggcaccaccgcgccatgtggacggggatagtgaagcaggcgcggaactagcacctccgccggccaagcgaagggttcccaccgagggtctggctaccgccgcagccatccccgctgctccggctgcggcgacccccacctccagcaagaaatcagtgaagaaatccaagcccacggctgcagtaactccgattcagaagcggtcgcggccagtcaatgtaagtgcgatgcagaaataccaccagacataaactagtatgaattacgatacattgatttccatttttgcccaaacagaacatccggaacgagatgctcatggtgtacatgcccacagccaagtgtttgggaatcgttataaactacaaaaagccggagagtttcgaaagcgccgctgccgaggaagcctggatggagaacgcccgcaaagaagccttggagctcaaactgaaactagagagcggccaaatcaatccggagtccatgcccgataggatcgtggtggagccaacacgcagcgaaatacccaagcaggaggctttgcgattcatcgaggagctcattgagcacgaggatgccctcttcatggagcgagacttcatccaactttcccagcagctgcgcgaatgtttgggcctgcggcgcgccaatgtgggcaaatgcctggagatcctcgagcagttcaaggaggtggagttcaccaagttgatgctgctgcgcaatccggagtgcgtggacataatgcgccgacttcgccggtatgtgggcaatctggagctctggaaaatggacctgtccgacgaggtggagttcaaggagagggcgcagaccatacgcaaggtctcctctggcatatacgatggcttcaagagtctcttcaatccggagcccgagagcgaggacaacttttggatcgacttctgcgaaaaggtaaaaatctacaagacctatacgaaaaatatcaacgaaaaccttcgcgtcgggatgaacgagcgcggatataatagcctggttttggccaaggaggccgccgcttcagccggatcggctccacagtaaatgatcgaggaccagttctgctggaccaattacatgataaggtaggatgggaaaccgcaaaccgctgagttgaaacacatcttcaagaatcctctttcttgcagttactcgtaagcgttacaaaccaggcaacttaaagaccgtgctttggatgacaaagttttgatgagccaagtgggctatgcttaattctaggttaaaaattcagctaaattccttaattctgtttgcctgccaggtgcatgtcgtgttacgctgcgctgatggggcttttcctgctgcatccgcttattaccagactaaaaaaaaggtttttgcttcgaaacccctaaatattttctaagtttgtagatgatttgaataatattgaattaaatatagatggtacatacaattcgcaacggctgttttatttcgtcgttatcctaaacattctaagtaaacattaaaacaaaaaaaaaaacaatctacgaagtttaattcttagtctagggataagtaatcattagaaagttagggagctctattcctagcattaattaacctataagtgagcacaattagctctccctggcgtctcctattccatccggcagaatggcgaacatggcctccgattccggcaaacagggcgagtcgtagatcttgcagatgcgggtttcgcctttacccttgcgcagatacagccgcgtggttgaggagtgggccatgatgtgcccgccaatgggcttcttggcatcaaacatgccgggtgcgccgtccagcgaggcagtaacctggttagtaattaccacagccactccgaactcatcggccaggcgttgaagcatgcgcagaaataagcccaaatggttttgcctggcggccagctccccgcgaccaatataatcggatctgtagagcgccatggcactgtccacaatcagcaaagcgtatctggactcaaagagcatgcccgccgccatctggatgagcttggtctgctgatctgagttgtggg

SEQ ID NO: 2600 - DNA, 1713 bp, DROSOPHILA
aaaaactcttatattttattgagctccatcatttttaaattcgaaagctaaaagcccgccaagctacagtttcgtcgttaccgcaaacgaccaacgcacatacgagcactgctagcgctggctggctcttgagctggccacactgtcgatcgacatcgctgttatcggagccaagtgccatatctaagaaagcgcgagacgaaaagaagaaaagcagacgccgcagaaatacggcaaaagatattggtattgcacgcgaaccaaacgagctagaagtcaaacgaaatgggtaaggaaaaggcggccgcctcctacagcattggcgacctggtgttcgccaaggtgaagggctatccgccctggccggccaaaatcaccaagagcaacaacaacaagaagtacaatgtttacttctacggcacgggcgaaacggccaacatcaagttggaggatctgttcccgtacgccagcaacaaggagcgcttcgccaccgagaagatcatgaagcgggccaagttcatcgaggccatcgatcagatcgagagcgccttgcgcggcgaggactcggcgcccattgatttgctcgacggcgcggagccagttgctccgcccacaactggtgatggcgtcaagacggaggagcccaagccggagccgggaccggagccagccactgctgcaccagtcgcagcagcggccgagaagcccaagaagagcggcacccggaagaccaaggcaccaccgcgccatgtggacggggatagtgaagcaggcgcggaactagcacctccgccggccaagcgaagggttcccaccgagggtctggctaccgccgcagccatccccgctgctccggctgcggcgacccccacctccagcaagaaatcagtgaagaaatccaagcccacggctgcagtaactccgattcagaagcggtcgcggccagtcaataacatccggaacgagatgctcatggtgtacatgcccacagccaagtgtttgggaatcgttataaactacaaaaagccggagagtttcgaaagcgccgctgccgaggaagcctggatggagaacgcccgcaaagaagccttggagctcaaactgaaactagagagcggccaaatcaatccggagtccatgcccgataggatcgtggtggagccaacacgcagcgaaatacccaagcaggaggctttgcgattcatcgaggagctcattgagcacgaggatgccctcttcatggagcgagacttcatccaactttcccagcagctgcgcgaatgtttgggcctgcggcgcgccaatgtgggcaaatgcctggagatcctcgagcagttcaaggaggtggagttcaccaagttgatgctgctgcgcaatccggagtgcgtggacataatgcgccgacttcgccggtatgtgggcaatctggagctctggaaaatggacctgtccgacgaggtggagttcaaggagagggcgcagaccatacgcaaggtctcctctggcatatacgatggcttcaagagtctcttcaatccggagcccgagagcgaggacaacttttggatcgacttctgcgaaaaggtaaaaatctacaagacctatacgaaaaatatcaacgaaaaccttcgcgtcgggatgaacgagcgcggatataatagcctggttttggccaaggaggccgccgcttcagccggatcggctccacagtaa

SEQ ID NO: 2601 - protein, 475 aa, DROSOPHILA
MGKEKAAASYSIGDLVFAKVKGYPPWPAKITKSNNNKKYNVYFYGTGETANIKLEDLFPYASNKERFATEKIMKRAKFIEAIDQIESALRGEDSAPIDLLDGAEPVAPPTTGDGVKTEEPKPEPGPEPATAAPVAAAAEKPKKSGTRKTKAPPRHVDGDSEAGAELAPPPAKRRVPTEGLATAAAIPAAPAAATPTSSKKSVKKSKPTAAVTPIQKRSRPVNNIRNEMLMVYMPTAKCLGIVINYKKPESFESAAAEEAWMENARKEALELKLKLESGQINPESMPDRIVVEPTRSEIPKQEALRFIEELIEHEDALFMERDFIQLSQQLRECLGLRRANVGKCLEILEQFKEVEFTKLMLLRNPECVDIMRRLRRYVGNLELWKMDLSDEVEFKERAQTIRKVSSGIYDGFKSLFNPEPESEDNFWIDFCEKVKIYKTYTKNINENLRVGMNERGYNSLVLAKEAAASAGSAPQ

SEQ ID NO: 2602 - DNA, 4156 bp, DROSOPHILA
ttttactatatatatataaactccacctgggatactgttctttgtagctcctttctacatccaaacgagcctcttttcccatatatgttatattgcttgcgaattgatttaaataaaaagctggttcacaatttgaggcggctcctccagcgaaaccacaaaaatgtgctgggatataatgccggcgagcagtgatataatttgcatgattgacattgtttaaccttaatgcacatttgcctccgtccagcgccttggatcggatcggccatataacggcgccgactggaattaacttgaatttattgggcagcggctggatcggcaaaccggttgaaggaagcagctgaagaacgggctccatatcgggccatatcgagtgactgcctctgcccgcccgatcccttccttggccaccgcgtaatcgatttcaggcgcgaccagacggcgactgtacaaaaatacaaatgaactcccgctggccaaatttggcagccaggaaggggatgatcgagccagccaagtgcgaccattgagcccctttgacaaattcaattaattgtccctcgcatagagcgtgtcattgatgaatcgatagtcaggcttcggagcaccaagggtcccaaagtcccttcactcgatcggaacaggccaatggccataaattcccagcagcctgggctaaaaataaagccagacacgaccttggagcataacggaagaagtcaagcgaaggctggtcctgtttccattggagggagggttggggtgtgtgtgcggtccatgagaggggctagaggccgctggccaattaagttcgagataaagaatcccagcgacctgggccaacagaatatttattgacacatcctgtagggccggccggccgttcgtccaaggacatccacaaccgcttccacttgcggttcttttccactcgccgggatgcgggtataaaaaccctcggacgcggtgtccaacagcatcagtcttccaacagcagtagtcgaagttgtagcgaagttttggagcacccagagttccagaagtcctaccagtcgctacccaaagtcaaacccaacgagttgaaagcaacccaagcacagcaagatgcggctatttctgatcggcttgctggccctgggttccgcgagggccttctctgtgatccgcacccagccgcatccgcagctggtggcctacgctccggccagaggcgagttcccagtggtgagtggcctagcccagggctacgtccgctactacgatggcaccggagcagagcgactgctgccttacaactacccggaaccgctgaacggcatccgggatctgtccacctctagtctagtccgctccggtgaggagcaagagagccaacagatcgctctgttccgtgcctggtgcgagcagcgctaccaggccatgcgcgtagaactggatcgcctgaaggcccagggcctgaaacccacacccagcatgctggctcagttcgagcctctggagcagatcgtcaagttttccgccttcgaagccgttcccggactgaccccggaggtccagcgcgcccgggatgagcagctacgcatctggaacgaggccaggctggaggtgctgcgcgccgaacaggctcagcagctgctcggccagtccccggagtaccagtacgagaaggaaaagatccctgtcatgtacgcccagcctatgcagcagcagattgttccataccaggagaacatattgatcaaaaccaccactcaagatgcgcctcaacccattgaggagacaccggaagtgaaattggcccgccaggaacatctgaagcagttcaacgaggccctcctccggcagcctgcccaggaagccatcatccttaaagccgttcctggaattaagcagccaatcgcgagccagcctcagccgatcatcaagagcaccacaaccatctttgagacccagccagctgcccaaccccagggaatattccagaggggcagcttcacagatcagcagaccccacagcccatcgacgaaactccagaagtgaaaaaagctcgcgaggagcacctcaagctgttcaatgaggccttgctccgtcaaactactgcccccgcagaacccactcttaaggcgacgaccactaagaacgatcagccccaagcattcaccttcccagaaaaaaaagctcctcaacctatccaggaaactccagaggtcgtgcgcgctcgggaggagcatctgaagcagttcaacgaggccatcctgcggcagccagtcgacatccaacaacagcccctgattgcaaccgcaccgtttgctcctcaacccatttttaagagccccattgccgaggtaccacagcccgtccaggacactccggaagtcaagctggcacgtgagcagcacctgctgctactcaaccaagcgaaagtacaggccgaggacaaggtggccgacattgccgacatgatccgattggaggagcgcgagcaggagaaggagcgtctgcaggagctggaactgcgcaagcaggaggagaaggaagccgaaatggaacgccagaaggaggcagatcgtcggctcgaggaaacccgcattctggaggccgagcgtctaaagatcgagcaagaagatcgccagcggttggagagtgaaaagcaggagctcctccagttgaaggccacctccgcagccaccgtacccgagaaggacactcctgaatatctgcgcaaggcggagcagttcaagatcatcaacaaccaggtgcagccccagcagcagcccaacatcgtgacccagcagcagcaagtgcaaaatggcttcttcctgcgcatccaaaccaaccagcccaacgccatccagccatccacggtcccagtgagcactcctgccctagttctagccgagccgggctccaatcccttcctggttcgatacaccaccaagtcagcagcgcggccgcttcctctgcagacgcttcagcccctgcccactcccattgcctccgaattgaagcagcaggtcacatacagctccacgtcgtccagtgaactggacaaagccacccgggagcacttccgcgcccacgagatcgccctggagcagctgcgtctggccaacctgcggaatccctggacccccgactgccagcactaggaagctggaaggccctcctccgtccgaaaacccccgtatccgagcacgaattcgaatcacttgcattgccctaggttagatcacatgcccacatctcctcaaacacaacacgtaaatccataacacccctcataggtactcatactcatactcgtacacctgtatacatagcttggctattcacgccgtctcccgattcaaaatgcattcagttgagaaacaacgcaaaatacagcgcccatttgactgggggatcggatggtggtgggtggtggttggtttttaatggttgatggtggttgatggtgggtggtggtggatggtggggtaaaaaggggcggaacaaaggaaatggctttctcgactttactgttatagaacgctgccatgcttgccatgctaatttcgagtcgccagattgtcggatcgatcagaatgcgcataaaatgctaaaatgcgccgcaaactggcacagatgaagatgttatctgatccgctcgaattcgtttctgatcgattcagatctttcagcacttgacgcataaataacaagttggtgttatatggcctggtctttgtgtatggtggggggggggggggggagtgtgtggatactacgcgaggatactctatggggaatcgccatcggaatgatcggataatacgggagtttcgagtgcagtagcagcgataagtcagtcgggcatatttaggtaaaggtaagcctaaaattagaattttcaatgctgcaaatagcaagtgatatttgcatttcagcaccaagaaagtgtagctataattcaaaataaggccgacagtttgccggccaatctgcataacaaatttggtaactgcagcccgcgaatggtgtcacacttctagctgtttatacaaactccgctattgaccctgatcagcgatccatatgtatgcaccgcctctttaggcccgttacacaaatctccataaatcgaagccttgcaattcgcgtagcggctta

SEQ ID NO: 2603 - DNA, 2156 bp, DROSOPHILA
cagtagtcgaagttgtagcgaagttttggagcacccagagttccagaagtcctaccagtcgctacccaaagtcaaacccaacgagttgaaagcaacccaagcacagcaagatgcggctatttctgatcggcttgctggccctgggttccgcgagggccttctctgtgatccgcacccagccgcatccgcagctggtggcctacgctccggccagaggcgagttcccagtggtgagtggcctagcccagggctacgtccgctactacgatggcaccggagcagagcgactgctgccttacaactacccggaaccgctgaacggcatccgggatctgtccacctctagtctagtccgctccggtgaggagcaagagagccaacagatcgctctgttccgtgcctggtgcgagcagcgctaccaggccatgcgcgtagaactggatcgcctgaaggcccagggcctgaaacccacacccagcatgctggctcagttcgagcctctggagcagatcgtcaagttttccgccttcgaagccgttcccggactgaccccggaggtccagcgcgcccgggatgagcagctacgcatctggaacgaggccaggctggaggtgctgcgcgccgaacaggctcagcagctgctcggccagtccccggagtaccagtacgagaaggaaaagatccctgtcatgtacgcccagcctatgcagcagcagattgttccataccaggagaacatattgatcaaaaccaccactcaagatgcgcctcaacccattgaggagacaccggaagtgaaattggcccgccaggaacatctgaagcagttcaacgaggccctcctccggcagcctgcccaggaagccatcatccttaaagccgttcctggaattaagcagccaatcgcgagccagcctcagccgatcatcaagagcaccacaaccatctttgagacccagccagctgcccaaccccagggaatattccagaggggcagcttcacagatcagcagaccccacagcccatcgacgaaactccagaagtgaaaaaagctcgcgaggagcacctcaagctgttcaatgaggccttgctccgtcaaactactgcccccgcagaacccactcttaaggcgacgaccactaagaacgatcagccccaagcattcaccttcccagaaaaaaaagctcctcaacctatccaggaaactccagaggtcgtgcgcgctcgggaggagcatctgaagcagttcaacgaggccatcctgcggcagccagtcgacatccaacaacagcccctgattgcaaccgcaccgtttgctcctcaacccatttttaagagccccattgccgaggtaccacagcccgtccaggacactccggaagtcaagctggcacgtgagcagcacctgctgctactcaaccaagcgaaagtacaggccgaggacaaggtggccgacattgccgacatgatccgattggaggagcgcgagcaggagaaggagcgtctgcaggagctggaactgcgcaagcaggaggagaaggaagccgaaatggaacgccagaaggaggcagatcgtcggctcgaggaaacccgcattctggaggccgagcgtctaaagatcgagcaagaagatcgccagcggttggagagtgaaaagcaggagctcctccagttgaaggccacctccgcagccaccgtacccgagaaggacactcctgaatatctgcgcaaggcggagcagttcaagatcatcaacaaccaggtgcagccccagcagcagcccaacatcgtgacccagcagcagcaagtgcaaaatggcttcttcctgcgcatccaaaccaaccagcccaacgccatccagccatccacggtcccagtgagcactcctgccctagttctagccgagccgggctccaatcccttcctggttcgatacaccaccaagtcagcagcgcggccgcttcctctgcagacgcttcagcccctgcccactcccattgcctccgaattgaagcagcaggtcacatacagctccacgtcgtccagtgaactggacaaagccacccgggagcacttccgcgcccacgagatcgccctggagcagctgcgtctggccaacctgcggaatccctggacccccgactgccagcactag

SEQ ID NO: 2604 - protein, 681 aa, DROSOPHILA
MRLFLIGLLALGSARAFSVIRTQPHPQLVAYAPARGEFPVVSGLAQGYVRYYDGTGAERLLPYNYPEPLNGIRDLSTSSLVRSGEEQESQQIALFRAWCEQRYQAMRVELDRLKAQGLKPTPSMLAQFEPLEQIVKFSAFEAVPGLTPEVQRARDEQLRIWNEARLEVLRAEQAQQLLGQSPEYQYEKEKIPVMYAQPMQQQIVPYQENILIKTTTQDAPQPIEETPEVKLARQEHLKQFNEALLRQPAQEAIILKAVPGIKQPIASQPQPIIKSTTTIFETQPAAQPQGIFQRGSFTDQQTPQPIDETPEVKKAREEHLKLFNEALLRQTTAPAEPTLKATTTKNDQPQAFTFPEKKAPQPIQETPEVVRAREEHLKQFNEAILRQPVDIQQQPLIATAPFAPQPIFKSPIAEVPQPVQDTPEVKLAREQHLLLLNQAKVQAEDKVADIADMIRLEEREQEKERLQELELRKQEEKEAEMERQKEADRRLEETRILEAERLKIEQEDRQRLESEKQELLQLKATSAATVPEKDTPEYLRKAEQFKIINNQVQPQQQPNIVTQQQQVQNGFFLRIQTNQPNAIQPSTVPVSTPALVLAEPGSNPFLVRYTTKSAARPLPLQTLQPLPTPIASELKQQVTYSSTSSSELDKATREHFRAHEIALEQLRLANLRNPWTPDCQH

SEQ ID NO: 2605 - DNA, 13003 bp, DROSOPHILA
cttggtcgattaacttagaagaggaatggaggggttgattggtctgggatttaacgacatggagccgaaaggctatgacccaaatccacatagtaacttttagttccattcttttcaaatatattatttataaataggattgattatgaaattcaagattactttggtatgaacaaggtgaaactgttgatccgaccaagaacatttaattttgctactcgcttattcgtacataaaaccacttgaagtttattgacaaaattttgcaaacgacagagacaaccatcaacggagctcgatgattgactggcaactgggtttcttgtgttttgtattttccgggatcttatacgataatctttacttgcgctgggcaatattgatacatggttacttgacttaagcggaaatcatttaatgtacgtcaaatgtaaaatacaacatacatcttacttgtataataatactaaaaattatgtaattgtgttatccgtacaatatgctcgcaagtctgtatatttgtgtatggtgttgtttataggtttctggaaacatacagcttgagctcttagttcctagacaatacaattggaaacgtttaaatgcttagggggtttgttttgctgttgttttggttttctcttactaaactatgacaacgtgttaaaatacgtgttactttaaagtatttgtatctcgaacgtgtagctgattagggggttttatttgattggtttatcagtgtccgaatgcacaatttgtcggttttaaggaagagtgtagtatggtgtattgtttctaaaataaatacattaaatgcattgaataactcccaactctgtgctctgctcttttctaaattaaaatggcagttttggtattttggatcatattttctttaccgcgattttgatttccgggaagtttacacattccataaagtttttgatcggttaatatttatatagttgcttgctagatattgatttcttttcatttcattatgttttgttttcctttttgggtatgtctcgcctgctctgagtgtgtgcataataaaattatgagattccttaaagcttctgcggccgtgcgacccggcgaatggccaacttcttcaagggactcatcagatccgacgcctgccgctcggcccttctagcccagagtctccgtactccagggttcattaaatgcttcggctgggacaattcccgccggattcgtccgtgacatcgtgctcgtcttttggcaacattttttaaagtaactataaatgggtgtttgagaattttcgtatttgctttcttgcttcggcccgcacttaatattaactatgcgttcgttattctccagcttccaggtcaatggcagatctcctggccgggccaaagtgataacacacgtgatgctacgatactacttaattaaattatataatttcagttatttttttgtataggcctttaactaaaagtacagtctcagtagggggtacatatatggaaaaagggggccgtgggcgtgtgggttcaaaataaaatcatccatgttgccacctctcaaacaaaccgcctccgtccgtctaatcctgctcggaggcacccggatagtagtagggcggcggacgctcgtactccgatgatggcggcgcagctgggggattgtggtatcgtggtggctcgtggtcccaatgcctgtggattgcaattaaatcgaattagtccatgcgaaatatgcagggcgtattaaatatttatagtgcgaccactcacgcacaacacataaacagaaacacaggagggcgcagtagctgcgattaatcaaattagttggtcaacatagatcgaaatccgatacggtgttagtggcacttggtcatgaaaaagcgggcatttaccagcgggaggccattgatgggcttacgaagaggataagctttgagtaatgagctgtgggcttgtctgctaagagattgtgtccagaagtgtctttaacttcggagcattaatgtcgcaagcttatccaataagcaatataaattcaataaacaaacatttaaattttcaccgacttgagactgagtgtgtttgcagaaaataaactgcttactaaagcgtttaaagaaataaacactagcaaatgcgtagatgcttgtttactacattcagcaagtaggaaaaacaaagaaattaaaatgtaatattaaattatgttgagatcgcaatgagaaaacagagggaactaagcaaattttcaataggggtcttcagtctcttcacaaacagtcggaaatgtactcgaatcgaggctgtgggggaagcacaccgatcgagtctttcaaaaggcacattaccgagcagaagccaaaaccgcttagcattcgggccatgcctaaaagaaaccatctgccgccaatgcctttggccgagtgccattggtcacacctttggcgctaaattaaacaaaattaaaaattagcgttatatagcgatttagcagcggtctaatcgatcaagggaaactggatatcgatgcggtcaagctaattaattgtcaatactaggcagctgcaaggcattaactattgtaagattatattgggcgatttgctaaaaagactttcgtaataatcaaagattttttacattatattttacttataccaaatatcatgatcggaaagtctattagcaagagctagaaagcaggagagggattccctgggtggtggtggagtacacttacgttggcgccatgtcgttgtaacgcatgctgctgctgccaggagctccatcacctccgccgccaccacgatctccgccagagcgattgccacgcgaaacgctgggcgaggcgtcctcgaagtaatcctgctgctcccgtcgccgctcgtaggccttgcgacgcttcttgggaacgctgaaagaggagatgcaatgggacagtgggacacaggattagcgaaagtgctagccagaaaagagagaggtgactggatgatagcttacttagccaatggtacatgttcacgatctcgttcactataagcatcgtacagataatcgcttctgggttagcggtgaaatgagaagaatgtggacggcttagttatggtgcaaactctgaattttttttcggtacatgcatacatttataaaacaaatactgaaagttaatttggtaaaatggaatccaacccaaggtgttagtctgttttgcttttgctggcgcagatatcgcgatccgactcctttaaggtcacctcaatctcgtcccaagaaactgcacctgcttcgtcagctgggattggatcttcaccaccgccaccgcgggtgggtgcccccgaggggcagccgcaataagcctgctgcccgccggagcaggtgactataggcggtggcacatacggagcacccgtgcaaatgggacagctttgggttaggcggtttagcggtgatgcctgaaagctattagtaattcacagaaatcaactcacccgccctcgaccactccagcggctcctacggtagccaggtaaggatagattttcttgtagaggcacatcaggcggtgggccacgaacaggatgggcaggaagagcagggcgcacagcagtatgcctacccagaatccattctgcaaaaatgatttgcgttaaattttgaaccttatcattgttaagaacttataactcacgatgggatccacgatacggtggcaaatcaaatcgactccacgataatatatgtacgacaggggtgcacaatgacccacactttcgttggcctcctttataatcatatctatgtagtcgtcgatcatctggtcaatggaattcgtcagattgcctcctagggcgttgatatagtccttgccgcgtgtttggatgaactgttcggagttgatggccgtggcagtgagaattttgattgtattggtaaagtcgtggttctcgtacgaaattaactcgtcgatcttctttagattggccttcatcttctctacgaggctcgtaagcttcggtacaaaattgcgatagaaggccttggtgttgaggccctcattccagaatgacaccttggcccagccgtatgccggatactccagatcgttggatagcttatacagctgctcggacagggcgttcaggttcatgggcgtaaactgggtgcacagacttggcatgtacagggagctatggtacttcgcaagcttgctctcgcccgctgtctttaactcgtcacgttcttccttcgtcaggagtaccacggtggacaggtcctcgtcgaagaccttaatcgaatctgtattttcctgtgagtgtgacatcacttttatgcgcgtcagatcgttgatgtcatatatgttatgctgacgcatcatatcgaaaatggtctgattggcgtggcaagccttgattgcactcgacatttttagtggttgcaccacttccttgttactttcagatggcggcaaatagtgattcagatctatagacgcgtccagttgccggaacaatgtgttgttctcctgatctctcagtggtgcacaggcaccctggtaggttaccatacccagcataaagtagaaaagtccaaccagtgcgatgaaggagaaaacacagaatatcagcagtatggctctaaaataagtaagcgtaataatgaatcaataagcagaacagaatacggttaaaactactcacagaagcaggcaggtggctccggtggacttgctgcagcattcatcaccatatccagttcgtcggcgcccaaagcaaccgcacagtagagcaaagatcaaaataaaaagtacctaatttaagggaatacgttagttaagacttttgattggaatctttaagatccgccttaccagaagaataagcaagcacacaatcaggctgacaacgtttctatcatggccaaaccgctcgtagacgtcctcgaatgacttagtcgagtgcagagtttttatatggatatcacttagtactccctccacaatgttgcgcacattcgtcgcatgttctcggaagattgtcctgcccttcgttaagtcccgcatcatgggtggtaccacgaaggagagttgcgtcttcaccttgtcgctaaccttctttagacgcgagagtccccgttgaggtatagcgtaatactcacttgcaactatattctccattccctctacaaattctttggtgttcgggagctaaaatacgatggggttaataattttgttattacaaattgagttccagtcatacgttgtcgaagtgcaggcattgcgaggaatcaatgtgttcgatattgctgctaatcaggaacttctggcacatctgcagttgacagagattggccactgcaaagttgacatctcgtttaatgccacggacgcctgaagtaaagtgaatagttttattatttactgcagtctctttgacttttttaaaagtccttaccatctcttaattgggagccatagaagcgcagatctttctccatcttctccacttgcctcatcagctccagagcctcgggcatgttctccaaaactcgctccatttctgccaaggaattactctccgatgtgtcggagagatccaaaaatatgtgccggtgagcgtctaaaaaaaaagtataattgttaaataactaatcaaaggattgcagtccattattatttttacgggttaattgatcaagcacatgagtctccatctcctcgtagttgtacatcatcagatggtgaacgtgatcggctacatccttcagataagtgcaagtgtcctcgctgccgcgcttcattgtctcggaagtctcggcaaagccgctgtcaatcattttgttggtaacaaaggcgataatgatgccaaaactgcagaagacagattatttcgaatatgacttttcttggttaagtgcctccacttacatcagtccgatgatgaggatcaacagacagatgccacaacagaagcgccgctgagcatcctgtttactggtacacggaggacatccctgtcgacatcgtcggcagcaacagaaacagcaatagcaaacgctgtggtgaacaaatattggttatctacgttaattgaatcaatggtctcaaaactcacgcaatgaacggtatgactataatgagcaccacgagaataacaacccagatgagaaccatccaataatgagccaatagatcccgccagtcattctcctccactttgggacccaagctcaaagtgtccgaattctttacgacaatgtaacctgcaatattaagagaaataagtgttttatcctttatttatccaatgtgtacgtcactcaccctccggaatgggttcatccctataaagaaccttgtcatatagaaagtgtgtaaaattgaaaatggggttcatggcggacgtgggaggtggtggtgcctttgtgtagttggttgtcggccggtatacagtgtactggactggtggccaatggggctggccaagctgttcgtgcgtggtgccatggcccacatatcccttgcgccagctcccgggatctgcatcagcctgggcggttgtgggccggatcagcgtggccaaagcgaagccgaatatggctacacttaatccacatatggccaggtaggctatttgtcgcctacgacgctgtcgtctcttccgggatcgcatggatttcgacttgaccgcggccagaggctccactgtggcagctacttcacccatggccgactgcttttcgaaggacttcctgtctcggtgaagcttcctcaaactgactaacgtgctgagctgctgctcttaatcgtgttcccttcggtgtagtagcccacacccatttcacacgtcagtggcctgcaatcaggaaaatagaatacaagattaattaaatagtttagttttaagatagagccacactttattgtcagccattcatatgatgatctcagtcataagcggtatcctgtaagtgtatcttttcaagcgacacctatcgaattaatctttaatctaaattcctttcgttttttaaatgtaaatgggcgaggacagagcagagctcacaccctaatgtggcagtagcatgtcctcgtccaataagaaatgcttggccggggcaataaaatatatttgtttcttggtgtgtccaggcaaatggggcataatcccatcacaggctttggataggattggttccacattgcaatgcgcacacaaacacacacccagagacaatctcacatccacttgacatcaattaaggtcaataaaagccgagaagatgacaatgggttcaggcatttgctgcccgagaatgcaagccactggcgatacaaaggactgagcttcggctttggcacattgcccaccgttggcaggtgttatatctctgtcggggaggtgaaagtccctttggcgtcggttgaatgcacttgtccgtagatcatgagtcaccagctatgctcggaagcattgcgtgagtcgccttgcataattacccaactatcaaattactagcttggggaaatattctaaataggcaaaacatttgcaatatttgcaatgtcaaaataaaaaacaaaacaaaaaatgtacatgccccgagtgaggctcgaactcacgaccttaagattatgagacttacgcgctgccaactgcgccatcgaggcatgaacacgttgccggcaaaaagcaaacttctgccaaaggttcttatgtgtgcgagtcctaaacgcataaataaatatacctacctatattatgtaggtacatttgtaaggaataaagtgtctgtgcgacatgtttatttaaaattatcagataagaaacttgcagtctcttcttatcgatgtcgaatatgaagcgttatcttgttatcacgctgtgtaatcacgttaaaaaaaacacatttgatttttcaagcacaggtaattaatcaatatttgatgtcaataatgtctaaattaaatgtacaattttaaatgcacttgcattaacattttatcaaatgctgaaatactttattactcagatattagtcacatcctcaccatttatatgatcgttttaagaacttcctaaaacccataaaaagtactgtgaatttttgattaaaaatactgaacacacgactgcagaatactggttggcaaggccaactgacgatttgcgtttataaattattattttttttatataaggaatttgctgacggagctagcattttccgatcgcactgcctactcactatcaactttgctcatatttccagcatagatccaagaatacgaatgagtgtgctcatttgatacccgccactggcaactgtaaatttatggccatcgaggcgagcaacaagcagcagttacactcatcgactgtctttgcaccacaacagccatagacagacaaagaaatcgacaagtttattgaactctgtgggcgagtggacaagggaagcggccaagggtctgccccctcggctcggtggctttccatggcattatgctttatagcctagcccttgcgccctggccccgtcgtgcccccaaacggcgacagaatgtagtgtcgcaacactatacgtatttatatacacattcggagcactgcaatgccgcctgcttatctcgaggttgtccctctttttctttacgagcataccctgcttactttccggaaagagctggattaccagacgtgttgatggctgtgtaaaaatagacgtttctgcggactgcacctgctgacagggtcttaatggctgtccaaaacaagcgagtgtttggtgtcgattgcgtatacgccgcgttgtctggctgggaacaaactaaaggcgctggaaaaccgatgctccatttgctgctatgctgtagggctgcgttgccaccgctactgtgcagaaaattctctatacccccatggtggggcagcctttgaacggccttgacacgcgctacgctgcgggctgcgaaccagaagccgctcctgcccgaagtttgctgccattcccctactcgaaaatctcacttggaagggagctcgcagtacaatcgcagtcctgctgagtcctaagcatagccagaggtcgcgtctcctcagcaatttagagaaaacaaaacaatttgcagcctcggctttgcgggaggacatcatggcaatcaggaacatgcgcagtgcgattctgcaaggatgctgcactccctcgaacagtgggcggaacaggcaaacgctcggcaaggccacacgcaaaatgcccttaattccggttagagttcagttttacatagtgcaaaatgcccataataaaccacactgtatatatagtatgtttgcatacatgtacaaacaaatatcggccacaataaacttccaaaaaaaagtttgcagtcttatggacagctgttttaagtaaatacgatagctttcacatttgcatttgtttaaacatttgtttttcaaactaggtttctatagaatcgaagaaattaaaagaacacattctaaataatttccatgcatatatttaccacaaaatcattcaatatgaaaaattccaaactttccggaatataaaaatcctgctatggcaagtaggaggtaaacaactaaattaaatgaaaaattcatggtggtcataccgaccaataaaatttttattattatttggaaaatggctataacaccaaagcgaagtaatgctaataatcgggtaataaaatgtacacaattctcggaatttgggatccaaatcttataaattgccaacaacacgagtcgtaaagtgttttttaaatgatctaaacttttgaaagtaacaagatccagacacaactctaataaacttgctagattaatcaactttactgtctatttacaaataacaatacaactagagcgataaaaggtatacaattcgcaatctgttaatttgcagaacaaactcagccgtagaatgaatcaaaataaaccagattattcaagctttaacgagctgttacgaattcaatatacccattgtcgtcagtaggtatttgatatcgcaatacattttcccatttaggtaaaatgagtcaacaacagatcgtaacaaaggcaacaatccatttcttgcaattgaatggcttgtctgttccaacccagctgattgaatccaacttgtttttttttcgcgaacgagagaaagttgacgaagttaaacaaacaaacttatttggcgatacccgtattgggtcacaggcacggaccaatagaacgagtgaccactgtatctgcggaaacgccaagtgcaaggtacttcaaaatctgctggcggctaaatcagcaaaaagtggaatccgaacacgataaacttaatgacggtacctgagcgtcggttgcttatggcttgtataaacaaaagaattaaatacaaagtgaaggttgcattaataacaacaattaccgctctccccctatccatagagccataatcaatgccagtcccgaagaaaaatggctgagtggtaaataaatatttaaaagaattcccatgaacgtaaatcgtctgcagttattattggaatgtatactagaataaataggttttatgacgaccaatgacagcaatcagcattgctgataacttggaataataagtggtctagcagttgtcaaattgaaaacgttttcttataatgtcagagttgaacatattccttcaattatctagtaattccgttctcaagaactccgagagttctatgaaatggatgccattaagattatttttacatagaccataagtatatagcagcactgaactttactgatttacgaggccggaaagagtctgaatcagagataaccaaagatgacacaatgacccagagtcatcttcaaattccaagtgggatgtgtgtgattaatctgtttataaatataaaattttccccagaaaagtgcagctaacttttcgaccgaattgagaacacacactttgcagcatccacatcttttcatttcggaccgcctccgccaagtgacatccacatcgaatttggaacagccggctgggaggtggagtccatggacggcggttcgaggcgaaagacatcgcaagagaacaggttgccctgccgatggagtgaagtcgtgccaaagcaaaaactcgtttctcgtgactgactcactccccgataaaaagcgcagaaaaatgggctaatcacacaagcagatacaaagtaaacttctttagatgaaaactgaactgaactgaacgaatccaaacaaaggaagtcggagaaaaggggcggaaatgaactgaaaagttataaaaaaaaggtgcagacgatcgagaagcagttcgctatacttttaggaagaaacggaagccatgtacactgacagaaacagaagatgctcacgtgcccgcagatgcattatatcatcttgatactgaaagttgagtcagcttcattgctcagcgaatctgatatgaaggttggcaaatttcttgccagcttatccaatcgcttatcatattgtaaaccttggatgaacttgtgtccattttccgtttgtcttcggatttcgaccagcgtcataagttctccatttgcgtttggagtatttgattaatgattcgaaactctgcgcttatctctgcgttttcatatacataaataatagtacagtgtttgttattatgtttataactttcatctcggatttagcattctacatatcttgtttattagtgctatttgagcaagtggctttacatttaattatttatacccagacttgtcattctggaaacgttatccctatttgcatttttttatttttggaatttgaaaatagtcatgcaaaccgcttagtcggttagaatcaacttgtttggtttgctttaatgtttatcttactttaatcctaaacaaagcaaaaacaatcgcttactgttgaaagtcatctgagctttttgactatttttattttgattattttttctcggctcaacttcgagctcgaatttcgaatgaaatcaacaaatgcttcccgtttttgtaaagattagatttataattctgcctattcaagctaaatctatcacgtggggctttttttcagagtctgcttccaagttctgcaaagtgtgtggctgggaaatgatagaatagaccccgaaactctataaatacacggattccgctcggctgggtgtcgttcccaccacacgcacttgtatctcaggtcagggatgtgtggcacatatctacaccgaaatatatgtatagtgtatatacatctgcgggtgcgtgtctatgtctgcgggagttccttttttgagtgttttgttgggatggagcaattagtgcagtgccgccaggtgggatttctgggcgagaagggagggcggagcatacatttcgagacaggaagggcgctatacctactaattcgacaccgcaaattgaataactcgcttctcgggctgggtaaattgaaataaacagcataaatgagccgacggacactcaccaacatcgacaaccgccgcctaagccaattaagctggctgttggactcgggcacgtgaaagatgatgatgatgcgacgcggcgtccaaatccaattagccgtaggatccagcgatcggtggcagtttcagacttccaggctcgtatcccccaacggatgctggaagggaagcggaggattacgtcgccggactttcaataaaacacccaatttggacagctaagagtgcagcttgttcaacttataaaaatgacttgggcttcgttttacaaaactaatggttgttcgtgttaaatcgtgtaaaattccagtcgaatttggggtaatattaacagataaatcaaaaccgttgggaaagtttgttgaacaaagaaaaaacaacaaaaattaaggtcgctggcgcaacgaggatttcccacttttccagcttccagtggcccttttggcctaattggagtcttggtagcaagt

SEQ ID NO: 2606 - DNA, 3917 bp, DROSOPHILA
agcatccgttgggggatacgagcctggaagtctgaaactgccaccgatcgctggatcctacggctaattggatttggacgccgcgtcgcatcatcatcatctttcacgtgcccgagtccaacagccagcttaattggcttaggcggcggttgtcgatgttggccactgacgtgtgaaatgggtgtgggctactacaccgaagggaacacgattaagagcagcagctcagcacgttagtcagtttgaggaagcttcaccgagacaggaagtccttcgaaaagcagtcggccatgggtgaagtagctgccacagtggagcctctggccgcggtcaagtcgaaatccatgcgatcccggaagagacgacagcgtcgtaggcgacaaatagcctacctggccatatgtggattaagtgtagccatattcggcttcgctttggccacgctgatccggcccacaaccgcccaggctgatgcagatcccgggagctggcgcaagggatatgtgggccatggcaccacgcacgaacagcttggccagccccattggccaccagtccagtacactgtataccggccgacaaccaactacacaaaggcaccaccacctcccacgtccgccatgaaccccattttcaattttacacactttctatatgacaaggttctttatagggatgaacccattccggagggttacattgtcgtaaagaattcggacactttgagcttgggtcccaaagtggaggagaatgactggcgggatctattggctcattattggatggttctcatctgggttgttattctcgtggtgctcattatagtcataccgttcattgccgtttgctattgctgtttctgttgctgccgacgatgtcgacagggatgtcctccgtgtaccagtaaacaggatgctcagcggcgcttctgttgtggcatctgtctgttgatcctcatcatcggactgatttttggcatcattatcgcctttgttaccaacaaaatgattgacagcggctttgccgagacttccgagacaatgaagcgcggcagcgaggacacttgcacttatctgaaggatgtagccgatcacgttcaccatctgatgatgtacaactacgaggagatggagactcatgtgcttgatcaattaacccacgctcaccggcacatatttttggatctctccgacacatcggagagtaattccttggcagaaatggagcgagttttggagaacatgcccgaggctctggagctgatgaggcaagtggagaagatggagaaagatctgcgcttctatggctcccaattaagagatggcgtccgtggcattaaacgagatgtcaactttgcagtggccaatctctgtcaactgcagatgtgccagaagttcctgattagcagcaatatcgaacacattgattcctcgcaatgcctgcacttcgacaacctcccgaacaccaaagaatttgtagagggaatggagaatatagttgcaagtgagtattacgctatacctcaacggggactctcgcgtctaaagaaggttagcgacaaggtgaagacgcaactctccttcgtggtaccacccatgatgcgggacttaacgaagggcaggacaatcttccgagaacatgcgacgaatgtgcgcaacattgtggagggagtactaagtgatatccatataaaaactctgcactcgactaagtcattcgaggacgtctacgagcggtttggccatgatagaaacgttgtcagcctgattgtgtgcttgcttattcttctggtactttttattttgatctttgctctactgtgcggttgctttgggcgccgacgaactggatatggtgatgaatgctgcagcaagtccaccggagccacctgcctgcttctagccatactgctgatattctgtgttttctccttcatcgcactggttggacttttctactttatgctgggtatggtaacctaccagggtgcctgtgcaccactgagagatcaggagaacaacacattgttccggcaactggacgcgtctatagatctgaatcactatttgccgccatctgaaagtaacaaggaagtggtgcaaccactaaaaatgtcgagtgcaatcaaggcttgccacgccaatcagaccattttcgatatgatgcgtcagcataacatatatgacatcaacgatctgacgcgcataaaagtgatgtcacactcacaggaaaatacagattcgattaaggtcttcgacgaggacctgtccaccgtggtactcctgacgaaggaagaacgtgacgagttaaagacagcgggcgagagcaagcttgcgaagtaccatagctccctgtacatgccaagtctgtgcacccagtttacgcccatgaacctgaacgccctgtccgagcagctgtataagctatccaacgatctggagtatccggcatacggctgggccaaggtgtcattctggaatgagggcctcaacaccaaggccttctatcgcaattttgtaccgaagcttacgagcctcgtagagaagatgaaggccaatctaaagaagatcgacgagttaatttcgtacgagaaccacgactttaccaatacaatcaaaattctcactgccacggccatcaactccgaacagttcatccaaacacgcggcaaggactatatcaacgccctaggaggcaatctgacgaattccattgaccagatgatcgacgactacatagatatgattataaaggaggccaacgaaagtgtgggtcattgtgcacccctgtcgtacatatattatcgtggagtcgatttgatttgccaccgtatcgtggatcccatcaatggattctgggtaggcatactgctgtgcgccctgctcttcctgcccatcctgttcgtggcccaccgcctgatgtgcctctacaagaaaatctatccttacctggctaccgtaggagccgctggagtggtcgagggcggaagcgattatctgtacgatgcttatagtgaacgagatcgtgaacatgtaccattggctaacgttcccaagaagcgtcgcaaggcctacgagcggcgacgggagcagcaggattacttcgaggacgcctcgcccagcgtttcgcgtggcaatcgctctggcggagatcgtggtggcggcggaggtgatggagctcctggcagcagcagcatgcgttacaacgacatggcgccaacgcattgggaccacgagccaccacgataccacaatcccccagctgcgccgccatcatcggagtacgagcgtccgccgccctactactatccgggtgcctccgagcaggattagacggacggaggcggtttgtttgagaggtggcaacatggatgattttattttgaacccacacgcccacggccccctttttccatatatgtaccccctactgagactgtacttttagttaaaggcctatacaaaaaaataactgaaattatataatttaattaagtagtatcgtagcatcacgtgtgttatcactttggcccggccaggagatctgccattgacctggaagctggagaataacgaacgcatagttaatattaagtgcgggccgaagcaagaaagcaaatacgaaaattctcaaacacccatttatagttactttaaaaaatgttgccaaaagacgagcacgatgtcacggacgaatccggcgggaattgtcccagccgaagcatttaatgaaccctggagtacggagactctgggctagaagggccgagcggcaggcgtcggatctgatgagtcccttgaagaagttggccattcgccgggtcgcacggccgcagaagctttaaggaatctcataattttattatgcacacactcagagcaggcgagacatacccaaaaaggaaaacaaaacataat

SEQ ID NO: 2607 - protein, 995 aa, DROSOPHILA
MRSRKRRQRRRRQIAYLAICGLSVAIFGFALATLIRPTTAQADADPGSWRKGYVGHGTTHEQLGQPHWPPVQYTVYRPTTNYTKAPPPPTSAMNPIFNFTHFLYDKVLYRDEPIPEGYIVVKNSDTLSLGPKVEENDWRDLLAHYWMVLIWVVILVVLIIVIPFIAVCYCCFCCCRRCRQGCPPCTSKQDAQRRFCCGICLLILIIGLIFGIIIAFVTNKMIDSGFAETSETMKRGSEDTCTYLKDVADHVHHLMMYNYEEMETHVLDQLTHAHRHIFLDLSDTSESNSLAEMERVLENMPEALELMRQVEKMEKDLRFYGSQLRDGVRGIKRDVNFAVANLCQLQMCQKFLISSNIEHIDSSQCLHFDNLPNTKEFVEGMENIVASEYYAIPQRGLSRLKKVSDKVKTQLSFVVPPMMRDLTKGRTIFREHATNVRNIVEGVLSDIHIKTLHSTKSFEDVYERFGHDRNVVSLIVCLLILLVLFILIFALLCGCFGRRRTGYGDECCSKSTGATCLLLAILLIFCVFSFIALVGLFYFMLGMVTYQGACAPLRDQENNTLFRQLDASIDLNHYLPPSESNKEVVQPLKMSSAIKACHANQTIFDMMRQHNIYDINDLTRIKVMSHSQENTDSIKVFDEDLSTVVLLTKEERDELKTAGESKLAKYHSSLYMPSLCTQFTPMNLNALSEQLYKLSNDLEYPAYGWAKVSFWNEGLNTKAFYRNFVPKLTSLVEKMKANLKKIDELISYENHDFTNTIKILTATAINSEQFIQTRGKDYINALGGNLTNSIDQMIDDYIDMIIKEANESVGHCAPLSYIYYRGVDLICHRIVDPINGFWVGILLCALLFLPILFVAHRLMCLYKKIYPYLATVGAAGVVEGGSDYLYDAYSERDREHVPLANVPKKRRKAYERRREQQDYFEDASPSVSRGNRSGGDRGGGGGDGAPGSSSMRYNDMAPTHWDHEPPRYHNPPAAPPSSEYERPPPYYYPGASEQD

SEQ ID NO: 2608 - DNA, 12366 bp, DROSOPHILA
gaacaaattataaaagagcgagggaactgtgctcaaagctcgttgcttaggatccgatccccaatggctgttgagtcaatccacttgtagaatttacagcccgcttacgtaatccctctcctaaaaaaaaaaacctcagaaaaacgctcctgccaaccagccagcacaaagccatgcagtgaaacacccattaattttgttgttgtgaataattacatatttttatgatcctcgtcatattttttgtgaagtgcctttttgagccaaactttgttatttcgatttatgttgtgaatgttttacaaatgtctaaggtttgtaaaaaaaaagattcaacatttaaacttcagtcaatttatttgagtatccactgtacatcccaccacgccttctttactggctctcgcttttccacatgctttccgatatttcagaggtccggaaaaccccagcaaagctgcagcccaaccccaaatggtttcaataaagagcccagcccagaagttgcccttacaacaacaaaacctacaatgcacttctacagcggcgggaaaatgcgggggatacaacaaatcatcaactgttgcacacccgaaccgttgctgctgttgttgttgtcggtggcttcctagctttttttcagcgtgtttttctttttaaccccgttttgctggaaattaaaaattcaaaaagtcaaaggcgcaagctagagagcaacagcagctctcttgctctagcgttcgggctctctcatttttggagacttggggaccaagcgaaaagtctccacgaaccgcagccctattgcctgtttgtgtgcgtgtgtgtgtgagcaagagcgttcctttcgagagaggaggatttgccgagttgtgtgtgcacgaagtagaagaagcagcgctggcagcgacgccgactgcgctgccttggcgctcgggaacttggagcccagttgccgatcggatcgccagaggatcgccgctcactcagtgtattggtgtcaagcaagacggacgaaatattgccgacgacgcgccgctgccagaaagagagtttcttccgctcacgcgcgcccccctctctacatatacatatgtttcttgctctcgcgctgagttgtgaaaatttccacaagttaaaattaaatgaaaaaagtgcaaaggaagcaggcgaaatagcgaatagtaatttcggtttaacaactgcgggcagtgcactagtaaccctttaaatgtgatgaaagagtggagaaactattggtgtttccaacgaataagtttaaacttctaatacaaactgaataaggtgcttataatgtttatttaacatacatatagtgatagtttcagaagaacataaattcaaacttaaaatacaatacgtacaaatatgtaatcgtatacaaaacagtgacgaggagcgaaaatggaaggctgtatagtaatttaggaccttgtatatgcgatatctgcgatataatccccccaaccgaagaatccgctctgtctcgctcgctcagtatatccgtctccttttaaaggcgtacacgtacccaaagggggtgtaaagcagagcgtatgtgtccgtgtcccctgtaaagtgatctctccgcaggcaaccgcccacccctaaaacatccgctcttatcaggcgcagtgtgcgtgcgtgtatgtgtgcgcctggggagggggtgtgagtgagcagcggatgtcggcagagcagtcggcttcctgcgtcgaggactttgacttgttcagtctctcgccagtctttctcgagtgaggacgtgtcaactaaaattgatcctctctcccgcactcgctcttactttatttcacacacaacggtaaaaaaaataaaaaaataaaaaaactcaacaactagtggcagaaaaacaatacaattccatttaaaagccagacataagtgagaaatacacatacatattagtgcgatcgcgcaggcgaaaaaagcttttcccgctaagcttttctagtaactgtttggcggtgccagtgtgtgtttgtgtgtgtgctgatctctcccgctctctccccacatcgaatggtttctcaattgatttgaacaagtgcataaaaacaataacaaatgcaaacaaacgaagagtgcaaagcatagacagcaaaatagaagcgtggaaaacataaagcaatctaaagaaaccacatgcatgtgtatgggtgccaggaagacgaaatgggaatttcgtgggcgagtgggaatgattttcaattaagtgtacaaagcaactgaaactgccgtagcgataagataagaccggctgcggcaaatatttagcaagtggaggaagcaagaggaagcgtggtttcaagacaaggatttttttgttggaattgcgatcaccgaaagtgagataacggggacacgaaaaaaagcgccacgaatattccattccgtgactttcctctgatggaattaaggctggtgcgtgtatgtgtgtgtttgtgtcgtgatcgctccagtttccagttggcaggcctgtaaagttttccagtcaacctcgtccatttgtttctctcctaattccacaccctttggcaagtttccaagtcattcacgctgttgctgtcattccagtcgcgggctctctgtcccacacacgcacacattcatgcatatacgcacacagccgttgcagtgcgtgtgcgtggctttgtcgatgtttcttttgcctgtctccccatttgaaacacatttgaaatttcctcatttacttttcctcatcggggcctgcataatgtgctcgtctctgaccctttggggtcgactcttaaattaaactcaattgaaagtcgacagcgcgccagcagagctatttccagctgcaggactctgcggtttgcgttgggaaaaggcgaaagtacacaaaatgctgaggccaagaatttaacttggataataagtttagaccccttgatttcaaaccacagtttagttattttgtaatgtttccctcgaaaaaaaaataggaacactgttgatgtacataaatatgtacagaaagtctctattttttaatacttaaaggcgtacatttaacctttggattttccttgatcgcagcacgccctggaatatatgttttagcagctgtcaggccccaaggagtaagaatccgaacccaggacaacgaaaggacctttgatgccccacttgcatgaggacatagatcgcgatcgcacacactcggacatcgcttagtgacgcaaccacagcctcccaatgaagatggcatctcaacgcttctgcctgcggtggaacaaccaccagagcaaccttctgtccgtcttcgaccagctgttgcacgcagaaaccttcacagatgtgacgctggccgtcgaggggcaacacctgaaggcacacaaggtgagtggatgtagctgtataattaatagtgccgaaataaaaaaataattttccaaaaagactaatttaattttaaacaataaaataaaattcattaattatcaaaaagcaatgtaagatttagatagaaacctattttttttattatcattactttactttaactaagcttattgattcatcacagatggtgctatccgcctgcagtccctactttaataccctctttgtaagtcatccggaaaagcatccgattgtcatacttaaggatgtgccctactcggacatgaagtcgttgctagactttatgtacaggggcgaggtctcagtggaccaggagcgactcactgcattcctgcgcgtggccgagagcctgcgcatcaagggcctcaccgaggtcaacgacgacaagccctcgccggcagcagcagctgcaggagcgggtgcgacgggctctgagagcacagccactacaccccagctgcagcgcatccaaccgtatttggtgccccagcggaatcgctcgcaggccggcggtctgctggccagtgccgccaatgccggaaatacacccaccctgccggtgcagccatcgctgctcagctcggccctgatgcccaagcgaaagaggggcagaccccggaagctatctggcagctcgaatggcacggggaacgactacgacgactttgatcgcgagaacatgatgaacgactcctccgacctgggcaacggcaaaatgtgcaacgagtcctactccggcaatgacgatggctccgacgacaatcagccgaacgcaggacacacggatgatctaaatgtaagtctggttttaaaaatttctaaaaggtggtggcaaaagaagcaccgatgcactgcaactacatttcgaagttcgaagcgttcgctaaaaatatttcgtgtaactaattcattttccataattcccacccgcaggaaagtcgcgattctctgccctcgaaacgatcaaagaactccaaggatcaccgcgtggtgagccatcatgaagacaacagcacttccggtgagtcctctttaccaatacattcccgcatagacagcgcgaagcattacctagttctaagatcatttgcctagtcctaagacaatgcaccatcaaccattattaagtcgactctcatgtgcaccctgcaaagacatataccgaaatccaactgaatccaatacagagccaggctgaagtcacataaccacattcgaccaatctcatctgcgaatatcggaaaagctaaaagggattttacgcatttcaagtagtagaaatctaatagcaaaaactcgcgtcggtttctcccccgcttagtgaaaatgttaatgtaaatgttaaagaaaatgtgcgaaaataatacgaaaattgttaagtgaattcgcaacgctcgaggtatcttccgtccgtcggcaggtgagtgtccccaacaaccagctaatgcagttgatgcccaagaaatgcaaatccaccagctgacgaagagattattgtgaagttgagaatcgggttgagctcacagggattcatggccgacgtgataagaatgatcaagaaacatttagctaaaaaattgtccaaatttaccgcgcctccaaatgtcaagagtagcaagataactccagaaactgaaacaaattcgccacctctcatgaccatcactcacaacgaaatgctgatacctgttgtccatttccgatcatctcctcgaaacaatgcaaaaattaacaaacaacaacaggaatatgatcaactgaaaactgtcaatgaaaacagcaaaaaaaaaaaaaaactttcgaacacgcaacgcgttgaaaatggcttgaaatccctatagcttttccgatccgatttgaaactctttctctcactcgctcgcgccatgtgttttgcctttctctcgcatacatcctgcacacacaaatctacacccatatcacatcatactatactatacttatacgccaaacatttgtaaacttatttatgagtgcagattcatagacattaaaagagatttgcattaccaaatgaatatttaattcatattggtctttacactttacactttgaagtaataagatcaaaaacttgcagatgattgtggcgtataaaagtagtatcggccagtgaaagtatagagttaacctatatttttacaatttttagacggaaacgacagcgatggcgaaggtctggacacatcatatatggaacctcaacttatgctggacgaatatgacgagcccgtagagttcaagtacaacccgctcaccgacaacagctcacccacgcaggaccacacggatggtagtcacctcaacgagcaggcgcgccaacaagccttcctcatcgctgcccagagaaaacaccaggtggaaacagcagcagcggcggcggccagcggaatcaaacttaacattatcggaatggcggctggtggagcgcaggtgaaaagcatggtcagcatacccaaactaacgcccattggcaaggtcaacgccgcctccacgccattggtctcgcctgccggctccttttccacagccacggtcaagccgcgcgtccagaagcggcccaaactgggcaaacagaacggcgatgtaaaaccggctgtgtttagcagccaggaatacctcgacatttacaacagcaacgatggattcaagttgaaggctgctggtctgagcggaagcacgccgaacctgagtgctggattaggaactccctctgtcaaaaccaagctgaatcttagcagcaacgttggcgagggcgaggcggagggctcagtgagggactactgcaccaaagagggcgagcatacgtaccgatgcaaagtctgctcccgcgtctacacgcacattagtaacttctgccgtcactatgttacctcccacaagcgaaatgtgaaagtgtacccctgtcccttctgcttcaaagagtttacgcgcaaggacaatatgacggcgcacgtgaaaatcatccacaagatcgaaaatccctcgacggcgttggccacagtcgcggcagcgaatctagcaggccagccactgggagtttcgggagcctcgacgcctccgccgccggatctgagtggtcagaactcaaatcagtcgctgccagccaccagcaatgcgctatccacctcctcctcgtcgtcgacgtcctcgtccagcggatccctgggtccgttgacgacctccgcaccgccagcaccagcagctgcggcgcagtaatctctgggcacctcacaccaagcccaaaaaagcacacactcaaagaaatagtgaggttgaggcactcgcgaacgattggaggaagcatgttgcagcgccaggcgctcttcgggatttagttgttgttggggaggggagttaaagtaaactttttgttgattttgtttttagttttttacttggcttcgatggagctgcagaaatctccaagccagcagacgtttttatgttgtgcaatttaccttttcagttacaattacacttattttctaaaccccctttcaaagacccgatcagaacggaaagctaatctaatcctagcaactacccttaagatttacgattattatttatccccgatcgccgacaacgtgtcgatcgttttttattagcgcgtagtcaaagaccgaaaatcaagtagttgctttggctgacactttacaaacccatccactaggggttgcctttttattggacaccagagcggccttatatgcgaagtgtatccgggcaagagttacactaaaaaccgaaactaaacctgcacttttagataattaaactatatatacacgcggatatgttatacataatgatataaataatatatataaacattgaatggtatgtctagctgtagttctattaattaatttatcaatatcactatgttcgatatgctaatgttaattctataaaattattacaagccgaaatctgaaaacagaagcaggataatcaatgtaatgttaatcttgcgagagggagcgcagatctaccttgttgccttcaaatgaagctagttaaaagttaatcccgggtctgggtcaaggtcgttgggcacccagcaccacacccagaatacccagcacgtccacaccctcaaaaaccaacccggtcaccggtcacccacaccgttccccgtaacatccgagacccggcgaaagattgaaaatgtttcgtcgggatcgttgataaagtgtaactacagatagtaacagcaaccatagttgtaatgatataacgctaatattaatgagcataaagtaaacctaatttatctatcaaacgatttatgttgtatatcggaggcttaaattatcgccaaagaaaatgaaaatcaaaaacaaaaacaaaagcaaaagcaaaacaaaatgcagttgaaatccaacagtaacaacagagcagtcgcagcagaccacaaaatattgttgttaatgcgaaacgatctccaaacaaaataaagaacttgaaaagtagacaacaagtaattcctcagtcaagtaaaacgttcaaatttgttgcaattcgagaactaagagaaaactacgaaaaagattcagaaaattacaactgcaaaaaacgtacagaaaaccaattgaaacaaaattaagcgcaatcaaataataaacaagctgcgtacgctaacttattaaataattttgtttttaattctttatttagtggtagctagtgcaatttagttagtaagccgccgtctcccaaacaccgactaaccaatatcgcaaatatatatttccacccaatcgaaccaatcttccaaacatctcttttggcgttaattttaaacaatcaatcaaacaggtcatgcatatttatttgtatgtgtttgtttgtactatattttactttatttttagtctacttttttatatgaatacatttacatatatttttgcattcaacaactataaaccttcagcaattttctcgctttcaaacaaaaatgtccaaactcgaaacctgaacgaggaatatagctacatatatagagtcatgctttgatgcccaaagaaaatgaaagataagaatcgtaatgcaaggcaaacttccatgtgaaaatgagaaaattgtctggaaattgttggtaacatggtttccgtttaaattagctaattacgaaacacactttacgatatatcatacgatacgttaaacataattactaaatagtgaatcacacgcaatattaatcaagcagatcctttatattatcgtttaaaactgaccaacagaagaaaaataaaatacacaatgcaaaaaacactcaaaacaaaatcagttctgaaacacaaaattgattgttttaattcatttgtttgggattgggcaaattccagtcaaggagctgctttcctatttaaactgtctttaatgggtccggaaatataattcatattttaaatatctttgattacagttactcctactaaggccactccagagctctcccagcggctcttcggctcctcttcgacgacaatctcagcaacggctccaggcggcagcagcactggtccttcggaaacgatttccctgctggagatcagcgatgaaagggagtccgccccggttcacctgcctactattttgggcctgaagatacgcgccattaacactacgacgcctgcgcagcaaggatccccccagacgcctacgaaatccaagccgaagatacggcaggcgacaggaagcaataacagcaactctctgctcaagcaacagctgcgaggtggagccaaggatcctgaggtgccgcctgccaccaggatcacgggggcagtgacccccaatgctgcccttaatgccgaggaacagtccaaggagatgccgaagaaaaaccaggacgaggtcaacgcctgcattggtctgcactcgctggcaaatgccgccgagcagcaggctgctcaggtggccagcactgggaacctgcaccaccagctactgcttcacatggcagcaaacaactccatgctgaacaccaccgattactaccaacagcagcagcaggagtctccctcgagtgctggccagtttatggatgacgacctggagctgctgtctcttaatgatcagcaggataaaagcgatgaacccgatcatgaaatggtcacgctggctgatgagaacgctggtttgcctggttaccagggcaacgaggcggaagccacacctgcgcaggaagattcgcctgctgcggagacagcaacggcaccaccacccgcgcctagaagtggaaagaagggagctaagcgtccgattcaacggcggagagttcgacgcaaggcccagtcgacgctggatgatcaagcggaacacctgacagagatgtccgtgcgggggctggatctcttccggtatgcgagcgtcgtggagggcgtctaccgctgtaccgagtgcgccaaggagaacatgcagaagacattcaagaacaagtacagcttccaacgtcacgcctttctctaccacgagggcaagcatcgcaaggtgttcccatgtcccgtgtgctccaaagagttctcgcgaccagataaaatgaagaaccacctcaagatgacacacgagaactttacgccgccgaaggacattggcgccttcagccccctgaaatacttgatcagtgcagcggctgcaggggatatgcacgctacgatctaccagcaacagcaagatcattaccaccgccagttggccgagcaactggagcagcaaaacgcctcctttgacagccgggacagttcgcttatcctgcccgacgtgaagatggagcatgcggaagaccaggatgcggaacaggaggcggaactgagcgatggtggctatgacgcctccaatccagcagcagcagcagccgccatgttgagcctgcaacaagacgtaatcatcaaggatgagatacagatctctccgtcgccctcgcccaccccgcccgcttcctgcgctgtggcggagggcaagtccttggctttggcctctaccgcacaaaccgcaacgtaaagactttgaaggaccagagttacggaaggactacgaacgcacaacaacgtttaccttaagcagcgagctctgaactgtagaatacatcatagcaacataagcaatcgtggcactcaaacgcaacacaccagactcaaaacgatttttagttaatgtaaacccgtaagcaatattaattctaacacttgctccgtccagaacgccttttttaagcaacactagtatttaatttacctaggacataagttttgcccaattgagcaacgcaattgagcagttcagtgaactttaatgactttcggctttaattataaacaattcgactggccgcttactggatccgcacacgatccgtaaggcaagcaactttagaacttttcatttctctttgtgattttgttaaacctttttatatagacctttgttttttattttttgttgtacatagctatattttgtttaatactcaaagtccgtagtataattttgttcatttccttggcaacaagttggaatcaaatgtattggctaattgtgcaatcttcaaaacgtgttggtggcttcggaggaacgcgacaacgctgttctgcggccccacgaaatgttgtaaacttaattaactactaaggccacttaactaggatctaggtgtagtcataaggcattggatcaatgttccagcgtacaacaaaacggacttccagtgaagagacaactgatatttatacggaatcccaatctggtattatgtattatgatttttacagtttacttaacgcaacaaatacgacttaagacttgtgcgctcaatgactagaaattatagttgcgattttaggataactattcatggaaaaaccacaaacgagtttttaataaagaaaattttactgattaattatttttaaaagcgtttgaaacatatttcattaattctgataaaatcacaaatcgatacacttaaaaacccccacagccaatcacaataattgaataatgaacgtgtacatattttattccttaaagttttattcgattggtgtagcttcatccgtttactgattatttgctcttcggtaccagaaacgtgcccgaaagtcgtcggagcaggtgaggaaagcaggaccattgggcgaatgcgtaatatagcggacaggtccgttgtgtccaagcgagttaagggtcaggcggcagccgttacgggagttccacgagcaaagcgaagtggtggcctcgtcggggaaaagcacgtaatcctctgtgtggttgaatacagcctctgtctggtgctcctgcttgccggtggttccagcgcccgtgtacgtctgaatgggacgactggtacacagctcccacagataaaccagtgaatccataccggaagataggaggtactaaaatgaataagttaaaatcttgcacagccactacccatagtgtcccattacctttccattccgcgtaaactccagtgagcatattgccgctccgccatgcgcctcggcaatggtgttgatgcaccgcccgctgatcccatcccatattttgatgtcaccatcatagctgcctgtggcgtagagtttccccgtgggcgaatatttcacgcaagtaactccagccttgtgctgctgcgagggaatggcactcacgaagcattgggtggtggccacatcgtagacccgcaagacgttatgttccgttccgatggctacgtagtcaccagtaggatgaaaagacaggcacagcaccggctcgcagtcggtgaacaccttgtgggccttctttaccgaaggcttggcaatgtcaaacaacttaacagtgccatcgcgcgaggcggaggccaggatgtgctccttgggatggaactccaggtaagacacttcatcagtgtgatca

SEQ ID NO: 2609 - DNA, 3802 bp, DROSOPHILA
tcaagcaagacggacgaaatattgccgacgacgcgccgctgccagaaagagagtttcttccgctcacgcgcgcccccctctctacatatacatatgtttcttgctctcgcgctgagttgtgaaaatttccacaagttaaaattaaatgaaaaaagtgcaaaggaagcaggcgaaatagcgaatagtaatttcggtttaacaactgcgggcagtgcactagtaaccctttaaatgtgatgaaagagtggagaaactattggtgtttccaacgaataagtttaaacttctaatacaaactgaataagcacgccctggaatatatgttttagcagctgtcaggccccaaggagtaagaatccgaacccaggacaacgaaaggacctttgatgccccacttgcatgaggacatagatcgcgatcgcacacactcggacatcgcttagtgacgcaaccacagcctcccaatgaagatggcatctcaacgcttctgcctgcggtggaacaaccaccagagcaaccttctgtccgtcttcgaccagctgttgcacgcagaaaccttcacagatgtgacgctggccgtcgaggggcaacacctgaaggcacacaagatggtgctatccgcctgcagtccctactttaataccctctttgtaagtcatccggaaaagcatccgattgtcatacttaaggatgtgccctactcggacatgaagtcgttgctagactttatgtacaggggcgaggtctcagtggaccaggagcgactcactgcattcctgcgcgtggccgagagcctgcgcatcaagggcctcaccgaggtcaacgacgacaagccctcgccggcagcagcagctgcaggagcgggtgcgacgggctctgagagcacagccactacaccccagctgcagcgcatccaaccgtatttggtgccccagcggaatcgctcgcaggccggcggtctgctggccagtgccgccaatgccggaaatacacccaccctgccggtgcagccatcgctgctcagctcggccctgatgcccaagcgaaagaggggcagaccccggaagctatctggcagctcgaatggcacggggaacgactacgacgactttgatcgcgagaacatgatgaacgactcctccgacctgggcaacggcaaaatgtgcaacgagtcctactccggcaatgacgatggctccgacgacaatcagccgaacgcaggacacacggatgatctaaatgaaagtcgcgattctctgccctcgaaacgatcaaagaactccaaggatcaccgcgtggtgagccatcatgaagacaacagcacttccgttactcctactaaggccactccagagctctcccagcggctcttcggctcctcttcgacgacaatctcagcaacggctccaggcggcagcagcactggtccttcggaaacgatttccctgctggagatcagcgatgaaagggagtccgccccggttcacctgcctactattttgggcctgaagatacgcgccattaacactacgacgcctgcgcagcaaggatccccccagacgcctacgaaatccaagccgaagatacggcaggcgacaggaagcaataacagcaactctctgctcaagcaacagctgcgaggtggagccaaggatcctgaggtgccgcctgccaccaggatcacgggggcagtgacccccaatgctgcccttaatgccgaggaacagtccaaggagatgccgaagaaaaaccaggacgaggtcaacgcctgcattggtctgcactcgctggcaaatgccgccgagcagcaggctgctcaggtggccagcactgggaacctgcaccaccagctactgcttcacatggcagcaaacaactccatgctgaacaccaccgattactaccaacagcagcagcaggagtctccctcgagtgctggccagtttatggatgacgacctggagctgctgtctcttaatgatcagcaggataaaagcgatgaacccgatcatgaaatggtcacgctggctgatgagaacgctggtttgcctggttaccagggcaacgaggcggaagccacacctgcgcaggaagattcgcctgctgcggagacagcaacggcaccaccacccgcgcctagaagtggaaagaagggagctaagcgtccgattcaacggcggagagttcgacgcaaggcccagtcgacgctggatgatcaagcggaacacctgacagagatgtccgtgcgggggctggatctcttccggtatgcgagcgtcgtggagggcgtctaccgctgtaccgagtgcgccaaggagaacatgcagaagacattcaagaacaagtacagcttccaacgtcacgcctttctctaccacgagggcaagcatcgcaaggtgttcccatgtcccgtgtgctccaaagagttctcgcgaccagataaaatgaagaaccacctcaagatgacacacgagaactttacgccgccgaaggacattggcgccttcagccccctgaaatacttgatcagtgcagcggctgcaggggatatgcacgctacgatctaccagcaacagcaagatcattaccaccgccagttggccgagcaactggagcagcaaaacgcctcctttgacagccgggacagttcgcttatcctgcccgacgtgaagatggagcatgcggaagaccaggatgcggaacaggaggcggaactgagcgatggtggctatgacgcctccaatccagcagcagcagcagccgccatgttgagcctgcaacaagacgtaatcatcaaggatgagatacagatctctccgtcgccctcgcccaccccgcccgcttcctgcgctgtggcggagggcaagtccttggctttggcctctaccgcacaaaccgcaacgtaaagactttgaaggaccagagttacggaaggactacgaacgcacaacaacgtttaccttaagcagcgagctctgaactgtagaatacatcatagcaacataagcaatcgtggcactcaaacgcaacacaccagactcaaaacgatttttagttaatgtaaacccgtaagcaatattaattctaacacttgctccgtccagaacgccttttttaagcaacactagtatttaatttacctaggacataagttttgcccaattgagcaacgcaattgagcagttcagtgaactttaatgactttcggctttaattataaacaattcgactggccgcttactggatccgcacacgatccgtaaggcaagcaactttagaacttttcatttctctttgtgattttgttaaacctttttatatagacctttgttttttattttttgttgtacatagctatattttgtttaatactcaaagtccgtagtataattttgttcatttccttggcaacaagttggaatcaaatgtattggctaattgtgcaatcttcaaaacgtgttggtggcttcggaggaacgcgacaacgctgttctgcggccccacgaaatgttgtaaacttaattaactactaaggccacttaactaggatctaggtgtagtcataaggcattggatcaatgttccagcgtacaacaaaacggacttccagtgaagagacaactgatatttatacggaatcccaatctggtattatgtattatgatttttacagtttacttaacgcaacaaatacgacttaagacttgtgcgctcaatgactagaaattatagttgcgattttaggataactattcatggaaaaaccacaaacgagtttttaataaagaaaattttactgatt

SEQ ID NO: 2610 - protein, 813 aa, DROSOPHILA
MKMASQRFCLRWNNHQSNLLSVFDQLLHAETFTDVTLAVEGQHLKAHKMVLSACSPYFNTLFVSHPEKHPIVILKDVPYSDMKSLLDFMYRGEVSVDQERLTAFLRVAESLRIKGLTEVNDDKPSPAAAAAGAGATGSESTATTPQLQRIQPYLVPQRNRSQAGGLLASAANAGNTPTLPVQPSLLSSALMPKRKRGRPRKLSGSSNGTGNDYDDFDRENMMNDSSDLGNGKMCNESYSGNDDGSDDNQPNAGHTDDLNESRDSLPSKRSKNSKDHRVVSHHEDNSTSVTPTKATPELSQRLFGSSSTTISATAPGGSSTGPSETISLLEISDERESAPVHLPTILGLKIRAINTTTPAQQGSPQTPTKSKPKIRQATGSNNSNSLLKQQLRGGAKDPEVPPATRITGAVTPNAALNAEEQSKEMPKKNQDEVNACIGLHSLANAAEQQAAQVASTGNLHHQLLLHMAANNSMLNTTDYYQQQQQESPSSAGQFMDDDLELLSLNDQQDKSDEPDHEMVTLADENAGLPGYQGNEAEATPAQEDSPAAETATAPPPAPRSGKKGAKRPIQRRRVRRKAQSTLDDQAEHLTEMSVRGLDLFRYASVVEGVYRCTECAKENMQKTFKNKYSFQRHAFLYHEGKHRKVFPCPVCSKEFSRPDKMKNHLKMTHENFTPPKDIGAFSPLKYLISAAAAGDMHATIYQQQQDHYHRQLAEQLEQQNASFDSRDSSLILPDVKMEHAEDQDAEQEAELSDGGYDASNPAAAAAAMLSLQQDVIIKDEIQISPSPSPTPPASCAVAEGKSLALASTAQTAT

SEQ ID NO: 2611 - DNA, 3144 bp, DROSOPHILA
aggcacaactagtaaattgtaaggcatataatgaacaactactaacagcacaaccaaccagcattcaaaacagcaaacgccatcagcatcagctccaaatccaatttagcaccacgactacataaagtaaaccaaactgagcaagcgccgaaatatttatctctagcaattaaaggcatatttatagagcatcgtaaataccagatatacatacataaataaatctattctgtaagcgaaataatacaaaatacaaccgaaaagtcaagagatggacactcaaaaacaataaacgtattaaactatcaagttgtgtggcgtttcattcttttcattcagacaaggttaaaaagtaaaggacgaaatataagattttgcccattgggtatgctaggtaagccatttaaatttggcgccaaagaatacacttctgatggttgcaaagaattgcatacttttgggagtgcgcttttgcaaactaacggttgattctaagaaaattttaccagctggtaggcacttgctacaaattatgttcgcctggtattgaaaatcaaaaaacttgctacatgggcactgcgatttgacaatctgtcggccaatttgacggcttgtttgaattgaaataccaggcgaacagaaataacagcaggtggataaacaaagttaaaactaatcagcgcctactggtatgcactgcagtatgacacccaagtgtgtcggcgccgcagaaaagtatgccgcataaaataatggttcgacttttgttgcggctcccaaaagtataccaagaattattgtttggcagtgaagaaaccgctactccccaaaagtatactagctttattgaagtacacagattaattacgattctaagccctaaagtattcatttcaaatgatccagccatctagcattggcaggcgggaaattcttagtatctaagaggtcaccagagatggctcataccgctattttactttctaaactgtacacaaaatcaaatcttaaaccaaagcggctttcgccgacagttgaaaatccttgtcgtctgccgtacgccagtgtagtcaagaaggcactcagctccgttgttctcgaaggatatctctcccagcttgtactcgggattgagggccactcgcaggatgtagcgtcggttgatgggaactcgggtaacatccacccactggcagtccaacacatcggtgtaggtgtctgcgcagcccacggaaatgcctgcaaggagatgggttactagtgactccttagaagctgtcacaggtgcacgtaccttgggtggtgttgccacaggtgtacttttgccgtactcctggccggcattcactgtccatcaggcaaaaggaggccttgtgcccctgggccaccttccggtagttgaggtcgtaaacatcaaaggtggcaaaaacattcatgctgtggtagtgtctgtggcactggtgccatacccattccttgtagttagcgtatgggcttacatcggcggtgcccacattggaagccttaacggaaaagcgaagcagtatcctcgcagcgtgcggattcgtccttcggatctcgtaagcgtcggcggaaacacagtgctcttccatggcgcatgtgagccgcgacatgggcacggcctccaggcgggcggttctctcgatgtccaccagtccgatctccaggtcagccgaatggctaacacaggccgcaatgctgacattatggtttctggcattgcagaggttcgggtagtgggactcccggatgcagtcggctaggcgacgctcggttcccctgcacagagtgcccaccatgccccagggatacttccggctatccccgtgctccgttccctggcttgccttggaagcgtagcccaatcctagctgtcggcacaccacatttgcctcccgcatgctccacgaagtgctgcagatcgtaccccatgaggcgccaaagtcaaagctcacctccacgcgtccctcgcggaggacttgaataccggcgagcgctgccttgttagtggccagtcggaccatcatgtttctatagttgttctgcacgttgaggttggcccaaccttggctgagaaccactaggagctgcaacaattgaaaccggaacgaagccatcgcccattcagccccttctggtggagcacacccaaatcgcaaccagttttaaagtcaatggaacaatgcgccagtagggtaacaactggcaaatggggctacatgtgtaggaggtatattgtgcgttgtgcttcccaacggatcgacccacatctgcttggcaggcgggaaaacgtttgtatacaaaactcagctggcaaaatgcctattccgagcgcgcgtgctctggtttctgcggtttctttttttgggggtatggagtgcatgtgtaaactacttctgtgcgccggttaggactctagcaacttagtgatggcctctttcagttccgccggcttgaagacaccgcgttccgtgatgatgcctgtgatcagagaggcaggggtcacatcgaaggcggggttccagcagttaatgcccggggcagcgatgcggtgctctcccacgtgcgtcatttcccggtcgggacgctcctcaatgatgatgtgatcgcctccgggaatcgctagatcgatggaagtcagaggggcggctacgtaaaatggcacgtcgtggtgcttggcaaccacggcaatctggtaggtaccaatcttgttggccgtgtcgccattggaggccacctaaggaagggaagaaaccattaatcgaaaatagttaatcattaagaggcttacttacacgatctgctcctacaaccacagcagccacatttttggcccgcagcagagccgccaccatgctatccagaaccagagtggcggggaatttctcgtggaccagttcgtaggctgtgaggcgggctccctgattgtaaggacgagtctctgtgcaataaacgtgctctagagcgaaaagtgcaaaagtgcgtaagtaatcaataaatgtaccaaactctattaagtactcacccagttttcccagctcggccagttggcggaccactcccagagctgtaccgtacccggcggtggccagggaacccgtgttgcagtgggtaagcacccgg

SEQ ID NO: 2612 - DNA, 1089 bp, DROSOPHILA
tgggcgatggcttcgttccggtttcaattgttgcagctcctagtggttctcagccaaggttgggccaacctcaacgtgcagaacaactatagaaacatgatggtccgactggccactaacaaggcagcgctcgccggtattcaagtcctccgcgagggacgcgtggaggtgagctttgactttggcgcctcatggggtacgatctgcagcacttcgtggagcatgcgggaggcaaatgtggtgtgccgacagctaggattgggctacgcttccaaggcaagccagggaacggagcacggggatagccggaagtatccctggggcatggtgggcactctgtgcaggggaaccgagcgtcgcctagccgactgcatccgggagtcccactacccgaacctctgcaatgccagaaaccataatgtcagcattgcggcctgtgttagccattcggctgacctggagatcggactggtggacatcgagagaaccgcccgcctggaggccgtgcccatgtcgcggctcacatgcgccatggaagagcactgtgtttccgccgacgcttacgagatccgaaggacgaatccgcacgctgcgaggatactgcttcgcttttccgttaaggcttccaatgtgggcaccgccgatgtaagcccatacgctaactacaaggaatgggtatggcaccagtgccacagacactaccacagcatgaatgtttttgccacctttgatgtttacgacctcaactaccggaaggtggcccaggggcacaaggcctccttttgcctgatggacagtgaatgccggccaggagtacggcaaaagtacacctgtggcaacaccacccaaggcatttccgtgggctgcgcagacacctacaccgatgtgttggactgccagtgggtggatgttacccgagttcccatcaaccgacgctacatcctgcgagtggccctcaatcccgagtacaagctgggagagatatccttcgagaacaacggagctgagtgccttcttgactacactggcgtacggcagacgacaaggattttcaactgtcggcgaaagccgctttggtttaagatttga

SEQ ID NO: 2613 - protein, 360 aa, DROSOPHILA
MASFRFQLLQLLVVLSQGWANLNVQNNYRNMMVRLATNKAALAGIQVLREGRVEVSFDFGASWGTICSTSWSMREANVVCRQLGLGYASKASQGTEHGDSRKYPWGMVGTLCRGTERRLADCIRESHYPNLCNARNHNVSIAACVSHSADLEIGLVDIERTARLEAVPMSRLTCAMEEHCVSADAYEIRRTNPHAARILLRFSVKASNVGTADVSPYANYKEWVWHQCHRHYHSMNVFATFDVYDLNYRKVAQGHKASFCLMDSECRPGVRQKYTCGNTTQGISVGCADTYTDVLDCQWVDVTRVPINRRYILRVALNPEYKLGEISFENNGAECLLDYTGVRQTTRIFNCRRKPLWFKI

SEQ ID NO: 2614 - DNA, 11282 bp, DROSOPHILA
tcctgcgattgggtccagaaagtggacaggcgctgatcgctgttcgagcaaaactcgcggaaatccttgagcatcttcagctggaagagctccccgtccgcggagttgtttatcgtctgggccttccatttcttgttcggaatcatgtggttccacgcccacaagaaacccactttcttgggcacgttcgtgttgttggtgtgcccatagacgcagcgcgtgacatttgcctccttcaggatgggcgattccacctggtagttgtttgtagcgcaactgtaagagaggagcgattagaaggtatcaaggagcaggagacttcacacatcttaccggatcaaggcaaacatgttgcccgtgcagtgcacatactggtactccttgggcagctgcaaaagtaaaattgtaatgagaaatgcccaacgagatctggttagctcactcacatccttgccaacgctgtacttcttctccaaaacgcagggcaagaagccaaacttgcccaaaatggcttcctggaagaacagcattctgtctgatctgctctcctcgggaaactctgcaatcatagttcaagtttaaacactgtttaaaatacaaatatcttaaagtaccatcgaagagggcagcgccattgggcaggaatgtagtgcaaagcggaatgaaaatgggtccccgcagaggatccgacttcttggtgaacggctctgccattggatccgctggcactgataccaggaaattgaactgattcgccttgcgcatccagccgccaatctgagcaaatccaggataatatacgataaggaatcggtaatgttaactattaacaatttaaaccaaccaagtcagccactatgggacccgatgaggtgacccactcaaccacgatctcaaaggcgaatctcggctgcagcactgtgtgatgcttcacatggccccactccatgcgatcgctcttctggttcacatcgatctccaaatgcgactgtcgatatacgcgctctagaaatcgagaattattaggttacttcttcttcaaaatatatccagtacgaactgttgctactcgtttctgtccaggattgcggagcaggtgagtccctaaggaaattgggcactggagtggtcactggctcatcgtgccagagaaaactgcaaccctgaaactcaatctccaaccactcgttcacaaaggcactgtagtcatccaaaggcggggcgtaatctaaatgatggggtattgtgttttaattgttgatcaaaaatcgagatagatcaaacaacctttggcgtttttatcctgctgcaccacatagtagaaaacaaagccaggcaccacgggcttcttccaatcccccgaagcatggcagatcatgcgctctctgcaggaaacagaattgaacacaattacactttgctaaattcaaaaaaaacccacttgcgcatggcctccagtagatccaggggatgtcgtccattgttcaggcgggttttcaaccacattagtgcgtcgtaggacacaaaggtgcaggaggggagcgactgcgtctgcgagaagaagcccactccgtttaccgggtgcttcatggcctcgaagatttcgggcagcgtggcattcgggctgaacttaatgtcgactgggaaactgcaaggcatatgatgaagagcttgaggggaaccactcttgactgcgatactcacccatcgtcctgatcatctctggcggcgactcctgcagctgccgctgcatcggtggcgggaaatattcgtggaattcgaccgttctccagtttggggcgcacattgatgctgtcatgtggagtagcagaaatataggaattagacgaatcattcacgtaattcaacacaacagctccttatccatgttgggtcttgtgtgttgtatctgggttggggttacaggaatcagcaggccaattgtgtgtgttggttagggatttcgggtatgagattgtgaggggattagtcgagtcgtgataaataaacggagccaggacggatgatatccgatagcctggcccactgggtggcacaaacctttgcagcggtgagtttaattggttatgatgcttttcagtgattctaggtgtgtcatgctgctgaaagccaaataccaaattaaattatataaaaagtacgtaacaaaaccaaaggaaatgaaacagccagccaacaaaatctgaaacacgggatgcacaaatcaacaggactacgagtacaatacaaaaaaagggtgactaaacaacaagccagcaacgatatatacacttagcctaggcccagtatcctgggtatcctcagagcaagccagctatgaccagcagccaaccaaatccccagcgaatcgtgcagtttaacccagggaccgcaattaacaatatctacatagatcattcagttaccaattgagtgatactttcaagtagaactgccgatcaaatgatgctctatgaactcaagcaaccatctaatgaggctgaagaattcgcagatagaatcgtttgctgtgcagttccacttcgaaagtgtaaaatacttgaaattgaagtttatagctcgcttaaattaaatcaacaagtatacaaaactaagccaaacaattcttacggtccccgatttatgcaatgcatgtacagtgtttggatgtaaggtttgtggggacgtgtatgtttgtgtacaaaagagagataaggggccttagatatatttgttggagtcgatataaaaacctgggtcgcttctccggcagtcgattgctgccgactcgctcccggaacggagagttcgtgagtccctgaggagatgggttcgttttcggattcggagcggattggggcaggtcgaaagtgggtggcgggcagacagagacgtttgaaagagagacaaaagcattagataaaaccatccatcggcagttctctcgcaataatcaaaactaatcaactcgaacgtgcgcatttgataaagaaataaagttttgaaattaggcaaatgtgcgcagtttggatgaaacaaaaagttaattttttttcttgagataagttaagtagataacctggttaggctgaggcctggatataatgctggtgctgtgtctccgcttggttatgtgggcgatggggctgtcctgcaagagtgaggcgagatactcgatacatcagggaaaaggcaacgggcactaaaagcgggcttcatgatgcaaggttagttcaaagttcaacaatagtggttatgcgtcttcttcctaattgcttgcctaatctataagcaagactaaaggtcatccaattccttttactgcacgtgtacaaatattctattgtatgtacagaaactttcacaaactgtccaatttaactaacatatcttgatcatgaaacatttcttattacttaatagtcattcaagagtcatccccctcaataatatctgaaattgttagttgcctaatccatccacttgtaatccgatttcaagacagctgtcgggacaattagtcaattaggagtcagaacgcaattacagaattaacgcaacggatcacgaatgcacaatagccaagccaaggaatcgattctatcttactctcgccttgcgcgcatattgccgcttcagcttgctgaccgcctcgatcagtcggacgaagtcctcgacctgctcccgcgtgttatccgcagtcacgtcggggaatatgtcgcatcgctggcaactggcgatcttgctcacaatgttctccctgggcagcaggtacatgcgatagcgccagtacttcaggctctgcgatagaaacattgcgttaagattggcaagtatacgttgtgcgccgggatatacctccatgagtgggtaatccacatcgccacgcgtgcagatgtacaggtccatgtggttccagttgaagttctccaacttctcggtggtgaagttcacgccggatatttcgtaggtctcgtgttgtggggcatggaaacggtagcggtagtccacatttatcggaggatacgggtgtctaaaagagaaagggaacttttggtatgaaattctaaatagcaagccggctccaactcacctgggcctatagccagtgaccgtgatcaccgagccgctcaacgagatcttgtgaaagatgcggccaatggagagcagatactccttgttggtctcgcgcgaaagcttcaccggctgcactgcagatcccgaggaacaaccgctcgcagtcggaggcttctcgtcgaccacgattagctggaagccctgcgccaagcgctgcgacacgatctccttgcacacctcctccgtggagaggggtttccggtaaaccgctctgctctgggcgtaatcgtgattcacatcgtcgggcagcagagtgtaatccgatatcacatagtcgttattcagcgaacgcttgtccgggaagtagtccgtggtgatgggcagacaggcggggatcgtaagcgacttccaatcgacgcctgcaaacggatccaccagcgattagcaggactctcacgagaaatggatgggatcagagcagagaggaagccaacgccggtacaggtgtgtaaatcaaaatcgctcaagctagaaggtctacgaaaatcataaccaaagaggaggaaggactccagtccgggacgagagctgtcaccaacggatgggttagcgtatggtaggtgtgcgtacgaaatacagtgggcagtgggggcaattgggcgtggcaagcatgctaacgctacaaaactacataacggcaacatgctgtatatgctctagtggtcaacatgctcccatctccgtgcggattaccaaatagcgggttccaacctccacctcccgatgggtgtgtccgtgcgtttgggttttttttttgggtttctgggttgtgcagttttgggtgaactactaccaactacggattatgctatagttatagtggatgggtaactacatgcaagggtttcgggtgcggtggccaggctaacggttttaagctggtgagtgcaaagcgaggtaatctacagactgggatggaggatcacccacggacaagtatgatgctatcgaacacctgtcattaggtttttatccctaaagtgatatcaagatatcattattgactaacgctatacaaagatatgcgattcaaggtaatgtttttttcgaattttacaattcctagcgcttttcgttgtaatacttcctgagatttaagtttttaatattatgtttcttttaagaaaattaatcaatcttttatgatattaggtgaactgaggagcaagtactttcttttctagtcaaagcagcaactgaactatgtttctacataagctttttagactataactactatacagccaaatctcgagcaacgaagtgtatcttctagtggtgtcttgtgtgtggttggttgttgtgttgtggttatgtgtgcttgtgttcggatgcatcgctaatgctttgtacagagttcaaaggtggtgaatttgatttgtccaaacctatgatgatctttcctcttccgccgcccgcctccgcatcggggggcgggtctagagcccttagtgcctccaggctgcccagatgatgatgctcgccctcgacgatcggcctcagatgcttgactaaacgatcggtggatggggttcgatggaatacgtatgtgatgggttgcaaatttcgattcgttggttagatccgattggatttcattcgtggcgttgtggaataaggtgaaggggaataaggtgaatcatacgttagattagattagacttagtattcgtttctatttcgagaggggtttctggttaggatgagctacttcgaatgcattaatccccggggttgcggttaatggacggtggcttttgtctgcacccgaagctgtgacggatctccaccaggaaggcgattccgctgcccaacattccgcacagaaacagactgaacgcgggcaccagcagattgagcgccagtgggcggagcctcagtttctcctccagctccgccagtgtggagaaatccttgagatagcccatgcgatgggccttgcgatagcacgtatccagccaaagatcatgcagcccggcttgctgcacatgcagcaggaatcgatggagggcatccttgagatgtgagtctaccctgagctggtactgatagggaaaggagccgtggcaaatcttggagaaatagaagcgtttctttctcagaaagcgctgctgcatatcgaagaaacgccaacgaattgtactgatggggtaaatatactccggatgcatggagattctcttctggctgaagttctcggcatccgtgcagctaaactttgtgctaaactgctcggcatgacccagggaatcaacgatggcgtacacatccgtgggcagcactagaatgcgatacggcagcaggaatagctcctccaagctgttgtctggtcttcggatcagagtcacggtcagagatgaagttagtttggtgctgtacgtttgcccaagaatgaatattccgaagaggatcagaaaggtactaaagcgcctgaccggcttgcggttgccatatctgacttgaccagcaccaggcactcctagtatggcccaaaaatgtccgtctggaatcaggcggcgcacatacacgaagtgcactacgagcagaacaaacagcaagcacagccacatggttaaactaaatggcaggaacacatagaggctcctcgaaatttcattgtccaatgggatcatgaagcagcgcggtgccacctgcgtgggatatgagtagtccacactggtgtttgattgcagtgtgtcgtacaagtgcggactcagctccaccttgccctttacaatcagatccgtgagcgcagccatattcagcaatgaagagccatttacttcaaatctaaacaaatccatggtcacgttcaggtgcatcatcagttgattgatcaagatcccgcccaatccggccagttcccaggccttcgtcctgcgattcttgtaccaaaaagtattgggcacatcctgctgtacgggcaatcgcatcctgtagcctctgaaattttttcgatttgcaggcggaaaaacatgatgcggatcataggaggataatcttcgcatgcgtatcaccctaacagtgggatatggatccatttggtagaagtttctggcggccaccactaccaaagcgctccggaactgcagtttccacaggagttcaaagaagtatttaatgtccttttgcgactcctgctttcttagcaggaacatagtcctcgtgtaacgccttcctctggctctttcggcctgcaagtaaatcaccgcatccttggaatccctggcgaagaccaaatatatggtctcctcatcctgcaggctgctgaagtggacgtgcgaggaatccttgtccgtggccgtcatctgcggcagcatgtagaagtgattgctgctgttgcacatcaggccgcgatgcagatcgtccagatagctgggatcaacagatcccaggctgttcactatagtgatggcatgcaagcgatgcacgcggccgatcctgtccagaaacagagccagctcgaaagcgcggtcaaagttttcggtggccacgatttggtagcgcgacaaaaacagcgcgaacaaaaactgaagatacattttcgctcgtgaaccatgccaaactgactgggatttccatgtacgccgagtacttcaagtgcatctcgaattatttgccccacgatacgatctctaaaacaaaacctgaaaactgtttgcctaacacttacccgtggtaattgctggtgtccactcttgctccccagtggctccccagaggtaagacttcgcctgggtggccgtcaggttgggcacattggcgggctgggggttcatcggcgagttttgacgccgcttaaagactgcgtatacaaagcaatgctagtcgaggaggtttaactttagttactgctactcacaatcaatgggctcatcacccatcacaaagctctgcgaggagtctgacttgttgagcagcgaatggctggacactcggtcgtactgctctccattttcgcacccgtaatcctcctggtcgttgttgttgttgctctgcgtctgctgcaatggtctctgctgaccagcctgcgtgggtttggcgggcaccgcttgataatgatgctgctgtatgagtacaccggttgggcccttcgggaatatgtgcgtccagcggcggcgattggaggtcagctttattgtcacttgcgagggatcaaagggattgatcagagcgcgacccggacgcactatgggcgcaatgctaacgatcgtcctgcgggagttcttctccgaggccagtgactcggagaggttggttgtatccggttgctaaagtcacataaaaacagttcaaaagtcaggtaaaaagtcagtattaagatttcccttaccaaggcagccagcattgcagaggtgccgtgatgaatatcgggatcggacatcttgcgccgcatagccgggatttgagtcggcgtgaggttctcccaatcgttgttcctataggcataggtctctaaactgggcaccgatgtcttcttagcccgcactacacgctgcagggagctaagaaaataaaaccttgatcaacaaagctaaaaaggtaattttgtagcacaatactaccaagtactctgagcggggagcggctggaagatctgttcatcatacgcatcgtaatcaaagagcgagttgtgcttatactccgactgattgcagctcaggaagtgacgctcgttctcctcgccctccccgtcgccaacgccatcgtggagcgtcaactgggatccaaacagaggcagcttgatccgtggtatgaaactggagtacacaatcttcttgttagtggagtaaaagctcaagtttatccagtggggcagagagtagtcatcggcggaggtcaacgtggtgtctttgttgtggaatttgagaagcggaaccgcatgcagtggctgctcgcccacacagaccaggtcgctacccacgccattgtcgataatgcgctgcttcgtgatattggttagctctcgatccacggaaaagacacccactcctggggttataaccacggatagttgtccggtgcggtcgaacgttctatccaagtaatgcttttcgaaagtgttcagcgatatgtttagcacctccaaaaagttaccctgagtggctgaagaattggtggccggtggaatcttcatgttctcccgttcgtggtagcgcagcacagtggcctgtaaacggcgtagtaagtttttataatagaataaattaaaacatggttaagtgacctggtaggacgtgaatagctttcggagctggcccaaaacggtacaccaatcatcacagcgctcattctggatggccacgcggtaaaagtcctcgtagaagcgacccttgtagtcctgctgcaggcagtcgcgcatatgctcgggaaactcgtccaggctcttggctgcgtagaaggtgcgggagaacagcacgatggtcacctcgtggttacagctcaattttcgccacttttgaaagagctcagtgagaaacccattgactgccttttcgaagtacaggtctccgtggatgtcaaagtcccacatctcggaggacatctgcaggaagaggtacaccatcgaagtgctgctgcggaagacaatcttggtgtcctccgtgatgacaccgctggccacgcgctcgccttgcgaccacatctcgtacacctggcaccgaatctgcatgtcgttgtagtcgatcttcttgttcacatacacacaggtgtccgtctgagggagaagtggtacgttaaaagtatatcctggtctgaaaactgcgtgattccttaccaggtaggtcttcaggcgccacatttccgagcgacccatgtactggtccttgaaggtaatctctatcgagtccagggccacatccgccggcttaactatgcgcatcaccacattggagtacggacgcattttgaaggcattggcgatgcccgattctatgcttatcacatcccggccacagctgccattgaactcggtgatttggagcagcaggtgggtgccgttctcctcgtcgggggcgtaaatttctaccacatcgcccacattggcgttgggatgatcctttagattcatcaccaagtccgcatctgtgccgaaatttccgtgtaacgtaatgtttgcgcaatatccactttcgcttaccgtaggatttgttgcagccacgcgtatgcgtgttcagcttgtacagcttcatgttgacttagtggttgcaaaaccaacggacaattatttactcaattccaacatttgcccatttgcatgctagtaaaataaaaattctattttttcgtcttttgttttgattccttatctgcagagtgaccgcaggcatggattatttggtattttcctgtacaaatataccgaatttaatgtttacctttaattgttattgtaattaattaaatcacgcagtttatttatatttttcaaggtagctcaacacttttatcttttattgaaaaactaacttaatctgcattccctgtcagcttaattattttcatatatattaaattaaataatgatttcagttacgtaagcttttctgttatgtatgttattgtgtgatttgtattattcgtcacaaaatttgaattaccgaacgttaggggcaaccgatgctttcgtcactagactcctaccaattcagcggggatttggtgcgttgctattgactgaaatttttttggcatctatgaagccttttaatttacccacaagtgtagccaaaagttaacatattttacaaactggcgaaaaactttactaattaaaataaatgtttttttatattatcgatttaacacatatacagttgcgtaaaaaatagcaccaccatagcgcgttttattctagatacaaataattaaggttgcaccgaaataacgcaatattttcgaataaaatttttaaaaatagttctgggtatttttcctattcgaatataataataatctgtagaatgcatatattttttgcagctttatgcttatatatgtagtcagtctgcgtcacagaagcgcaatcgatttctttcagataagacctttttaattaaaaatgtaatttcacctatacttctggaggaaaatgattgttacatcgcattaaaaataaacacccccacgctaatcagtttgtccgc

SEQ ID NO: 2615 - DNA, 5548 bp, DROSOPHILA
cctacggtaagcgaaagtggatattgcgcaaacattacgttacacggaaatttcggcacagatgcggacttggtgatgaatctaaaggatcatcccaacgccaatgtgggcgatgtggtagaaatttacgcccccgacgaggagaacggcacccacctgctgctccaaatcaccgagttcaatggcagctgtggccgggatgtgataagcatagaatcgggcatcgccaatgccttcaaaatgcgtccgtactccaatgtggtgatgcgcatagttaagccggcggatgtggccctggactcgatagagattaccttcaaggaccagtacatgggtcgctcggaaatgtggcgcctgaagacctacctgacggacacctgtgtgtatgtgaacaagaagatcgactacaacgacatgcagattcggtgccaggtgtacgagatgtggtcgcaaggcgagcgcgtggccagcggtgtcatcacggaggacaccaagattgtcttccgcagcagcacttcgatggtgtacctcttcctgcagatgtcctccgagatgtgggactttgacatccacggagacctgtacttcgaaaaggcagtcaatgggtttctcactgagctctttcaaaagtggcgaaaattgagctgtaaccacgaggtgaccatcgtgctgttctcccgcaccttctacgcagccaagagcctggacgagtttcccgagcatatgcgcgactgcctgcagcaggactacaagggtcgcttctacgaggacttttaccgcgtggccatccagaatgagcgctgtgatgattggtgtaccgttttgggccagctccgaaagctattcacgtcctaccaggccactgtgctgcgctaccacgaacgggagaacatgaagattccaccggccaccaattcttcagccactcagggtaactttttggaggtgctaaacatatcgctgaacactttcgaaaagcattacttggatagaacgttcgaccgcaccggacaactatccgtggttataaccccaggagtgggtgtcttttccgtggatcgagagctaaccaatatcacgaagcagcgcattatcgacaatggcgtgggtagcgacctggtctgtgtgggcgagcagccactgcatgcggttccgcttctcaaattccacaacaaagacaccacgttgacctccgccgatgactactctctgccccactggataaacttgagcttttactccactaacaagaagattgtgtactccagtttcataccacggatcaagctgcctctgtttggatcccagttgacgctccacgatggcgttggcgacggggagggcgaggagaacgagcgtcacttcctgagctgcaatcagtcggagtataagcacaactcgctctttgattacgatgcgtatgatgaacagatcttccagccgctccccgctcagagtacttgctccctgcagcgtgtagtgcgggctaagaagacatcggtgcccagtttagagacctatgcctataggaacaacgattgggagaacctcacgccgactcaaatcccggctatgcggcgcaagatgtccgatcccgatattcatcacggcacctctgcaatgctggctgccttgcaaccggatacaaccaacctctccgagtcactggcctcggagaagaactcccgcaggacgatcgttagcattgcgcccatagtgcgtccgggtcgcgctctgatcaatccctttgatccctcgcaagtgacaataaagctgacctccaatcgccgccgctggacgcacatattcccgaagggcccaaccggtgtactcatacagcagcatcattatcaagcggtgcccgccaaacccacgcaggctggtcagcagagaccattgcagcagacgcagagcaacaacaacaacgaccaggaggattacgggtgcgaaaatggagagcagtacgaccgagtgtccagccattcgctgctcaacaagtcagactcctcgcagagctttgtgatgggtgatgagcccattgatttctttaagcggcgtcaaaactcgccgatgaacccccagcccgccaatgtgcccaacctgacggccacccaggcgaagtcttacctctggggagccactggggagcaagagtggacaccagcaattaccacggtgaacagcctgggatctgttgatcccagctatctggacgatctgcatcgcggcctgatgtgcaacagcagcaatcacttctacatgctgccgcagatgacggccacggacaaggattcctcgcacgtccacttcagcagcctgcaggatgaggagaccatatatttggtcttcgccagggattccaaggatgcggtgatttacttgcaggccgaaagagccagaggaaggcgttacacgaggactatgttcctgctaagaaagcaggagtcgcaaaaggacattaaatacttctttgaactcctgtggaaactgcagttccggagcgctttggtagtggtggccgccagaaacttctaccaaatggatccatatcccactgttagggtgatacgcatgcgaagattatcctcctatgatccgcatcatgtttttccgcctgcaaatcgaaaaaatttcagaggctacaggatgcgattgcccgtacagcaggatgtgcccaatactttttggtacaagaatcgcaggacgaaggcctgggaactggccggattgggcgggatcttgatcaatcaactgatgatgcacctgaacgtgaccatggatttgtttagatttgaagtaaatggctcttcattgctgaatatggctgcgctcacggatctgattgtaaagggcaaggtggagctgagtccgcacttgtacgacacactgcaatcaaacaccagtgtggactactcatatcccacgcaggtggcaccgcgctgcttcatgatcccattggacaatgaaatttcgaggagcctctatgtgttcctgccatttagtttaaccatgtggctgtgcttgctgtttgttctgctcgtagtgcacttcgtgtatgtgcgccgcctgattccagacggacatttttgggccatactaggagtgcctggtgctggtcaagtcagatatggcaaccgcaagccggtcaggcgctttagtacctttctgatcctcttcggaatattcattcttgggcaaacgtacagcaccaaactaacttcatctctgaccgtgactctgatccgaagaccagacaacagcttggaggagctattcctgctgccgtatcgcattctagtgctgcccacggatgtgtacgccatcgttgattccctgggtcatgccgagcagtttagcacaaagtttagctgcacggatgccgagaacttcagccagaagagaatctccatgcatccggagtatatttaccccatcagtacaattcgttggcgtttcttcgatatgcagcagcgctttctgagaaagaaacgcttctatttctccaagatttgccacggctcctttccctatcagtaccagctcagggtagactcacatctcaaggatgccctccatcgattcctgctgcatgtgcagcaagccgggctgcatgatctttggctggatacgtgctatcgcaaggcccatcgcatgggctatctcaaggatttctccacactggcggagctggaggagaaactgaggctccgcccactggcgctcaatctgctggtgcccgcgttcagtctgtttctgtgcggaatgttgggcagcggaatcgccttcctggtggagatcctcaagcatctgaggccgatcgtcgagggcgagcatcatcatctgggcagcctggaggcactaagggctctagacccgccccccgatgcggaggcgggcggcggaagaggaaagatcatcataggcgtcgattggaagtcgcttacgatccccgcctgtctgcccatcaccacggactacttcccggacaagcgttcgctgaataacgactatgtgatatcggattacactctgctgcccgacgatgtgaatcacgattacgcccagagcagagcggtttaccggaaacccctctccacggaggaggtgtgcaaggagatcgtgtcgcagcgcttggcgcagggcttccagctaatcgtggtcgacgagaagcctccgactgcgagcggttgttcctcgggatctgcagtgcagccggtgaagctttcgcgcgagaccaacaaggagtatctgctctccattggccgcatctttcacaagatctcgttgagcggctcggtgatcacggtcactggctataggcccagacacccgtatcctccgataaatgtggactaccgctaccgtttccatgccccacaacacgagacctacgaaatatccggcgtgaacttcaccaccgagaagttggagaacttcaactggaaccacatggacctgtacatctgcacgcgtggcgatgtggattacccactcatggaggtatatcccggcgcacaacgtatacttgccaatcttaacgcaatgtttctatcgcagagcctgaagtactggcgctatcgcatgtacctgctgcccagggagaacattgtgagcaagatcgccagttgccagcgatgcgacatattccccgacgtgactgcggataacacgcgggagcaggtcgaggacttcgtccgactgatcgaggcggtcagcaagctgaagcggcaatatgcgcgcaaggcgagatatctcgcctcactcttgcaggacagccccatcgcccacataaccaagcggagacacagcaccagcattatatccaggcctcagcctaaccagggactcacgaactctccgttccgggagcgagtcggcagcaatcgactgccggagaagcgacccagcatcaatgtgcgccccaaactggagaacggtcgaattccacgaatatttcccgccaccgatgcagcggcagctgcaggagtcgccgccagagatgatcaggacgatggtttcccagtcgacattaagttcagcccgaatgccacgctgcccgaaatcttcgaggccatgaagcacccggtaaacggagtgggcttcttctcgcagacgcagtcgctcccctcctgcacctttgtgtcctacgacgcactaatgtggttgaaaacccgcctgaacaatggacgacatcccctggatctactggaggccatgcgcaaagagcgcatgatctgccatgcttcgggggattggaagaagcccgtggtgcctggctttgttttctactatgtggtgcagcaggataaaaacgccaaagattacgccccgcctttggatgactacagtgcctttgtgaacgagtggttggagattgagtttcagggttgcagttttctctggcacgatgagccagtgaccactccagtgcccaatttccttagggactcacctgctccgcaatcctggacagaaacgagtagcaacagttcgtactggatatattttgaagaagaagtaacctaataattctcgatttctagagcgc

SEQ ID NO: 2616 - protein, 1816 aa, DROSOPHILA
MNLKDHPNANVGDVVEIYAPDEENGTHLLLQITEFNGSCGRDVISIESGIANAFKMRPYSNVVMRIVKPADVALDSIEITFKDQYMGRSEMWRLKTYLTDTCVYVNKKIDYNDMQIRCQVYEMWSQGERVASGVITEDTKIVFRSSTSMVYLFLQMSSEMWDFDIHGDLYFEKAVNGFLTELFQKWRKLSCNHEVTIVLFSRTFYAAKSLDEFPEHMRDCLQQDYKGRFYEDFYRVAIQNERCDDWCTVLGQLRKLFTSYQATVLRYHERENMKIPPATNSSATQGNFLEVLNISLNTFEKHYLDRTFDRTGQLSVVITPGVGVFSVDRELTNITKQRIIDNGVGSDLVCVGEQPLHAVPLLKFHNKDTTLTSADDYSLPHWINLSFYSTNKKIVYSSFIPRIKLPLFGSQLTLHDGVGDGEGEENERHFLSCNQSEYKHNSLFDYDAYDEQIFQPLPAQSTCSLQRVVRAKKTSVPSLETYAYRNNDWENLTPTQIPAMRRKMSDPDIHHGTSAMLAALQPDTTNLSESLASEKNSRRTIVSIAPIVRPGRALINPFDPSQVTIKLTSNRRRWTHIFPKGPTGVLIQQHHYQAVPAKPTQAGQQRPLQQTQSNNNNDQEDYGCENGEQYDRVSSHSLLNKSDSSQSFVMGDEPIDFFKRRQNSPMNPQPANVPNLTATQAKSYLWGATGEQEWTPAITTVNSLGSVDPSYLDDLHRGLMCNSSNHFYMLPQMTATDKDSSHVHFSSLQDEETIYLVFARDSKDAVIYLQAERARGRRYTRTMFLLRKQESQKDIKYFFELLWKLQFRSALVVVAARNFYQMDPYPTVRVIRMRRLSSYDPHHVFPPANRKNFRGYRMRLPVQQDVPNTFWYKNRRTKAWELAGLGGILINQLMMHLNVTMDLFRFEVNGSSLLNMAALTDLIVKGKVELSPHLYDTLQSNTSVDYSYPTQVAPRCFMIPLDNEISRSLYVFLPFSLTMWLCLLFVLLVVHFVYVRRLIPDGHFWAILGVPGAGQVRYGNRKPVRRFSTFLILFGIFILGQTYSTKLTSSLTVTLIRRPDNSLEELFLLPYRILVLPTDVYAIVDSLGHAEQFSTKFSCTDAENFSQKRISMHPEYIYPISTIRWRFFDMQQRFLRKKRFYFSKICHGSFPYQYQLRVDSHLKDALHRFLLHVQQAGLHDLWLDTCYRKAHRMGYLKDFSTLAELEEKLRLRPLALNLLVPAFSLFLCGMLGSGIAFLVEILKHLRPIVEGEHHHLGSLEALRALDPPPDAEAGGGRGKIIIGVDWKSLTIPACLPITTDYFPDKRSLNNDYVISDYTLLPDDVNHDYAQSRAVYRKPLSTEEVCKEIVSQRLAQGFQLIVVDEKPPTASGCSSGSAVQPVKLSRETNKEYLLSIGRIFHKISLSGSVITVTGYRPRHPYPPINVDYRYRFHAPQHETYEISGVNFTTEKLENFNWNHMDLYICTRGDVDYPLMEVYPGAQRILANLNAMFLSQSLKYWRYRMYLLPRENIVSKIASCQRCDIFPDVTADNTREQVEDFVRLIEAVSKLKRQYARKARYLASLLQDSPIAHITKRRHSTSIISRPQPNQGLTNSPFRERVGSNRLPEKRPSINVRPKLENGRIPRIFPATDAAAAAGVAARDDQDDGFPVDIKFSPNATLPEIFEAMKHPVNGVGFFSQTQSLPSCTFVSYDALMWLKTRLNNGRHPLDLLEAMRKERMICHASGDWKKPVVPGFVFYYVVQQDKNAKDYAPPLDDYSAFVNEWLEIEFQGCSFLWHDEPVTTPVPNFLRDSPAPQSWTETSSNSSYWIYFEEEVT

SEQ ID NO: 2617 - DNA, 3848 bp, DROSOPHILA
cgaaacatttggcagcgcctttcgaataatggcgaaatgattcagctgctcgctggtgggcagatgtacatcacttgcagggctgaattctttgcacgatggtaaacttgttttgagaacctggtgaaattaaaaaaaaaggagggcaaacaaagctgaaactgaaagaaagccataacatttccgcaaaatgtgtgtatttcgttatatattccaattgtaaggttctctactttttaaagagttgttactagagctcaggtaatttcaatgtatatgtttacagatacttcgatttttatttatttacaaagaaaatttttaaaatttctatctgacataaccggttcgatttgttcgcgccggatgacagctctgtcaagttctctctggctctttcgattcctaagcttttacccgattagtgcttttttcgccggcagagcttttcttgcactcaattatgcttcttcttccctgtaaacaaaacacgctcacagctgtttcttccgcactgaagtgttggcaaacgtctgaatattacacgcaatatttatgtaatacgctaaacaattaagtcgcataaattataaaatagtcattagggataactcgatggcatttgtggagcgcgactttgagtcaccatagtgccgccgccaagtacgatagccacaatctgagcgccagcgcagtgccaaaagctctgtgttgttgaaaaactcgacaaagtcaaaaaagtcgaaaaagtcaagctgctctttgtaggccgctcgatacaaaggtaaaaagaagttggcccaaacaaattgcccgaaatgggaaaaaacaaatcgagcacgctggcgagagcgagataaaaacaccgggacaaaccggcccgagcgttcagttctgtgccggacgacaaaagcggcggatcactgttggatttcatttcatccggagcacttgcgaatagaacgcgaaagtcccgagcaagcgttagtttttgcatacaatggagtacctgagctacgtgtacgaaaaaatcttcgggggcaatcctcccacggatgacacgcaaggggctttccacacgtgagtatcagcagtagcagctgaggcggaaaaacccggcagaaaacacctctgaccattgggctttcccactttcaggccccgcaaggtcatctgcttcggcaacgtcctgctcgaccgactagtccagctcgaggatccccaactcctggagcggttcggcctggaactgggctccaagggtgaactggacatggagaaactcaaccagctggcagcggaggcttctgagaggtgagtacctttgtatcttgcccgattgtttcattatcttcaatgactgattgtaagaaattgtacaattggacccaagttatggtttttagttagactgattttacatataagtagtatagttaaggtcttgcaagtataattagtatcacctttcaaagaaattgtgaaaagatacaaagaatgaacaacaaataggactggggctacaaaggctgtttatacatagcacttttgtacacaacaatcaatctttacttaagaagttaagaagggccttctttctaatctctaatgacagcaaaactggtttttatacctgtacgaaatcgtcttacgaagtaggaaatggaaaatggcaaagttacacggttattctaaaattacaagggtttagttagtaactacatacatacataataaacaacctttgcaaagctatacttactaatccgagttcaatccaattcagctctcggtgccttacaaacccgggtggctctgccctcaacactgcccgcatcctgaagcagctgggcacagacgcgctcttctttggcgccgtgggagccgacaagcacgccgaggagctgcgccagatcattcgggatcgcggcatcgaggccaggctgcagaccgtcgaggatgcgcacacagggcagtgcgtgtgcctcatgtatcaggacaaccccacgctgtacgccaacatcggcgcctcggctcagttcgaggtgcagaccctgagccacgccgtcagccacgaaggccagagcttcctgcgaccggtggagcgcaagcaaatcctgtacgtggagggcttctttgtgccccagaggagtgatgtgtgcgattacatagtgcagcacctggtgcgggagcggcgacgcctggctctcaatctcagtgcaccctacattgtgaggaaaaatcaccaggctatgatgaagctggcccgggccgccttcttcctgttcggaaaccgacaggagttcgaggcgctggccgaggctgcgggtgggttccgaaacgtcgacgaactggcggatcatctcctgcaatccggtggcaccaaggtcatcttcgtcaccaacggcagtgccggcgtccaggtgatcaccaactacgtggaggagctggctcctcccggacccgtaagctttgaggacttcagggcgcagcgcgtagagcagctggtggatgccactggggccggagatgcttttgtggccggattcttgcacgcctggctggagaagcgctcgctgggcgagtgcatccgaatggcctccagcgtagccgccaaggtcgtcacccaggtgggctgcaatctgccctagaccgacgccgtgcatcgccacctcagatagcgcacaacaaagcaccaaagtagactcttagcttgtaattattccggtaatctccccaaaccttaggcttagtcaaacatttgtccaccatttcacccaagcaatgaacttagtcataatgtgactaaataaaaatgatttatacatcgtcctatgaaagataataatatttctgagtgactatatgtgactacattttataatatatatagcgagattcctattgtatgcaattttttaacatttaaatatcttttgatagttctatgtaaacagatgttgctttctcaaaagacaaaacagatttatctaaaaccagtacatatgtatctatttgtagcacattgccattaagaatttgcgttgaccttcagaagagcgcaaagataaaaagtgaaatagggtaaaatgtgcccacgtctaatcaagccatgccatgaaatcaccggaagactctttttaatggttaaatatagattcgagagcattgttttgcgcacagtgggttgaatgcttacaaattattaatttcgctgtaatactttcttagatataccattattcatacttcattatttgagcaaacataagtaaatcatttttgacacaggccgtcgttatttaggtatacctttatatgtaaaatcacgtattaattattcattaagaaatgagagcatatatataaaaaagtaagtacagctggtgattgttcgacctcgatagccttattaatacgactgtgttattcactcgatcgccgaagttcccactggactgtggcattgtgtgaatcgtcatccgaatccgttatcacacacttaattccccctgagatgccctagtacacatctttatgcgcattcctcgagatgctttattatccgcaaagaagcgattctcgtttcatccatcttatatggaccgcgtacatcccacacaagtcagtcaataagtgacgacttggcccaaagagaactcgcatgcacagatgccatcaaagcgaattccgcctttgtgctggccgtggggtttggcttggggtttgggccacatgtttgcgaatcgttaacaaaaactaagccgcatttggcatgcttgtgtaagcaggccaaggcctgggcctctcccagctgctgccggaggaggagttgtggacgggaagct

SEQ ID NO: 2618 - DNA, 1298 bp, DROSOPHILA
atggagtacctgagctacgtgtacgaaaaaatcttcgggggcaatcctcccacggatgacacgcaaggggctttccacacgccccgcaaggtcatctgcttcggcaacgtcctgctcgaccgactagtccagctcgaggatccccaactcctggagcggttcggcctggaactgggctccaagggtgaactggacatggagaaactcaaccagctggcagcggaggcttctgagagctctcggtgccttacaaacccgggtggctctgccctcaacactgcccgcatcctgaagcagctgggcacagacgcgctcttctttggcgccgtgggagccgacaagcacgccgaggagctgcgccagatcattcgggatcgcggcatcgaggccaggctgcagaccgtcgaggatgcgcacacagggcagtgcgtgtgcctcatgtatcaggacaaccccacgctgtacgccaacatcggcgcctcggctcagttcgaggtgcagaccctgagccacgccgtcagccacgaaggccagagcttcctgcgaccggtggagcgcaagcaaatcctgtacgtggagggcttctttgtgccccagaggagtgatgtgtgcgattacatagtgcagcacctggtgcgggagcggcgacgcctggctctcaatctcagtgcaccctacattgtgaggaaaaatcaccaggctatgatgaagctggcccgggccgccttcttcctgttcggaaaccgacaggagttcgaggcgctggccgaggctgcgggtgggttccgaaacgtcgacgaactggcggatcatctcctgcaatccggtggcaccaaggtcatcttcgtcaccaacggcagtgccggcgtccaggtgatcaccaactacgtggaggagctggctcctcccggacccgtaagctttgaggacttcagggcgcagcgcgtagagcagctggtggatgccactggggccggagatgcttttgtggccggattcttgcacgcctggctggagaagcgctcgctgggcgagtgcatccgaatggcctccagcgtagccgccaaggtcgtcacccaggtgggctgcaatctgccctagaccgacgccgtgcatcgccacctcagatagcgcacaacaaagcaccaaagtagactcttagcttgtaattattccggtaatctccccaaaccttaggcttagtcaaacatttgtccaccatttcacccaagcaatgaacttagtcataatgtgactaaataaaaatgatttatacatcgtcctatgaaagataataa

SEQ ID NO: 2619 - protein, 366 aa, DROSOPHILA
MEYLSYVYEKIFGGNPPTDDTQGAFHTPRKVICFGNVLLDRLVQLEDPQLLERFGLELGSKGELDMEKLNQLAAEASESSRCLTNPGGSALNTARILKQLGTDALFFGAVGADKHAEELRQIIRDRGIEARLQTVEDAHTGQCVCLMYQDNPTLYANIGASAQFEVQTLSHAVSHEGQSFLRPVERKQILYVEGFFVPQRSDVCDYIVQHLVRERRRLALNLSAPYIVRKNHQAMMKLARAAFFLFGNRQEFEALAEAAGGFRNVDELADHLLQSGGTKVIFVTNGSAGVQVITNYVEELAPPGPVSFEDFRAQRVEQLVDATGAGDAFVAGFLHAWLEKRSLGECIRMASSVAAKVVTQVGCNLP

SEQ ID NO: 2620 - DNA, 4091 bp, DROSOPHILA
gacttctgtgaacacgtccactcgattgctcatctcccatgcgactggctcggaagagcatggcaaaatcgatggccaaattaaatggggatttacatattcgctcagcgagagctttagtttaaagggaacgctcggttgactcattggttgctgggaaaatatttgtttttccaactcatttaaagagtatctatgatgccacctaaactacatacattccaccaggattaatcaggataaaatcatgcttatttctattactttctagatttcattagtctaagttgcttactctttaagctagtcatattttcattaatttacaagcaattcaatgaaaggctgtatttaagggaacattttaaatatgtttatgcacaataaactatacaaataaacgcagtttaaggagttggtaaaacaatttcacttcagattcaattgtatatgtaacaaaaatcaaaacaaaaaacactttaatacgcttaataaaaggccatttaaatacgcctcttacttctatttttaaaatatgaaatatttaaacagcaatactgacattaagctctgctgacataatatctaaaatttccaataaaaacgatttaatttgaattcgattattagataacccgattgagggcattaatgcaattggaaatgcaaatctcttcggctggatttccaatcagcccagctctgcgccccatgggaatggcaatcgcaatcgaacttcaattacattacactcatcattagccaattagctaaattataggctgtgcgacgacaagtgccaaatggcctcagttcccaatcccaatgcccatttcccatttcccacttcccaatcccacttccatttcgaatcgtactgccacttccgtttatagtgtcaatcgctagcccgcagattgccctcctcgatggcgacaattggtgcagaataaaagacatttgcccagcactttgcagcacagtctggagtggatctgccggtaaggagcttatagaaagtgccgagcaatgacaatcgaggatatcggcctggtgggcatcaacgtgcggatgtggcgacacttggccgtgctgtaccccactccgggctccagctggcgcaagttcgccttcgtgctgccggtgactgcgatgaatctgatgcagttcgtctacctgctgcggatgtggggcgacctgcccgccttcattctgaacatgttcttcttctcggccattttcaacgccctgatgcgcacgtggctggtcataatcaagcggcgccagttcgaggagtttctcggccaactggccactctgttccattcgattctcgactccaccgacgagtgggggcgtggcatcctgcggagggcggaacgggaggctcggaacctggccatccttaatttgagtgcctccttcctggacattgtcggtgctctggtatcgccgcttttcagggaggagagaggttagtacactcacagaatgggattaaaataaccgtcattcaaatcgaaaggatatttgtagagtaaaagagtggaaaattgctaaatagtggttaaaactgcaaagtagtttgtgcattgcttagtttttcgaatataaattcccaattggtgttgtcacttttttccttccagctcatcccttcggcttagctctaccaggagtgagcatgaccagttcacccgtctacgaggttatctacttggcccaactgcctacgcccctgctgctgtccatgatgtacatgcctttcgtcagcctttttgccggcctggccatctttgggaaggccatgctgcagatcctggtacacaggctgggccagattggcggagaagagcagtcggaggaggagcgcttccaaaggctggcctcctgcattgcgtaccacacgcaggtgatgcggtgagccgcaggggaagaaatcgggggttggggaaatctctaagctgctcatttccatttcagctatgtgtggcagctcaacaaactggtggccaacattgtggcggtggaagcaattatttttggctcgataatctgctcactgctcttctgtctgaatattgtaggccactgattttgagttcgggtgccacagagcctccataaattggaagaaccaaaactttgggatggcggtcttctatggcactgtggcactccgagatctaagactgtggtccttttaaaaataccattaccattccagataacctcacccacccaggtgatctcgatagtgatgtacattctgaccatgctgtacgttctcttcacctactacaatcgggccaatgaaatatgcctcgaggtgatactaccaactccattcaatttgatagctatccatgactccttataacttgtatccatgcagaacaaccgggtggcggaggctgtttacaatgtgccctggtacgaggcaggaactcggtttcgcaaaaccctcctgatcttcttgatgcaaacacaacacccgatggaggtgggtgggcattgggtgcatttcatttgcgagtcattgcgaggactgtaatccatttccattccgggtgctgtgcgctccatttcatcttgcagataagagtcggcaacgtttaccccatgacattggccatgttccagagtctgttgaatgcgtcctactcctactttaccatgctgcgtggcgtcaccggcaaatgagctgaaagaccgaaaaaaccggagtatccccttccatattccccctgctcctttattttccttttccttttccctttcccttttcccattcgcttttccagcaatccgggtaatgcaaaaagttgttgctggctgtggtcctggctgcttgtttggcatttgcatatgcttgtcgtttgaaaggatttaatcggactgctggcacggagtcggcatcctggctcctggatcctggcatgcaaatagttggcttcttagattgttacacaaaatagattgtagattgcagctgaatgttgtgcttggaataaagtcaaaaggatgtggagtcggcccaaggctctgcccattctgtttgctcgggatgcccgaaagtatgattcacaaatatcaaagcattcggatttgcggcgatggtggctttcaattagggcaagaaggatgttccacagcgatatgaataagtaaatatttggtcttccaagcaattagtgttgatattgattgagtggcattagttcgtgctttatgccctatgcattttttattgctcaattttcgccgcatactttcaggctggcccatcgaatttgaatatccgagggtcgccctctgcgcttttaattaaaatgcccaaaaactagtcgttgtctggtgcaatttaattaacattagtcatgtcctttattatgcaaataaactgctgctactgctgctgcttctgttgctgctgctgtgagcaggatcgtttaatgccggcccgacagcaataacaacttaatttaaaattcattataactgacaccaactagttaaacaattgccggcggcagcaggaacagcagcataaacatcaacagcaccaaaggacaactaagcgggagcacaacaaggacgaaggacgaaggaagtaggaaggctgagggacgaaggagcgcgtcgaaaattgaaatgagcggcggcaggcgctctcgaaatacgcaaataaacttcaaagaaggacgactgcacgctgtgttttccgctggatgtcctgccgagcgcataaataacaatggagcgcggctggaggaggagctcctgggctgctcctatcgcacggctcgactcgagtggcgtatacttaattttattatgaggtgtcaagtgcggaccagttgacttgcccggccgaacgccttttgtgttgaacttcgctgtgttctgccccgttatttatgttgcctactgcccgccgtttggtggcaggtgaacgcctacgcgccccgcccactggacagcaaaatgtgaacttcctctgggcttccactttttcttgctgcactgcaaaaaaatatatccttaatatttatattttcctacatacagaagagttattacggacaatt

SEQ ID NO: 2621 - DNA, 1548 bp, DROSOPHILA
ggtaaggagcttatagaaagtgccgagcaatgacaatcgaggatatcggcctggtgggcatcaacgtgcggatgtggcgacacttggccgtgctgtaccccactccgggctccagctggcgcaagttcgccttcgtgctgccggtgactgcgatgaatctgatgcagttcgtctacctgctgcggatgtggggcgacctgcccgccttcattctgaacatgttcttcttctcggccattttcaacgccctgatgcgcacgtggctggtcataatcaagcggcgccagttcgaggagtttctcggccaactggccactctgttccattcgattctcgactccaccgacgagtgggggcgtggcatcctgcggagggcggaacgggaggctcggaacctggccatccttaatttgagtgcctccttcctggacattgtcggtgctctggtatcgccgcttttcagggaggagagagctcatcccttcggcttagctctaccaggagtgagcatgaccagttcacccgtctacgaggttatctacttggcccaactgcctacgcccctgctgctgtccatgatgtacatgcctttcgtcagcctttttgccggcctggccatctttgggaaggccatgctgcagatcctggtacacaggctgggccagattggcggagaagagcagtcggaggaggagcgcttccaaaggctggcctcctgcattgcgtaccacacgcaggtgatgcgctatgtgtggcagctcaacaaactggtggccaacattgtggcggtggaagcaattatttttggctcgataatctgctcactgctcttctgtctgaatattataacctcacccacccaggtgatctcgatagtgatgtacattctgaccatgctgtacgttctcttcacctactacaatcgggccaatgaaatatgcctcgagaacaaccgggtggcggaggctgtttacaatgtgccctggtacgaggcaggaactcggtttcgcaaaaccctcctgatcttcttgatgcaaacacaacacccgatggagataagagtcggcaacgtttaccccatgacattggccatgttccagagtctgttgaatgcgtcctactcctactttaccatgctgcgtggcgtcaccggcaaatgagctgaaagaccgaaaaaaccggagtatccccttccatattccccctgctcctttattttccttttccttttccctttcccttttcccattcgcttttccagcaatccgggtaatgcaaaaagttgttgctggctgtggtcctggctgcttgtttggcatttgcatatgcttgtcgtttgaaaggatttaatcggactgctggcacggagtcggcatcctggctcctggatcctggcatgcaaatagttggcttcttagattgttacacaaaatagattgtagattgcagctgaatgttgtgcttggaataaagtcaaaaggatgtggagtcggcccaaggctctgcccattctgtttgctcgggatgcccgaaagtatgattcacaaa

SEQ ID NO: 2622 - protein, 376 aa, DROSOPHILA
MTIEDIGLVGINVRMWRHLAVLYPTPGSSWRKFAFVLPVTAMNLMQFVYLLRMWGDLPAFILNMFFFSAIFNALMRTWLVIIKRRQFEEFLGQLATLFHSILDSTDEWGRGILRRAEREARNLAILNLSASFLDIVGALVSPLFREERAHPFGLALPGVSMTSSPVYEVIYLAQLPTPLLLSMMYMPFVSLFAGLAIFGKAMLQILVHRLGQIGGEEQSEEERFQRLASCIAYHTQVMRYVWQLNKLVANIVAVEAIIFGSIICSLLFCLNIITSPTQVISIVMYILTMLYVLFTYYNRANEICLENNRVAEAVYNVPWYEAGTRFRKTLLIFLMQTQHPMEIRVGNVYPMTLAMFQSLLNASYSYFTMLRGVTGK

SEQ ID NO: 2623 - DNA, 3224 bp, DROSOPHILA
cgaaataacgcaatattttcgaataaaatttttaaaaatagttctgggtatttttcctattcgaatataataataatctgtagaatgcatatattttttgcagctttatgcttatatatgtagtcagtctgcgtcacagaagcgcaatcgatttctttcagataagacctttttaattaaaaatgtaatttcacctatacttctggaggaaaatgattgttacatcgcattaaaaataaacacccccacgctaatcagtttgtccgctcctgaatctatcaatttccatctttctgaccatgagttaatctaagcaattagaacgttctatttaagttttccgtacagctttattgtttacacatatttatttgcttaatgaatttatcacgaagtgactacaagctgcattcgttgtttttcattgaataaattttattgggtcgcaaatatcagtgagtacatttcgacaaaaattgtttaaagacagttcgttcgcccgcgtaaatgggtaatcctccgtcctcagtcagatagctgcactcgactcgctccattccgggtccaccatccatccagcttccatcatccggaccccggactcgtatttatgatcctcggcgtcggggattgtttcgcaatcggttgtttgtttattgtttgtggtgattagaacgccactgacgacagagatcgccagatcgggcagataattcgcattctctacttatagcgagggttatgtatacaatcgaggcgcgggtcgctcaccaggatgcgtcgaagtcgattcgtcggttcgaaaatgagtttgctcgtatatatgtaactaacaatgcaaagggtcaaagggtcgtcgtcctcgtcaatcacaatctcaatctcaacatgcagcttaaacggtagacagaaccacgaaactggctcctaaagctaactaaacacgtacggactacaagtaaacgttaatcactagggaggatgggctggagcaccactctcacatcgccacggtggccaggacaacggtgatgtcgtccggcttgccgccacgcgcctgaatgttattcctcctggcgctgagggcgaagggcgagaggaactcgctgttgagggacagggtgcgcgccatcagcgccaggctgttggccgtcatctggagcttgacgggatcgcgttcgccctccacctcgctaagcacctgcagcattagatcctcgggcacgttgtcgaacactccgtcggttgcaatgagaatcacgtcgccatcccgcaccggaaagctcatcgtgtccgccgactcagggctgtcgctgaggacattgggcccatgtcccggcggcggcaatgacagttggaagggtgtgttaaaatagtgctgctgctcctcggacttgtgaaccacctggccttcgcgcaccacaacgaagccgctgtcgccgatgttggccgtgtgcacggtgctcgtctcacggttgaggatcaggacgcaggcggtgctgctgcccagtatgggcttcttctgctccatcagctcgcagtagctgtaggccagcaggttgactggtcgttggggattaaagtggctgcactgcaccaaccgctcacaggtgcgcatcaggaacgatgaaaactctccgggatcgatgccatagcttcgccagccgcccacgccgtcggccacgcccatgacatcggcactggcggtggaggccttgaaccatgagtcctcgccgtactttcccggcttgtacttgtgtcgcaggttgtccttggcgaagccgcacaccaccgacacgaaacggggtcgtggggcgcccgaggatcctggtgtcgctcccgacttggtggcccccttggctgctgccccacttccgccacccgtggccgtttccaggagcgtggagaagctgctgcgcagggcgcgagagatcgcacgcgaggtccagctgagtgacgagtgcatcgcccagaactcgtggtctcgtgctctcaatcaatcaaatcaatcgcatgtgggggggtgtcggatttggattcgttttattcgtttgttacgacgtcggagtgctcctccttggcgttcactcctacacgccactcctccgcactcgttttttccggtgcaaaactcctgtctcgacggggcacacaatttacgttccaattaaatgcgaaatgttatgtgatgaagtgatacactttttctcgtcaggtcgcgatccggttcagaactggttcggtgctggttccccaccccaactctccgctcctgaacgggttccgaaaccatatacaccctattgtagtagtgttattttcggaaccagtacaactcgtttatatacaccaacggtatatataacaaaaagggtggtaaaatatgcagctttacttattgctcaagttttaaaaaacaaacatatttttcgatgcaattgtttttcgcaagtatttttctgctggtattttaaagaaacccccttatgcttttagttgaattattataacggtcattttcttttggtttactcctacttacacagcctggtcatactggcgaccaaagtagtttgtttttgccaaaaaaaaactcaggtctgctctactccgcgatatttgtttgcccagctggtctttgttgttggtaggtccaaacaaacacgcagccagtgttaacccagttttggggctagtgattgctgtggctcccacggcccagcagcgggttaaatacgacagtgtaattgtgaaagaggagagtgttgtgttgttggtggtggacgtgggcaacgacattggcatagaaaattttgcatacactctccttcgcacacgcacaccttcgtcgaaattgtaaaaataaaacaaacaagtaaaaatagcacttggcttgttgttgtgcctaaagttgtacgtattttgcagacggaaattgattggttgtgtaaattcgaaagtgcacgaaatcgcgagcgcataacggtacatgtatacacacacaagcagcacacgcacacacatggaggcagtgctttttgtttgatgtcccatttggcggattaaagacaaagagagagagacagagaaacggaggaggaggacgaggacgcgatgaccacaagggagaatgtggtttctagtcgcctgtccaagctgatgctcagcagcgggagtggaaatggcagtggcaatggaagtggtcccaacatccaggtggctcc

SEQ ID NO: 2624 - DNA, 1224 bp, DROSOPHILA
gatcgcgacctgacgagaaaaagtgtatcacttcatcacataacatttcgcatttaattggaacgtaaattgtgtgccccgtcgagacaggagttttgcaccggaaaaaacgagtgcggaggagtggcgtgtaggagtgaacgccaaggaggagcactccgacgtcgtaacaaacgaataaaacgaatccaaatccgacacccccccacatgcgattgatttgattgattgagagcacgagaccacgagttctgggcgatgcactcgtcactcagctggacctcgcgtgcgatctctcgcgccctgcgcagcagcttctccacgctcctggaaacggccacgggtggcggaagtggggcagcagccaagggggccaccaagtcgggagcgacaccaggatcctcgggcgccccacgaccccgtttcgtgtcggtggtgtgcggcttcgccaaggacaacctgcgacacaagtacaagccgggaaagtacggcgaggactcatggttcaaggcctccaccgccagtgccgatgtcatgggcgtggccgacggcgtgggcggctggcgaagctatggcatcgatcccggagagttttcatcgttcctgatgcgcacctgtgagcggttggtgcagtgcagccactttaatccccaacgaccagtcaacctgctggcctacagctactgcgagctgatggagcagaagaagcccatactgggcagcagcaccgcctgcgtcctgatcctcaaccgtgagacgagcaccgtgcacacggccaacatcggcgacagcggcttcgttgtggtgcgcgaaggccaggtggttcacaagtccgaggagcagcagcactattttaacacacccttccaactgtcattgccgccgccgggacatgggcccaatgtcctcagcgacagccctgagtcggcggacacgatgagctttccggtgcgggatggcgacgtgattctcattgcaaccgacggagtgttcgacaacgtgcccgaggatctaatgctgcaggtgcttagcgaggtggagggcgaacgcgatcccgtcaagctccagatgacggccaacagcctggcgctgatggcgcgcaccctgtccctcaacagcgagttcctctcgcccttcgccctcagcgccaggaggaataacattcaggcgcgtggcggcaagccggacgacatcaccgttgtcctggccaccgtggcgatgtga

SEQ ID NO: 2625 - protein, 321 aa, DROSOPHILA
MHSSLSWTSRAISRALRSSFSTLLETATGGGSGAAAKGATKSGATPGSSGAPRPRFVSVVCGFAKDNLRHKYKPGKYGEDSWFKASTASADVMGVADGVGGWRSYGIDPGEFSSFLMRTCERLVQCSHFNPQRPVNLLAYSYCELMEQKKPILGSSTACVLILNRETSTVHTANIGDSGFVVVREGQVVHKSEEQQHYFNTPFQLSLPPPGHGPNVLSDSPESADTMSFPVRDGDVILIATDGVFDNVPEDLMLQVLSEVEGERDPVKLQMTANSLALMARTLSLNSEFLSPFALSARRNNIQARGGKPDDITVVLATVAM

SEQ ID NO: 2626 - DNA, 11534 bp, DROSOPHILA
gttgttttgtttgttgtgttgtccttgttgttttgtttgttgtgttgtccttgttgttttgtttttgttgtgttgcccttgctgttgttgttttgtttttgttgttgttgtgttgcccttgctgttgttgctttgtttttgctgttgttgtgttgcccttgctgttgttgctttgtttttgctgttgttgtgtcgtcctttttgttgttttgtttttgttttgttttcttgtttctttttgttgttatttggtcggtcgtcatggacaaagacagtgcatttacatttatatatgctactgttgagatgccgccgccgtggccaaaaaaaatgtcagttgctccttaaaatgtgaccccaacagagaagtgtcgagagtttttagatgccagatattatccggggagtgtgttgtcgcctctcaaaagtgctccaaagccctgcgcagcttcttacagtaaaatggacattaagactcgcgctccttcttcaccttgacctcctcgcccagaatggtggtgatctcgccctgcatgaatgcccacggtatcaccgagttggccagtggacagcgatcgccgctggggcagtacacctcgttgcccagtccctgttgaggaatcgaaacaatttacagttagtatggaattccataatgaaaaaagaagccatcaatccaactgcaacattattggatcttgataatgaataagcatgttgcagtggatagatgatccatctttcgccccacttacattctggcgtttgatgctctcgcgactgcaggggaagcagaacttgtggtgattcaccgaggggcattgcacaaagtgcgtgtcctccaagcgctcctggcacagggtgcacttgagcgtggcattctgggcagccgccgcagctgctgccgctgcggaattcgaggcggcactgctgcccggagctccgccgagaccaccgctgccggccgaaccgccgccgctggccagtggtgtgccgcctccgccgccaccctgacttccactgctgccgggtccaggattcacggatccaccgctgccattgctgccggatggaccattaccgccggccggactgccatcgccggctaccgaatttggcgccatggaggcgggaccaatggctccattgcctccgctaccagaactggcactgccgcccggtccgccgctggtacaactcagctgtccactaccgccactgggtccgcccagttggccactggctgcattcgagccgggtcctccgccgccaccgccaccaaggccgccggccaccaccgcctggccgggattcgagccgcctacttcggagctggtaacggtggtgctggacacgtgacgggatccggacgaacgacgtcctgacgaggaacctgcaaaggttgacatacaaatcgatttgattagacttggcaagcaactaaattttgaaaaaagaatgggaaaattgatgcaaattcaaaaaaataaataataaaaaaaaatataaagaaaataaggaaagaaaataattaatcactacaaatcaaatcaaaaataattatatcttatcaccacaagatgataatacagttttaaagagagtagcgttaaaagtaaactaagtattaaatgtattttacagtcatgcaattggcactaaactaactaaatgataccgcaaccgattgtgtgaatgtgaaactaacccgaactgttcggcgagtgtacactgcgcgggggcagcggtccggagggcggactcgatccattgcgccgactggccggagacatgtgctctgcaatgtgaagatggtgtggaatcggattaggaatcggattggctgcacagagagagagagagagagagagcaatgaaaggcagctcgatgtcagtttgatgatatcgcaggatgatctgatgatattccatacccgatgcatcttatattcatactaaatttaactataaacaaataaacgatacccatcgaacttgtcatggtttgcaaatttatatgtgtcattggtcacaataaaaacttgagcatgtaatctcgtgagtcaagtgcaatgtactatgggccttggcgccccactttgccacaatattatacactggcattcataagtatgtcgacacacccacaaaatcaccactgacgaaagcacagcctataattcgagagcttatcctattattcatactaaattatccataattgacgttgacatcggcgatggtcggtcgaagtcgacctcacaaaatcgtttctaaagattttccaaatcattattcagaacgtgttctattcagtttgcaaattgatcaattcttgcagaattggggaaaagaaaaaggcgttttcattcaacttgtgctttcgattttgtatgcgaatgaattaaaattaatcacatgtttcgttttgcgcttgcctctgtgcaaaataaacttattgttgttttttttttttttattaggctcgttattttgttgctgtgttgtatgtgtaattttagaacttggcacgaaacatgtttctatgtatattttgtgttgtgcacatataaacacgtagcatgtacttgtacatatgtatatgtacatatacccacattcacttattacttggcaacgccggcccaacaacaagaacagcaacaacaagtttcattcaccggctggccattgaatatgtgacgtcacagcggcacgatacgattgcgtgtcattcttgttccactgtgcaggctcacacagctgttttttttttgtcgccttctttgtttttgttgctcttgtttcgccttctctctgtcgtcttattctccttcttcaccgtctcgttggcaaagtgccgaagcaacgcgaaatgaatggaaaggaatgaaacgaaacgaaacgagttctgctgctgctgcgcatacgtcacgaaaagcgggcgggcgtgcgagtgagcgagagggggagagagagagcatgcagccagccggtttctccatctcgttttgttattttttgcatgccagcatgcaataatgtgtatgtaccccagacacatacatacatacatacatgcatatgccgatttgttttgactgtgcgctgttgctgctgcttcttctttatattccacctctttttcgcttgcttttgtcttcgctgttcgccgtcgctgttaaggcgctgtaaattagctgttattgcgctgtaaacttgttagcttttttatacaagatttcaatttggtctcttttcgcatgcaatgcacgcgcacgcgtaactgcttgatattgaaaataaaaaatgaaaattaaaacacaacagagcgctgcagaagatggtggagacgagaagcggcgattggcagggcgaatttcatttgtatgcccaacagaagatagcacattgctcaaatgtcgacgcttgtcagtttgccggcgtcgcacagtgggctgcatacgaaatgaagctctcgcacatttggcgagtgtgtgctgttatgtttatttatttgataaactgttgcttcttttacttttccttttccttttgctcttgctaaattgcttacgctggctaaattggcgaataaggaaaaggaagaagaggaagaagcgagcagcagcacatgaagaaaacggcaaagaaggagcgtaaagagaaggtgaggagagggagggggaggcaaggcaaagtcgtgcatgttgtgtggccccaacacgtatgcatgagagtacgtgtgcgtgtgtatttatagcatttgtttatattttgcatgcaagagatgaagaacaacagcaataaatgccaaagcgaaagcctatccccccccttcacccaccgccacaaaccactccaatccaccaccgcattctgcgtccctttcgcactgctgccgttgcacagttgcagttgcatgtgcgtggcccattgagaagaatgtggagatagctagcgatagagcgagacggcaagcctgccacatacagttgcaagcacggcgcgcacagtgggcgaaatgtgcgcgaaaatgataacagtgccttatcattttaatatgtttgtatgactttataaatatttactttctaaaacaacgataacataatatacgaaagtcgtataaaatgaaattcaaatttatttgtattttgcattaatagttgggccaataaactgcagtatatggtatatgcataaatgaattagccgtaaagccactaaatttcgttctaggtcattaacatatgtcagcactagtgcactttcccaaaggcattctaattctaattccaacgaaccactgtattcagtttcagtttactgcagtcgaacttcacttgactgcaacttcgttgcaatctatttttgaaacgactttattcaacgcagatatatgagcacacatgcacatgtagtgctttagtgcatatggatatatatgtatgtatatgtacatatgtatgtatgtagatatgcaccccaatgtttatttgtttttcatacattgggagctgaaacaaacaaacaaatttgcgcgatcttctgcgttcccagtatcgaatatgaaactattaatagaattagtttacgtttttcgccgttcaaaacacattttgcctggctatggaatatttctcgatattccgcgttttttcccttttttcgcactactttgttagaatgaatcatttgacaatttattacacatttttagtcatgagccagtgaaaaccggggcgagaaatctaaacaataaatatttatacaatgttgtatatgagaaaggaaaccatattgtgtgtggtgtgtttatatgtggaatagaaacactattcaccttcgaatgaatgaaaacgaatcgcaccacacccaatgggcggccacgcccatttgccctcgcccaccccatttttcttcacatcactagaattctatttggccgggtattaaaaaatgagatttcccggggaaaggaaggaaattgcaattgctgacgaatcatcgaactatttgatttgattatatcatatattattttatttaaataaccctttgtactaactaaataatagctttatatgtatgtatgtgtattttgttaattacatttttctatttttaatcagctctaatcgtttatcaaagttcccattatggtcaaaacttaaatgtggatgataggtattattatttaaccttatttgataagaatacaaattcctaataacccaataagtacattataatgatgcgttgattataagacttatctatatctacattttctgcaaattatcaaaccacgtgatttctgggcataaatagtgcaactaatcggaaatattaaaaactaacaaacaagttttttccaactcgttgatatcaataaaatacaaagttttaatgttaagagccccattaagttttataagctttctaagcacaacccccactgtataatgcacacttattatagacaatgttataagttattcagcgatataataaatttaccccaagtgggaatactcttaagtggatacaatctccatcgattggcttccgaaagcatatcttcaaaggaaaaaagcctcaggcctcgtttatttgtgtttattcagtgaacaaagacaaaaaaaaaaaaaaaaaaactttgaaaaaacacagaagatctaatgaaaaataaacaaatgtgctacatgatgcatgagcgggcatgataccactcaaattgaatatagcgacccggtacaacgcggcgctatcagtcaaagttggccgtggttaagctgataacagttgataagatagacgactgaggaccccagtccacttaacaattagataagataaacaaaacagctgtgtgtactgagtatcaagagcggccccaagtgcaaacgaaagtggaattggtagtgcaaatggggaattggaaatgggaaacgaagcgcggtgttttgtgtaccctgtactcttgagtaagtcatactttttttcccatcggaatccgtctagattgcttttcttatctccatgtcggcgcggctggctatcgggcggaaaaagagcttatcaacacacggccacacaaatcgggatgatctcactaaagagatcaagaaacttttggtttactgctaaacttggcttcctataactttgagttcggactaatccataaagtataaaattttaggccaataaaagttcgagagatatcacacaattccaacgtcaaatcgtataaacttaaaaataaaactgagaaaaccccaaatctattatcatcaaaagcggtatacattgtccccaaatgttgataagtaaacgctggtataattcgattccgacatctatccatcaataaacgatcatttaacaaaaaccgggcgaatgcccgttcgacgctgctctttccgtctgtttgtttttttgggtcttatgttttggggcctagctcctcttatcgagcagttgtttggcttatcaattaaccacatggtcgggtcccgcagttacgattagatatggtcgatggcgcaatctccgccgataagttaatcgcatatcttcacagatagaccaagtgccaacccctagaaaggcaaatgaaatgtgtaaagctctagataccctaacagacgaatctatcgaaactatcctatattcattcaccaaaggaatggtttagacaactagggaagaaagtaaacaactttttaagggtcttgaacttaaaacgcctttattcatattttactaaatagttcgaataaatgttaagcaatatttaaaaacatataactttacatttttaattgttttaaaactgccgacctctgcttaaacataatgacccacagtgaaggaaccacaattgaagttgaaatttttcaatgattatattctgatgggcgctgctgtatctaatcagcggcggcgactttgctacttcacgtgttttaacggttaacagcggccatgcactccagctagccatctcgctcgcacttgccgccactgcagctgcacggagcacgcaatgtctaaattacgagagagtgggagtgggagagggagatgcactccgcccaaacacccaccaccctacccctcttcacaccatcaaaccgaaggcacgaacagaattcctggcgaacgcattggaatggtcagtcagtaaatgcatacacacgaactagatacacacacacacttagccggcaacacgaagcgctgaatgaaacgaaacaaggaagagggggagggtggtaggtgggcaaatgagcggcggtgtggagtgggggtggcgcgcgcacgttgccgttccattttatcagtttgtacatactaaaatatacatacatatagcaacatacaatttgtacaatttttcctctgtacacccagaaaatgtttgttatatttttagtatatacacagacgcaataaatatgtacccgagttggtttttttcctgtttttttggtaatgaaacgaatacacacaggaaggaagaagcagaagcgtaacgtaaatacaaaacaacaaacgaaattggcacagtgggcgttaggtgggaaattccagaaatatgattggaattattttctgtcaagttcttattgccttttgtctggaagaaagcaattattcctattggcatttgtttttaaagatttgagcaaagtcaaattatgttaaccacgttatatgattcaaaaacaagccaagggatagaaataatggaatcttaagataatagttctttttcttattaagttaagctttgtttgccccactgtttgatgacggcatcggtatgagcgaaaaagtttttttttcatcttgtctttagtgtctctttttgttgttgtcactgcagctcgttccgtaattcgtataccaactaaaatttatctacacccaggttcgactgtgtgcgtatgtgtgtgtgtgtgcaacttgttatcgcatagcgtaaaacggagaaacagcagaagaagcagcagcgaaaaccaaaacaagtttaatgacgttttgcgcgcgcagacaagaaagaaaaaacacaaaaaacaaaaggtacacacaccaacaccagcgcacgaaaccagtttggaaagaagagaaaagcgacagaagacggagggagaaagagatagagagcgagaacattacaacgtcagcgtcgacgatttttgcacgtctctgtttatattacattctgcggcccttttttcgtgtgctttttgcgcttttttttctcgccgttttttgttattgccattgcgactgttacgtacgtgcatgtaaacgaacacgtagttgtgtgcgcgtgtgtgtctgcgcggtacatgcacatgtatattccctatatgtatattggcatgtgcgcatgccttttaatggcaagggttagcagccccttttttccacagagggttgcaaaatgcgtttatacgcttctttttctgtttgaatgtacatgcatgcatgtgcacgtatgcgtgtatgtgtgagttatacatacgcattgggtggcgataaggacgcgctgataagcaaatgagttatctaatctccaacacaacgctccttatcatccatgcaaacgtaaatgtgtacgtgcatatacatgagaagcgcagtcttcttctagctcgccttccagtaaggagagataaggagcaggcaatcacgccgtttcactctgccctgaataagcggtatgtgtgccactatatcgccgcctctcttcctcccactcccccaccacgaccttccacccacatccaggctagagcgaggcagaaacagtgctctgtatcccgcgatcacggctcatattaaaaaaaaaaaggcgggggattggtaagaaacggtaaacaaatacagtggccgccaactttttcaaacttaggatttaagcaaatttcctatgtttccggaggataaaatagtgtttaattttatccagcaaatcttagattgaaattagcaaaaaaaaatttcctctaactcacttgtttgtttaaacaagtttttatttttgtttgacattggctatcaaagcaaactgaaatatcacccctcgaagagttttgtatttgaaatattttgataaaatatactttagaagatatcaagtgttcactgtggctgggaaacaacatccccctggtcactccattttttaatccatatcgcgtatttcccactggcgattcgatccgatcgctataagtgataagaaatccatcactgataggggattatcccaaatctgttttccaccacgatagatagtgttttgtactatcatttataaagccaaatatttatcaacgcggcacttttgagactctgatcactttactctaattattatgaaaggtagttttcaaggtagttgaaactactcctgcttttcccgaatccctactgcaaatgaaaaattttcccattacttgctgcagcaaagttctttctattgggtaaccactgtgccaagtattttgaatgatctatgtcatgtttgctcacctgctttgaaggtcgatgcatcgaaactgggcgctctgaccggctgctgcttatcacggagtccgctaagctgacgctcgggcacatagctgaccgccgctggcagggattcgccacgcgtcaatggcggtctgccgcccacgccacttggatcgtccatggcgctgcgcttgatgccgggcggacaaccgccggatacgcctccgccggcggatagggagttgccagcactgccatctggcgccaggccgtgtcccgactgctgttgctgctggcttacatccacatcgacatcctcgctgggcggacgctttaaattcacggatagggcgggcggtaggctgccaccgccactgccggcggtgggtacgccgccgccgggtgcaccgccaccgccgcgggtcgcatttggcggcaggtggtggggcgtcatgtgtgaaatgcgtacgggtcgtacgccgccaccgggggcatcctccagcttaacgggatagtccagtggcggaccgatgcgtggcactggcatttgatagggcatctgatggtgatgatgcactgcagcagcggcggcggcagcagcaacggcattgcccagcgaactgagcgaaccggcgcccgacggacctggaccaccacttccgggcggagcacccggtggaccgccgccacctccgccgcgatgggaacccggtccttgtcccggaactggaccgacttgtaactgttgttgctgctgtaggacgacggcggccgctgcagcggcggacacttcgccgttctcatgggaacgctgctgtttgctggcgggatggagacgcttcatttggcgggcggcgtccagcaccgcctcgatgcgatcggcgccctcatagttgacgcaaccgcggcacaccgcctccgagaagtcattgatcatcgcccagggcatgcggggtaaatcgcacagatagcagtgctgccttttcgtttgcagcgacatcctgctgcgtttctggaaactgtcaactggcaactagcaactgtcaactgtcaattggcaactgtcaattggaagccctggatgggctggatctggaaatgggtttgtgctgttttagctcactggaatggctaactgttccttcctgctggattcccaattcctattatttattattttctccttttttttcgctttcttttttcttgtttcagcttcttttcggttgtgcgttgtagctatttttcttatttagcatttgttattcatgttttcgtattgattttcgcacacacgcacatatacacgcgcgcacgcacgcatatttcaccgcgcttccacccgaaaaaaattcacttatgttttttccttcagcttcagcttcttcttcttcttcttttctattgtgctgcgccgcgctgctcgccaacacgcacgcacacaggcacacacaccacacaccacacttaggcacgcgcgccgcagagtgaaagagagagggtgcgcgcgagtaagcgggacacgtaaatgtacgacgacgccaaaaacgtgtaggaacaaaacgaacgatgagatcgcagcgacgcaacgaatgactgaaaaagcgaccggacgccacacagcttgctgatagagtgtggccttggctggtatgtgagaatataccccaggggccaagcgaaatgtactaaaaaatcttcgctgccgcaatgggaaataccaagaaaatacctgaaatactggcttatatcagagacacgaacctttcagtggacttcaaccagggttgccaaagtggctgagactgtagcgaagacttcaaccatgataaagctaaggaaattttaaattttctttaaaatttagcatcattttgagcatagtaattctactatttcgtattaatatatatagcttttaatatattgctcctaatattacgcccaaatattaaaaataaacccttttggctgtttaagtaattaaaaataatatttat

SEQ ID NO: 2627 - DNA, 1376 bp, DROSOPHILA
atgtcgctgcaaacgaaaaggcagcactgctatctgtgcgatttaccccgcatgccctgggcgatgatcaatgacttctcggaggcggtgtgccgcggttgcgtcaactatgagggcgccgatcgcatcgaggcggtgctggacgccgcccgccaaatgaagcgtctccatcccgccagcaaacagcagcgttcccatgagaacggcgaagtgtccgccgctgcagcggccgccgtcgtcctacagcagcaacaacagttacaagtcggtccagttccgggacaaggaccgggttcccatcgcggcggaggtggcggcggtccaccgggtgctccgcccggaagtggtggtccaggtccgtcgggcgccggttcgctcagttcgctgggcaatgccgttgctgctgccgccgccgctgctgcagtgcatcatcaccatcagatgccctatcaaatgccagtgccacgcatcggtccgccactggactatcccgttaagctggaggatgcccccggtggcggcgtacgacccgtacgcatttcacacatgacgccccaccacctgccgccaaatgcgacccgcggcggtggcggtgcacccggcggcggcgtacccaccgccggcagtggcggtggcagcctaccgcccgccctatccgtgaatttaaagcgtccgcccagcgaggatgtcgatgtggatgtaagccagcagcaacagcagtcgggacacggcctggcgccagatggcagtgctggcaactccctatccgccggcggaggcgtatccggcggttgtccgcccggcatcaagcgcagcgccatggacgatccaagtggcgtgggcggcagaccgccattgacgcgtggcgaatccctgccagcggcggtcagctatgtgcccgagcgtcagcttagcggactccgtgataagcagcagccggtcagagcgcccagtttcgatgcatcgaccttcaaagcagacgacagagagaaggcgaaacaagagcaacaaaaacaaagaaggcgacaaaaaaaaaacagctgtgtgagcctgcacagtggaacaagaatgacacgcaatcgtatcgtgccgctctgcggcggctgcccagaatgccacgctcaagtgcaccctgtgccaggagcgcttggaggacacgcactttgtgcaatgcccctcggtgaatcaccacaagttctgcttcccctgcagtcgcgagagcatcaaacgccagaatgtaaggactgggcaacgaggtgtactgccccagcggcgatcgctgtccactggccaactcggtgataccgtgggcattcatgcagggcgagatcaccaccattctgggcgaggaggtcaaggtgaagaaggagcgcgag

SEQ ID NO: 2628 - protein, 433 aa, DROSOPHILA
MSLQTKRQHCYLCDLPRMPWAMINDFSEAVCRGCVNYEGADRIEAVLDAARQMKRLHPASKQQRSHENGEVSAAAAAAVVLQQQQQLQVGPVPGQGPGSHRGGGGGGPPGAPPGSGGPGPSGAGSLSSLGNAVAAAAAAAAVHHHHQMPYQMPVPRIGPPLDYPVKLEDAPGGGVRPVRISHMTPHHLPPNATRGGGGAPGGGVPTAGSGGGSLPPALSVNLKRPPSEDVDVDVSQQQQQSGHGLAPDGSAGNSLSAGGGVSGGCPPGIKRSAMDDPSGVGGRPPLTRGESLPAAVSYVPERQLSGLRDKQQPVRAPSFDASTFKADDREKAKQEQQKQRRRQKKNSCVSLHSGTRMTRNRIVPLCGGCPECHAQVHPVPGALGGHALCAMPLGESPQVLLPLQSREHQTPECKDWATRCTAPAAIAVHWPTR

SEQ ID NO: 2629 - DNA, 3410 bp, DROSOPHILA
gccattagtgcactgacccactggaaatatcacttatcaagctaataacacacaaggtgtcccactaatgcataattcaaccaggttgggctagcttcttgggcagtatccattgagtttccggtgtgtcgccccacgaattcccatcacaaacagaagccatttggcgaactctcacaggaatcgatccgaattcggtcgaaatacgagccgcacacttgcgaacagcgcacggactaacgcagttcaactcgaaaccgccaaaaacgacaattacggcttaaaattaatggaaatacacgtgggcccaaaatcacgcacataccttgccggaaaccagaagcgaaaagaaaaagctggtggtgtgaaaaaacatcgatacgtcgtgcgtcgatgattcgccgatagtttcgttcatggcgatgccaagcgatatattgcggatcatcgtgtaatgaatttaaacttgggcgcgtcaaataaggtgttgcaggtttaatcactatccgagcaactgcgacgattgcaactatgtgcaacaaaatatggaactattttcagcttggtggagtttgttatataattaaatatgctttgcctcttgacccactgtgcagtgtgaacatatttcatttacacactggatgcaacagctgttcaatagatgttttgcagcaccgtcatctgataaaaaacgataagaaagctgggaatgaaaaagtaaaaagctgacagaagcgatcaaggagcaggtgttcccgaggtttaggaggctaatacaaaagcatccaagtcgtggatttagagcacccaatgcataccagcacatgataagtttctgatccatagggtggtctttgcgtcagtggaacaagtacacagggtgattcggtcaaaataaagtgacagtgctgttaaacgcactgctaagaatattttaattatacggtgttatattaagtttgtaaattaccgaaaagggcgagtacaaaactcaaagccgccgctgctaatttaagttcgacaattaattttggttggcttgtgaacaatttggataacagagtcctttggtatgcagcagaggtccagcgacggtcacactggccgtggccgtcaaaccgtggttcttcttcattattatataattaaaaccgatgcgaatcgaaaccaaaacaaaccaaaccagcgcaatccccgtgtttgaatagttacaatggtaacgcggtgacaaatgcgcacttctccacacgcccgaaataaacacaggacagcagcaagatgaaagacgatggagcaccaaacgtcgcgaaaaccaccgacccaccgccccctaaaaggtttccatccggaagagcacacagcccacatggagacggggaggcggggaaactgctgcatggcagcgtcttctcgaagcgcttcttcggctcctttcagtgggaggagttcgcctgcggctgcggagcagccttcgtcaacatcgcggtcacctatcccatctacaagatgatcttccgtcagatgctgcacggcgtgcccatcacctcggcctttgcacagctgcgtcacgagggactgggcttcctgtaccgcggcatgctgccgccgctcgcccagaagaccatatccctgtccatcatgttcggtgtgttcgacgggacgaggaggtacctcgtggaggactaccgcctgaacgactacggggccaaggtgctagcggccgtggtggccggcagcgccgagtccatcctcctgcccttcgaacgggtgcaaaccctcctcgcggactccaagttccaccagcacttctccaacacacaaaacgcattcaggtgagctgacggatctttaagtttgctaatgggatcttcttatggcttttaatcattccacaggtatgtggtttcccaccacggctaccgggagctctacaggggactcgaaccagtattttggcgcaacggcctgtccaacgcgttatttttcgtactgcgagaagaggccagcgtccggctgcctaagagagtgagtgttgaccctatcacacatacgaacctactaagatactaaccaatccgttgcccatccacagaaatccgtatccactcgaacagtgcaggagttcatagcgggcgccgtgatcggtgcgagcataagcacaatattctacccgctcaatgtgatcaaggtgtcgctgcagagtgagatgggccagaggtctgagggcagctggcaggcgtgcaagcgaatttacgtagagcgcgatcgccgcattggcaacttctatcgcggatgccccttcaacacaggccgctccttcatcagctggggcatcatgaatacggcgtacgaaaacctaaagaaactaatgcagcagcagccgccgttgccactggcctctgagtagaactagagttaacttagctgattgtacacaaacggttacttctgcctttagctagccaattatttcgttcgatttaagtctcgcctaagtcgcttgtgcacagatgctgaattctaggtgttaatgtacatacacgcatcccaagcggaggtcgcctgctcctcctactcatatctgtatatctgtatacctgtagatctattcaattcgcctcgcggatgccaagtacaatacaacgtgagcatttaaaggtacccaatcttcgagttacggtttagttagctacttttcgtgtacgtgtaaataatactagatgatgtgcgatataatacgagtgtgttgtttgtgttcgccaataactttgtgattgattgaagatactacaactgattaattaacgcggtagattcaatgttcttaaacgaaaataaaagtgtatttgtaattacgaacgaggcttaagcgtacatcttatgtaagtttcagcatttcatttcattatcattaagcacacacaacttaaacatctaatctaaggctagtggtagggtacgagtatcacaagtaagattaattgcggcacaacgggcctatcgcctcttgagggagctgcggtagcgctggtagaagtcctccatggccctgtactcgggctccagtatgtcggggatctccttgtccagcgaggcgaagtacaccatggccaccgagctgctgccccgcagctgttgctcgtaccgtcgcagctgctggaagaatccggagttcgggcgaacctgcggacgtatggcctgcacatgcttgtaggcctcgcgcaagctcatcccggcgtgcttcattagataggccaggcacaggctggccgagcggctgacgccggccacgcagtggatcaacgtgcagccgccggagagatgcacctcctcgatcagatcggccgcctcgtcaaaatgcttggccaagtccacctcggagcgatcctgggccatgatgcggagat

SEQ ID NO: 2630 - DNA, 1125 bp, DROSOPHILA
ccgccgctgctaatttaagttcgacaattaattttggttggcttgtgaacaatttggataacagagtcctttggtatgcagcagaggtccagcgacggtcacactggccgtggccgtcaaaccgtgatgaaagacgatggagcaccaaacgtcgcgaaaaccaccgacccaccgccccctaaaaggtttccatccggaagagcacacagcccacatggagacggggaggcggggaaactgctgcatggcagcgtcttctcgaagcgcttcttcggctcctttcagtgggaggagttcgcctgcggctgcggagcagccttcgtcaacatcgcggtcacctatcccatctacaagatgatcttccgtcagatgctgcacggcgtgcccatcacctcggcctttgcacagctgcgtcacgagggactgggcttcctgtaccgcggcatgctgccgccgctcgcccagaagaccatatccctgtccatcatgttcggtgtgttcgacgggacgaggaggtacctcgtggaggactaccgcctgaacgactacggggccaaggtgctagcggccgtggtggccggcagcgccgagtccatcctcctgcccttcgaacgggtgcaaaccctcctcgcggactccaagttccaccagcacttctccaacacacaaaacgcattcaggtatgtggtttcccaccacggctaccgggagctctacaggggactcgaaccagtattttggcgcaacggcctgtccaacgcgttatttttcgtactgcgagaagaggccagcgtccggctgcctaagagaaaatccgtatccactcgaacagtgcaggagttcatagcgggcgccgtgatcggtgcgagcataagcacaatattctacccgctcaatgtgatcaaggtgtcgctgcagagtgagatgggccagaggtctgagggcagctggcaggcgtgcaagcgaatttacgtagagcgcgatcgccgcattggcaacttctatcgcggatgccccttcaacacaggccgctccttcatcagctggggcatcatgaatacggcgtacgaaaacctaaagaaactaatgcagcagcagccgccgttgccactggcctctgagtag

SEQ ID NO: 2631 - protein, 349 aa, DROSOPHILA
MQQRSSDGHTGRGRQTVMKDDGAPNVAKTTDPPPPKRFPSGRAHSPHGDGEAGKLLHGSVFSKRFFGSFQWEEFACGCGAAFVNIAVTYPIYKMIFRQMLHGVPITSAFAQLRHEGLGFLYRGMLPPLAQKTISLSIMFGVFDGTRRYLVEDYRLNDYGAKVLAAVVAGSAESILLPFERVQTLLADSKFHQHFSNTQNAFRYVVSHHGYRELYRGLEPVFWRNGLSNALFFVLREEASVRLPKRKSVSTRTVQEFIAGAVIGASISTIFYPLNVIKVSLQSEMGQRSEGSWQACKRIYVERDRRIGNFYRGCPFNTGRSFISWGIMNTAYENLKKLMQQQPPLPLASE

SEQ ID NO: 2632 - DNA, 3753 bp, DROSOPHILA
caaaacactagacgtcatatcagccggaacaaacacacgcggcagaactgaatggaagcggaatgagccgagctgagcccacctggtgcagcgcaattaactagactgcttcccaaacactcctcctctacttatcgattgcattctggcccggcactcaaactcgcattcatatcagcgatgcactccgtcgtgccccactttccagtgggctgccgggcggcggtggagtaggggcgtggcaccacactctaattggagtaaattatgtttacacattcggccgcctgcaattgggtcaccgtaaaccaggcaagattggggaagaatcgtgtggggattggggaaaagtgctgatatgaaatgcatttcgtgtgcggctttacataattagacattagataggcagggaatccgaggctgtggggtcttatccgggagattgggggctctctccagccaccggggaatacttaattagttctcgtcatgtttatgggtcggttatgtaaaatggaaaggttatttaatggacgacagcgtggaaatgtcagcaggaaatgcaggagttatgagtagattcagcgcccgagatagtggatctataaatagacggaaaactaaacaggtttctttcaccgaatccccagcggtgagtcacatccttaactctccagtggcggctagaacggcaacccacgcgaatcgcggactaagatgccagggataggtgcagggaaaagcttcgccatatacaacgtgcatattacatattgtgtgttttcctctgtgtaattgaaatcgtagccgggcttttcccattcgagatgagagagtcaggagagtcacttccacagaactctccattcgatttgataatcgaacgcttctccttagcatagcagctatggttgtggaccggttctctcttccaatcgccgtatagctcgtatctgctctgctgctagagatcggttttgcaacgatcagttttgtagcgcagctgaaaacgagctgatcggctaatcggaagaatacattcatttagaaggtttccagctagaaataacagataagaaacatggcgagcaaagtctgtgagttgtggaaaatccatccaagagtcgcccgcgaaaagctataatgttttcctattcctacagcgatccttctcctgctaaccgtccatcttctggctgctcagaccttcgcccaggagctcatcgcttggcaacggcaacaacaacagcagcaacagcagcaactgcagctacagcagcaactgctgctgcagcagcaacaacaccaacgtaacccaagaccggagctgggcctccgttccctgcccggaaacccgtggacccagaacaatcaggaagccataagcgatgtggtggcggtggacctaaccaaacgtgagccggtcactccgccacccaatcgcccgccgcccgtcttcagctacatggaccgcttcagctccgagctcttcaaggagatcattaagtcgcaaagtcagcagaacgtggtgttctcgcccttctccgtccacgcgctgctggccctgatctacggggcctcggacggaaaaacgttccgggaactgcagaaggccggagagttcagcaagaacgccatggccgtggcccaggacttcgagagcgtgatcaagtacaagaagcatttggagggcgcagatctgaccctggcaaccaaggtctactacaaccgcgagctgggtggcgtcaaccacagctacgatgagtacgcaaagttctatttcagcgccggcacggaggctgtcgacatgcagaacgccaaagacacggcagccaagatcaacgcctgggtgatggacacgacgcggaacaagatccgggacctggtcacaccgaccgacgttgacccacagacgcaggcgctccttgtgaatgcagtctacttccagggtcgttgggagcacgaattcgccaccatggacacatcaccctacgactttcagcacaccaacggcagaatttccaaggtggccatgatgttcaacgacgatgtgtacggcctggccgagctgcctgagctgggcgccaccgccttggaactggcctacaaggacagcgccaccagcatgctaatcctgctgcccaatgagaccaccggactgggcaaaatgctgcagcagctgtcccggccggagttcgatctcaaccgcgttgcccaccgcctgcgccgccagtcggtcgctgtgcgcctgcccaagttccaattcgagttcgagcaggacatgaccgagccgctaaagaacctgggagtccaccagatgttcacgcccaactcgcaggtgaccaagttgatggatcagccggtgcgcgtgagcaagatcctgcagaaggcctacatcaatgtgggcgaggcgggcacagaggcctcggcagcttcctgtaagttctgaagaccatcaacacccccgaatcctgtgactaattatctcccaatctctttcccagatgccaagttcgtacccctttcgctgcctcccaagcccacggagttcgtcgccaaccggccattcgtcttcgccgtccgcacacccgcctcagttctgttcataggtcacgtggagtatcccacgcccatgagcgtctaaaatgaaccaaattcggacaaattgatttattagaattccatttctgagtagagccttgcccgttgcatttgtgaataataataataaagtatgacgctgtatttatggaaactgaactttgataaccccgtttcgctgataagagcaatgggattccgtgtcgatcacacggcgatccggagcagcagtagtagcaggtattgccattgtgccttttcccagttgtttgccggggctcttggctattctggatttccagcgaatggtttttgcccgcttctgtaagttggcaaacccgttttggagccgcggcactcctcctgccctcttgtcctcgcatccacggccgtaaatcaaaggcggatttctcaatcatttttcaaaatgagcgaagcttcctcatgcgcactagatctcacttgagatcaccgaggatggagtgcagggtaacccattttgggggagcaatggggctgagaattgtaagactgcggtatgagtaattgaaatacccgctgaaagctgggcataattaatggcgcttactcaaggttgcctacactcaacaaaactacgttgtaaatttggggttctttctgatattggaaggtgttaaagagtaggtagtaggtacctactaatgaataattaaatatcgcgaaaaacgcttcatccctcagatagcccatttcaaatctctgctgctaaaacttattaaattgctaaataaaaaacaattagagatgatctaattaaaatgtcaccattattcttatagtaataattctaatgattatatacatcagttacccctccgaaatgaaagtttagaatttcagatttctgatttgctattctacattcatttgattacgaaggcaatcaaaatgtctgcaccttttgtgttgcagtgtcgaattaagagtgagtgagttagcttccgaacttgaaattttctcaagcgcgaaacgaaaactggatagaatcgcttgctacctctcccagtgaatctctctgagaacttcgagctctccgcctctcgaatcgttccgtatcacccaagaccttcaatgccgagctctgactttggctttggacctctccaatca

SEQ ID NO: 2633 - DNA, 1621 bp, DROSOPHILA
cagctgaaaacgagctgatcggctaatcggaagaatacattcatttagaaggtttccagctagaaataacagataagaaacatggcgagcaaagtctcgatccttctcctgctaaccgtccatcttctggctgctcagaccttcgcccaggagctcatcgcttggcaacggcaacaacaacagcagcaacagcagcaactgcagctacagcagcaactgctgctgcagcagcaacaacaccaacgtaacccaagaccggagctgggcctccgttccctgcccggaaacccgtggacccagaacaatcaggaagccataagcgatgtggtggcggtggacctaaccaaacgtgagccggtcactccgccacccaatcgcccgccgcccgtcttcagctacatggaccgcttcagctccgagctcttcaaggagatcattaagtcgcaaagtcagcagaacgtggtgttctcgcccttctccgtccacgcgctgctggccctgatctacggggcctcggacggaaaaacgttccgggaactgcagaaggccggagagttcagcaagaacgccatggccgtggcccaggacttcgagagcgtgatcaagtacaagaagcatttggagggcgcagatctgaccctggcaaccaaggtctactacaaccgcgagctgggtggcgtcaaccacagctacgatgagtacgcaaagttctatttcagcgccggcacggaggctgtcgacatgcagaacgccaaagacacggcagccaagatcaacgcctgggtgatggacacgacgcggaacaagatccgggacctggtcacaccgaccgacgttgacccacagacgcaggcgctccttgtgaatgcagtctacttccagggtcgttgggagcacgaattcgccaccatggacacatcaccctacgactttcagcacaccaacggcagaatttccaaggtggccatgatgttcaacgacgatgtgtacggcctggccgagctgcctgagctgggcgccaccgccttggaactggcctacaaggacagcgccaccagcatgctaatcctgctgcccaatgagaccaccggactgggcaaaatgctgcagcagctgtcccggccggagttcgatctcaaccgcgttgcccaccgcctgcgccgccagtcggtcgctgtgcgcctgcccaagttccaattcgagttcgagcaggacatgaccgagccgctaaagaacctgggagtccaccagatgttcacgcccaactcgcaggtgaccaagttgatggatcagccggtgcgcgtgagcaagatcctgcagaaggcctacatcaatgtgggcgaggcgggcacagaggcctcggcagcttcctatgccaagttcgtacccctttcgctgcctcccaagcccacggagttcgtcgccaaccggccattcgtcttcgccgtccgcacacccgcctcagttctgttcataggtcacgtggagtatcccacgcccatgagcgtctaaaatgaaccaaattcggacaaattgatttattagaattccatttctgagtagagccttgcccgttgcatttgtgaataataataataaagtatgacgctgtatttatgga

SEQ ID NO: 2634 - protein, 476 aa, DROSOPHILA
MASKVSILLLLTVHLLAAQTFAQELIAWQRQQQQQQQQQLQLQQQLLLQQQQHQRNPRPELGLRSLPGNPWTQNNQEAISDVVAVDLTKREPVTPPPNRPPPVFSYMDRFSSELFKEIIKSQSQQNVVFSPFSVHALLALIYGASDGKTFRELQKAGEFSKNAMAVAQDFESVIKYKKHLEGADLTLATKVYYNRELGGVNHSYDEYAKFYFSAGTEAVDMQNAKDTAAKINAWVMDTTRNKIRDLVTPTDVDPQTQALLVNAVYFQGRWEHEFATMDTSPYDFQHTNGRISKVAMMFNDDVYGLAELPELGATALELAYKDSATSMLILLPNETTGLGKMLQQLSRPEFDLNRVAHRLRRQSVAVRLPKFQFEFEQDMTEPLKNLGVHQMFTPNSQVTKLMDQPVRVSKILQKAYINVGEAGTEASAASYAKFVPLSLPPKPTEFVANRPFVFAVRTPASVLFIGHVEYPTPMSV

SEQ ID NO: 2635 - DNA, 17368 bp, DROSOPHILA
taaaattaactaaattatgcgcaggcgcatggagagcgaaccatcggaacattcatatcaccacagggcggattttaaacaacgcgctcacaaaatcccttatcaagggtgagttctgtttcagcccaaaagagagcaacagtttttagcgcgaactgaccgagccggtgtgcatataattcccaacgtgttaaagcagtcactgaatagagtagctgataaaaattgttgaaaggcactctggtttctcttcaattgtcgaataaatctttcgccttttactaaagatttccgtggagaggaacactctaatgagtctaaaataatttttagtagtgccctgtcgcaagactggggccataaaaaataaatttaaaataatattagaattgtaatggaacgcattaaaactacttcttgtatgtttttaacgtttgtttttattttaactacgtaattacaactctataatacaaaattattgttaaagttgaaagtgtacaattttctcctgtgcctgtttgtattattcagattgggaatgacatgggaggggagctgaggcaaaagcatctgttttgaagagtaaaactgtttcgcttgtttttcaaattcgttcaaatttcgattgatagtgacttcttaggccgatttcttgttggttggtctcttatgattatcacagtttgctatacggaagtttcgggcatcttccatataaacttttttgttacgagtcatacggaaatgcgaaagttaattgtgcgcctctcagaaagtagttgttcaggatttttgggttcatcattctcatctttgttgtgggtgcgaattggtaactaagacataaaaactacttacagcactagctagacctatatttagtgtaaaaaaattcagccgaaatttagcaagttgtcgagtatttttcgtagttagttgcggaatggggacggcggcagcaaaagagtttcgtggcagtttcgcattacaactaaatctagggcatcgattccataatattaacaagtccatccgaagatggaggtcttaggctggcgcctccgtgggcgtgtggcatccctcgacgttctcgggccagtcgcagacgttctcctgcggattgaagaccaggttggcgggacagggcatgtggtgtttccgctcgccctcgcacatgtagtagtgggtgcagtcggcccaatccttatggtagctgatgtgtccgtcctcttcggcgcaggtcacatcatgagctgatcaaaatgatgggtatatattcaaagttccatggctaagccgttctagcaacttacgatctttggtggtgtatgctcctcgtgggccatgggattcataaggaccatcgtattccaactccaccttgtagtccttcagctcgtcgttcaaggcagtcagaagtgggtacttaccactgccgcagcgaccggagaagtcatccatgtcgatggaccacaccatgatgcctccaaagccctgctccttcagccattccgtctgttgatgaagaacgaattgtgtaagtaacgcgttatccacgacttattgagtagttgtcccaactcaccttggtcttgagagaacgctcatcatcgaagcccacccactggttgccgcggtaagcgaagggcacctgctgctccgagtcccaaactagggtggtgttgtctgccgccaggaaggagcagacctcgtagtagctgaggaacccggcctcgttggtgaacttgcccgccttgccaccgccggacgagggggatccaatatcgaattgagtgtcattgacaagctcgaaactgcgtccataggtgggcatgccgataagcagcttttccttgggagcaccctgtttcacccactccctcgcgctgtaatcaacggtcagtttcttctggtaaccggtagccgattccaatgcaaacagaggcgaattgtgtcccactgtgcgttcccactgtccgtggaagtcataggtcatcacgttaatgaagtccaggtacttcgagatctctggaacatcgtagccagcggcgatggcctcgaaggaggcgggtacagcggcagtgagcagtaggcgtggcagtccagaggacttggcctcaccctcaaaagccactcgcaattcctttagcagactgacgtaggccacacgatcttcagcaccacgaggatactcccaatccacatccaagccgttgaacttatagtcgcgcagaaagtcgatggcctcgtaaacgaactgattcatacggaacacattcgaggtgagctctttgaagggagtggaaccaaaggcccaccctccgatggccaaaaggatctgcagatcgggattattgtcacgcaaggcaattacactctcataattctcgggatcatcatcggtggcctctgttagcttgtagtcctgaagagtggcgaaggcatacacgatgtgggtgcacagcttgggatcgatgttctccggctggaatttaccggctccaggtcgcttggccgaccagctggtcagataacagaacacctgggcaggacgagctgaagaaagttggggaagaatttatagattgaacttttcatatcggcatatattgacactcactgtttgaggcgacagcatttgctccagacttgatgcgctgcttcttctgtacctgtggctttcgcaccttgttgagaatctcatccacagatatcttaatgggttctggtttctgtaagaagcaacgttagggattagaaactgtttgaaccgtcatagctggtaaacaaacctcttcgatatcctcaaatgtggccgcaacggcggtccagttaacatccttggcctcctttcctcgggaaatgcccaggagttcctcccgcatagctccaatcaggggatacttgacattgccaccgcacacctctcccttaaagtcgtccatgtcgatggtccagaccatggcaccaccgaagccattcgacttgatccagtgcatcttgttcctaatggcgcgctcatcatcgaagccaacccactggtctccatcaacaagatagggaaccttcatttcgtcatcccacacataaacagcgccattcagcagcatttcgcagatctcgtagtaggccaagaaaccaccttccttggtgtagacaccttcgcgtccaccccccgatgcgggggcattgggaccatgcttatccggattagccaaagtgaaggagcgtccataggtcggcattccaatgaccagtttctccttgggagcgcccatcttaacccataaactggcggcattgtcaacggacagttgtttgcgccactccgaatcggtggagggagcataaagtggggcattgtgtccagtctcgcgttcccactttccgtggaaatcgtaggccatcagattgataaaatccagataactggcgatggcaggcacatcatatccaccacggatattgtcgggacccactggcacggcggcggaaagcaagagacggggcttcttcagttcctgggcctcagcttcaaaggcttcgcgcagttccttcagcagcagaacgaagttcttcttgtcatcggaacccttggggtattcccaatccatatccagaccatcgaagccgcgcttgcgcaggaaaggaatggccgagtagacaaaggtctggcgggtgtatcgcgtggaggacatgtccttgaatttctgggtgccaaaggaccagcctccaagagctagaagaatctagagagaatggggatgggttaggtaaactttagaattttttagatttttctaacaccaacctttaatttaggattggcctttttgagggtcatcatacgttcgtacagtccggggacattatccttggtctcatcgttggactcataagaactcagcttgttcttcttcagccatccgaaagcgaagataatgtgggtgcagagatcggctggaatgtcctccggaacgaacttgccaatcttgacacggtactgcgaccagttggtgtagtagcacacaatctttggcgttccatcgtccaccttagtcttcttgccctttagtgaagatccactggccacgagagcagttcctccagctgctacggctgctcctccagctgcagctgctcccaatttcgccttggaacgaaggcgtgtacgacgagcacttgtggtggtggcggaggtgatctggtcaatacgcttctcagcctctggagcctcagtggacttcttagactcgatgaggttgctcctcgaggagctgaccgatgttgtgggacgccgcagtcgacgacgtgtcttggctggagattaattaaatttgaaatattaattatattcatatgatatttttaggtgcttagtttactttcagataactgaaccacatctttgcaagttattaaattcctaatatgccagttgtaagtcatttattgttcaacagcctcccatctgaatgagaggtccgcccacatttaacccaccacgtgatcaaattgaccttgccccaattgcacaattcgtgatggaagcggcggcttcactgtacaggtacggtagctgacacctgccatccaagtgagctccccatcagccgacaatgtggcaatggtaatgacgggttgccgcaatctcgatcttaatcgcgatcgcaatggcaattgcgatggattgtcaaccacttgcgatcgacgagtgccgataatttcaaattaatgtctcttcagctgaatccatcgaaagtcgtgacgggatttactgaattctgtcttaataattaagatatcgaacgtagattactcttgagcctttacagataaacatacaattatatgtataaatggaatgtctaaatggagacgctggcttgtcggacccggtttctgttgtatttgtcagtttaatttcgctaaatgaagtggtattgttgcagcagaaataacaatgcaaaattattgctaaacctgtttaaatatttcatttaatagccgtatcttttgcatttttccactgcgcaagcccacacacaacacaaccatactaaatatggttggtaatggggaggttgctgtagtacgaggtacgccttcgccttcggatattattagctagcgaggaattagttgctgcttggtcactcgaatcccaactggggatatagctcagtggtagagcattcgactgcagatcgagaggtccccggttcaaacccgggtgtccccttggtaaacctttttgttgctccccccagtccgaatacaaagtatatttttttctgatcactcgttattattggtttttctaggagtggtcaggtttattatcagccccttaatgttcttattttaggcagtaacaaagataattagctcatggaacctttgttggagcacgcagccacacttggggatatagctcagtggtagagcattcgactgcagatcgagaggtccccggttcaaacccgggtgtcccctaggtaaacttttttcccatctgcctaatattatggtcttacttttgctacatttcttcatattcagtacttatgatttcttttatgttactaaattaattgtgccctttttgcctaaatacctgtactaaaatatatatttattgagcaaaacttgtttattttttagctccgctacaagaccgaatgatatttttatgcccagcggagggttaaattcttgaatgctactatcaaacatgttgggttgcaaccacaacagcaactctagcggtaaaatgctattctagtcacaaaaagccaacgtggggatatagctcagtggtagagcattcgactgcagatcgagaggtccccggttcaaacccgggtgtccccttgttttttgcaattttcttattattcacacacttattgttatgttttctacatattgtgtattatatttccttttggcttaaaatgtaactctaagattgttgaaataattttagtgcgagttctcgattatttttgttgagtttagacacttgcctgacacagcccggctagctcagtcggtagagcatgagactcttaatctcagggtcgtgggttcgagccccacgttgggcgaattattttttagttcacacagaagctcagggattttgcaattgttcttgcttaacatattttaaaaatataagttagatattttcatgttcatatatttcaaaggtacgccagccaaataaatagcaacttatgaaatgtgaaggatttatttatcaacatggcaaatatatatatacttttaaaggatcgaataattatcaaaaaagctattcgcccaacgtggggctcgaacccacgaccctgagattaagagtctcatgctctaccgactgagctagccgggctacgtgattgaaggcgaccaaattggtgggacagtctgaggatcgaaaatttctcaattaatttttaaagtaatgacttctttcgcccaattattgggcataataatgacctgttttattaatgatacctttatttgccaactgtgcaccattttacaaattagctttttgaacataaaaatagataattaattgcaagatgttagggctaccacttttttaagccgtttggtttatttttcaatacgttttaattatctgccctaattaagatttaacgttgagttaatgggtttgtctgccacgcccttctgcctttctcctaatgaactttacgggttaaacaagaattgcttatgtgttatgtgatagtgatgcagataaacgcaatcacaacattgcagtaacaacaatagaaataaaagaacaattacttatcaatttccggctagacccgtaagaagaaactaaaaataatatgaagttacgcccacacatcaatatctggggctgttgttttgacttgttcggtaaattctcgttttttatataagaggggatatagctcagtggtagagcattcgactgcagatcgagaggtccccggttcaaacccgggtgtccccttgttttttgcgtttttttctttatacccaattacttgttcatgtttaatttctttttacattttttacttactctgtgcactgtctgcggagggcgagagcaagacaatcagcaggcatatcacaaatgcgattcgcagcaaccgcggtggaaactgtggaggagaaacaaaaacaaggggcaattaatcacgggtttatgctttgatgtacgattaataatctgtgatttatgtggggggcacgtcgactttcaacaaattacgtggcacttgttgcctccccaattgggccagagtgaaggtcgtcaggtgacagacagaggtcagtcggatggccctttggcgcccaccagtcataagcggacgaacacgttttgacattgacctacttttatcaccagaccgacctgctatgaaaaataaacaatgctcccaaagtttcaggccgattgcccggccaactaattaacaattaaccctcttgctcataattattcaaagcgactgcccattgttcagatgagacagtttgtctcataaagctgttaaaacttgtctgacatcttcagctgcacttcgcagacttattagccgttttgaagagtctctcgactttgaaagtaagcccgacctccaaccgaagccattccccattcacaaaggttcactgaagtgatgggaaaaaggttgaattcaggcaaggcacttcatttactgggacacctgattactttatttattggaatttggctgagaggtgtttttttaacagctctgataatgatgaaacaaaatattttgagttgtgaatggaaggagagtagcaatcatggtattattacagaatttgtaaaatgaataacatgaaaagagttaacagaattataaaattaatgactgtagacgtaactgtgacccttcatttgggctatgtttatctttttgcaaatattatcgactctaaccgtaggtaaacacacttaacgcttttccatttaccgggttctttaggccattacccactgcctgtttaggtattcagggggcatctccattaagaacaccttacacaacgccgggttatgcaaatcgcctgtgggccacaaacagttagccgtaatggaggtggagaagttgagaaatggtgaaatggcccgaattggcacaaccgtgagtcgattgctaacggctggggcttacagttagaaagccgtggatattctggagaagaatgcccaaggtcgtgttactaactcaccgagaaggttgccttattaatgaacatcccccgccattagtccgcccattaatctcctcagatctctcgatcgagatgggacgcagttgatcagtacataaaagtgaaactggtttcggcttattttcggctatttatttaaattttttagcagtccgcaaacggtgcataaattatttagtcttgaagcaaaataacccaaaaggttccttatcgcgtgtggccagttagtcagttagtcagttgtggtgccgaactggtctggaccaactggtttgctctcgctttggatctttgcatctttggcgctggaactctgaaactgggcgcggaaataaacggaatgaccgtaaagagaaacctggcctctcaaatgcctttcattttccttgtgcgaaagcgaaaatcaccagaaccgaaagtctccccaaaccgtcgaattcagcaaatcatctttcaattgcattcttgcgtaaaatgtgttgtatgtttcgctggcataaccatttcgggcgattgtccaagtcgaattgcaaacttttctacaaatgtccattgtgtttggtttggttgtgtggctgtgtgtcggtatcattagctggtgtccatgttgactaacggctcgctggagcacagccaagtcgctgcaactcggcactggtcgaaactgggtgtttaagcctcataatgagcagccttaatttccagatcaaatttgctttgaataacacagaaacttcaagagatttccgcggtcggcttgaaaatggcttggaaaaattactaagtttcgagaattttctcggagcttcaacctaaatactaaattttgtgttctttgaaagaaacttgcaggtattagtaccataattaccactttgcggtagatgtatgctcctcaattcataaagttaaatataaaaatataatttctgtgtaactgggacttgcttttctttatcggctttaaagagccgccaagtcttcggtttcagttttggccccacgtttctgcgtttgagtttacctgaaagccgcgccaagctctatgtctgctgttacgacagcaccaaataaaagtcaataaataatagaaagagagaggggtggactggtggatgagggggtggttttaggtaaagacaagccaactgcattccagcagcgtgattggatttgttcaattgtcttgcgcaaaaaaaagaaacatcatttcccaatggaaaatcggagaaaattgcatttaactattaagctttggatacgagactttgaacaccccgaggtgttaggctttattcgaatttattgttttctaattaaccaaaaaatgtgcatcaaacaataaagtttaatggaaaatggaaaactacatatgtatttttgcaatattagttgccaagaatctaaaatgattataggtataggcagtgtaaaatcaatgcgatcagacttaacattcaatgtcttccagggtatctaaaatatgatctgtttggtgattgtggatttcacttgcacgaaagcaagaaagcgctgaaatagcaattcatttgcgtaaattttgtggcttttgttgccgtttgccgaatgctcaataacttcaacgggcgagacaaattgcgcaaatactgcattaatcatgcgccacggaggctgcaacatctgccgttcgctgtgcggcgcgtcgcgtcgcgttcgtcgcttaagtctttcgtttggggcgatcgaaatggaaatgaaaatggaaatggcaatgcagttggcgctcgtttgaagtgcgatttatttaaatgcggtctcggctttcgaccatttaccactttagcggctgtcgaatcgatgttgtctggccgtttgtttgcggctctgtcgcgcctgctgtatttaattaaatgttgaacgcctttttgcttgaccgaaattaagctcaaggtgaggcgcaacgcagcgcagcgcagccaaagcagcgaaaataacatcgaaaaataaataagagaaatataaaagtacagtgaaaacttaagaaaaccagcgacacgcgtcttttgactgtgtgggtatgcgcattcattgggggctctaagccacaagtcataactgcttgggcaatattttggctttgattttgtggctaactattttgttttctggcccggtctcagaccagttgcatacgtcacacaattaagccatgtcgtgagcacctgtcctgaccagacgaccttgcgcaatctgaccaaaaagctgcgcaaacgagtccagagagaaaaacggctactttgacggcgattgcagattaagagagcctgagtcagcgtacttaagtacttaagccgaaactggttcacggatcgattagaataatggctgagcttaagcaatttgttgggccgggccgctgggcgagaatatgcgtttccaattaccaattacggttaaggggagggcgggcagccatttctgggtgcggtgctcagccaatcttctggtctgccggttctcctggtcgggcaattacttcctgttgcagcataaccctgaaccggccattgacgtctcggaaaacgagttgaggcagcagactccaacggctttctcataaactgtgctaaaatttacagactgttctagggcttcttacactgcgaaaatgaccgaggatatacgaaggaatggaatgaattccatgtaattttaattaattaccaaaaaattaaaaaatgaagctgcctttatgtccagttgaggtttattaagataattaaataacgcattcttgttgattaggagtttattaatgtaatgccttttacggtataaaaagttcttataaaaattttatccatgccatcttcagatcaatctattcccttaagagtttcatcttttaggtgattaagcaacatggctgggattttttgacgcacccactgagttatggaactgcattttggtttgactttttaatgtcccaaacgtgaggcaaataaaatgccagccagctgttggagccgttgctgctgagtcactatcagtaacagaaaaaaagataaaaatgaaaaaacctaagcacaaacagaagtggcaacagagcgaacgagaacatataaccattattcttgcggctgcaatgccagattttaacagttgagtgcgcaccacttccgttccagtgccgccagatcaagcatttcctacacgctgcgatcttgttcataatgtcaataaaatttatgtccgtttgtttgtttgtcttgctttttggcttctggcctcgtaaagaatttgccatttgtcagtgtcgcattagagccaacttcgttggctttttgtcagccttctggcttgggtttttcactgcttactctggcgaaaccgcagctaacggcgtggaaaatgctcgacttggtgtctctcgaacgttgggtaaaaatcatatttttcacttgcactttttgggggagtgtttgcagctttattttgcagtcaacccagcggcaataaggaactgactgtgcggacattatgtcatcgccatcagcaagtgcaacatgaggagaagcgccagcagccgcctccttacgtaagtccacatgcgcttttattaataaacaaagcgtcccaaagagagacaaccagaaatcatagggaaacgagaagcggtgaaatttgtattattagcaacttaatacgaggtttgcatctccagcggccgaaagcaggtggcattgtgctcaactttaaccttttcggttaaacagcgaagatgcgactgcaaacccgttttggcttatacagtttataaacaaatatattcaaatgaaaagatgcccgattgcctcgagtctgggccagtttgatggcccgatcagtgtttatggcctagaccataaaacggttttgcttttaatttaagccactttattgcctcgtctagccggatgacggatgaatttattgccaaatggcacaacgacgtcttcgctggacgataataataattgcctcggccagcggaagggccacaaattacaattttcgcctaattagattcaattatgagtgactatgaggttgtgcaaccgatcggcgcagatcagtctatcgccaacgatagtgatttgacatttcggttatgtcgctgtacgatttcgccgtggatatacggctgataaatttagatacttcgcctttatataatgacagcgccgaaccagtttgctttggcttttatttcggtttgtcacctcgccgtccgacaaatgattgatacacacgcgtgtacctcggatccctaagcatatggatgtggatttggcccaagcataattaacatttatttgtctgcgactttggctgccggcttggcattgggtgcggggtaattaagatggttcttgtagcgcgcggttcgacaaacaaagctcgctgcctttatgtcgcacttcctgctagaccctaaaactgaaacttgcactgggtgccgagttcgttggctcagtcttttgattttttgccaccgtgcacggagaaaaagtgaatcattaacgacatattattaataggtacaaagcgtttatgtcattttgcaagaccataccaattgaacttgcttgagcaccaagtttgttgcctcagtcttttgatttaccactgctcgccgcacaaaaccaataataattttgacattaaaaattttctattgttctggaatgcggaaactaatcatggcacgtgttcgatttattattgagtaatgtttgtttttctttgctaagcatataaatcctggatgcatagtgtgccaaatagtttccattcaatggaattcatattttttttctgtgcaatgacttgttgaattactctcactcctatcgcccgtcagctggttgactgtttgtctatctgtctcactgactgactgtctcaacgaggagttcaataaccatttgatgcgtttcgatttcagccaaactgtgtaaacaaatcagcataaaagtgagcgaggctgcaaactcgatttgcatcgctttagctgtttttctctatttatgtgtatagtgaacagagctttttattcagcccacactcccccgatgcaaaagccaaacaaaacccagttgcagctggctgtcagggctgggcaaaaagtgattgccaagaagccgacagccaagaatcgagaacgtcgtgttgccaggcacttttggccacgcttttgagccaagatattattggccgtagtcggaatgcttggcctggcctgcaattatgccccagctacttgacgctgtttgagctatgagtcgtggctgagttttgagtgcctggcattttctggcacattatattcacatttcatagaaactaaagttgcattgtctagtctaacaataaaacatttaaatgtctttcatttatgtaaagtcaagcttaaaatactattaaaatgattatatcgcttcaaaagtcacagcttcagggacagctaaaaaaatgtcagaactttgaaggggaatatgttttttctttgcttttttaataaaaaaactaaatttggtaatacaaatcaaaagataagcattcctgttacccaattcgcctacttgcatcttcttctattttctacactctaattgcgcgatcggttacaaaatctggcaaggcaggaccctcgtaatcgttggcactcgcattacgtatacgcccaatcgtaccgcattagcaacttccgtcacaataataaaaaaataatacgacaagagcgtagagaaaaatgcgttgcttgttttctgttttctgtaagggagaaagtctgtcgctgtgcaattatattgtctgcccccaacctccttttccactaagctctgattttttttttcgtttggtatttacttttctttggggtttttcgaatgtaaacatgggtaagctcgccgtcttgccatttcaatggtttgttttgcaaacaaaattctctgcaagtgttttcattcaattgtcagcgccggcagtggcatttcaaacgaaagtgagagtttcagatacactcgtagaaacatgaacagctacagatacgacgggagttttgcagatacatttccaacttactgcacatgtcagtcactgctgtcaatagcgcgtgtcaagtcgatgggcgtggcaacaagaaaaggggcggcacgaaagagagttattaactaacgccaaaatgccgcgaaagtgcacagaggcaatgaaaactttggcccggctggcaattaacattttcgagttttctttctttcaagcgatttagttttgacctgctccacattacataaatgttttggtaattataaaaagcgaaagacttgatgaatattgccataaatgataattataattaggaaaaagctcgaattaagcagtttaaattgtcttaagaagctagttagtttttggagaccgtttgatatttttccattgggaaacatttcttagcacataaaatgtatattttcagtgccataactaatgcgaaaacctatcacggagacaatgaaaacttgggcaattagcatttcttattgtttttcgtttttcgttttcattttcgaaatgcttaaatttcgacctgctccacattatacgctcgttcacagaaatataatggagctcgtatgtccgatcggttgcattgtgcggctagcgaaagaccataaaataaaatgtttaatttataaagccagcagagttcgcatttgatttggactctccgattgccttttgcttttccactgttttcgagactccgtttcgaaccaaatttttgcagttttccttttttgagaccagtttttttttatgttgctttgctttgccaactatttgccaatcgacagcggcgagttataggtattttttctttttattttttcctttgcaaatattaattgttgtaaaacaaaactagttattgtttttgccattgttgtgcgcctgtgcaacttttacttgctgcctataccgctgattttgctggcaaattgaggcgtgccgcctgctgcggccataatggaaatctttcggctagctggcttttcgtttttcgcttttcgcctcaaacggccgaggaagtaaaagccgttgccaattggccaattgaagactgcgactacggacattttccccttttctcggacgggctttcagctacgaaagcgaaactgaaaccccccaccaacttctagccccccactttacactcttttttttatttattttttttttttgtttagcccctcagcgctcattttattcattgtctttgacaagttcgccttcaacttcggtcggtcagtagcggtacagaacccgttgtcgttgttgctgttgctttttctcacactcagccattcagcgataaagtcttacacaggaaaagaattttgaacgatttcctagctgtgcggagaacgtgttagctggttaattaaagcaaacttaacaattagcataacaagaataacaatcaagtgttttctaaaatatcttggaattgtctataatatttctttgattgttttctgcctatcattgttttatgttatgtttatgcagcattgtcttgtttttttcgctgtgcattcttagtttacgttctccaactgccatggagtttctgctgtttaacattcgtttttccgttgcgtcaacggactttcaatattctttggcatgcttttggttctggcaacccaagggggctgtgttggggtctgttgtggatatgataatttccatagctccatgcctctgacacacatttgcactcaccattttcaaagctcgactccgcgccgcgtatccacaaactacaaaatcgattctccttgagcgggcagtcggtattagattggattgatctggactcgattcggattcgattggattgcgtttttaggtgtgttgtggctttcgagacactgcaaactgtcgtggctaaccgcacatattttgccactagtcactagtcactttcaaaaatcctggcccccagaaaggcgaagtggaccgcttgtcgcttcgaactcgcacgttggactgaaaaactgaaactgattcgagcgctgccgccgccagctgcgaagacaaggcgacgacaacaacggccacggcagcgacgtcggcgtagacactgggagaaaatattagtgtctacaaaatctttttaatggccatcaatagggttgtggtaggcagtaggaccttccagctgaatggccaaattaaattctttttcttagatgaacagcagtacaaataatccaaaaaattaatattatctaatatctacaaatatttccaaaaacattgaacgatatttttgtaaaattttgcaatatttgcctcagtgcattgaatgtattgtagcagcggagagtatagctaagcttagtttggcccccggattgagcagggtttttttcggtttttgttgctttggtgtttggtgttttgtgtttgacaacggctgagcttcagtttcaggtccgccacgtacgacgccatatacgcgcagtccaacaacaaagcaatggggcagtagcagcagcggcagcataaaaacagttttcggtttgcagcccgcgctgtgagctgcatggaaaattaaatttgctgcgttgcctttgctcggctctttcgttcaccactgttagttggcaacagagggttaacagtggatttggtggactagaccatatccgccggccatcgattgcctttcaattcgcgttcaatcgaaccacattcaaccggtttgatttgggtacttataatcacagatttaggcaatttcagtttctttgataatttattttaaaactgcttcatttattgtgccattttattacagaaaattgcgtattataaagactttactggaatttgtggccatttagaaagtaaaataaagtttgttaggaccacgccatcaagttctgctcacatagacctataaactggcatttaaatctgtctactattttccttacacattgagtaatatctctaaaatataaaccaatttaaa

SEQ ID NO: 2636 - DNA, 2346 bp, DROSOPHILA
cgagttcgaagcgacaagcggtccacttcgcctttctgggggccaggatttttgaaagtgactagtgactagtggcaaaatatgtgcggttagccacgacagtttgcagtgtctcgaaagccacaacacacctaaaaacgcaatccaatcgaatccgaatcgagtccagatcaatccaatctaataccgactgcccgctcaaggagaatcgattttgtagtttgtggatacgcggcgcggagtcgagctttgaaaatgtttccaccgcggttgctgcgaatcgcatttgtgatatgcctgctgattgtcttgctctcgccctccgcagacagtgcacagaccaagacacgtcgtcgactgcggcgtcccacaacatcggtcagctcctcgaggagcaacctcatcgagtctaagaagtccactgaggctccagaggctgagaagcgtattgaccagatcacctccgccaccaccacaagtgctcgtcgtacacgccttcgttccaaggcgaaattgggagcagctgcagctggaggagcagccgtagcagctggaggaactgctctcgtggccagtggatcttcactaaagggcaagaagactaaggtggacgatggaacgccaaagattgtgtgctactacaccaactggtcgcagtaccgtgtcaagattggcaagttcgttccggaggacattccagccgatctctgcacccacattatcttcgctttcggatggctgaagaagaacaagctgagttcttatgagtccaacgatgagaccaaggataatgtccccggactgtacgaacgtatgatgaccctcaaaaaggccaatcctaaattaaagattcttctagctcttggaggctggtcctttggcacccagaaattcaaggacatgtcctccacgcgatacacccgccagacctttgtctactcggccattcctttcctgcgcaagcgcggcttcgatggtctggatatggattgggaataccccaagggttccgatgacaagaagaacttcgttctgctgctgaaggaactgcgcgaagcctttgaagctgaggcccaggaactgaagaagccccgtctcttgctttccgccgccgtgccagtgggtcccgacaatatccgtggtggatatgatgtgcctgccatcgccagttatctggattttatcaatctgatggcctacgatttccacggaaagtgggaacgcgagactggacacaatgccccactttatgctccctccaccgattcggagtggcgcaaacaactgtccgttgacaatgccgccagtttatgggttaagatgggcgctcccaaggagaaactggtcattggaatgccgacctatggacgctccttcactttggctaatccggataagcatggtcccaatgcccccgcatcggggggtggacgcgaaggtgtctacaccaaggaaggtggtttcttggcctactacgagatctgcgaaatgctgctgaatggcgctgtttatgtgtgggatgacgaaatgaaggttccctatcttgttgatggagaccagtgggttggcttcgatgatgagcgcgccattaggaacaagatgcactggatcaagtcgaatggcttcggtggtgccatggtctggaccatcgacatggacgactttaagggagaggtgtgcggtggcaatgtcaagtatcccctgattggagctatgcgggaggaactcctgggcatttcccgaggaaaggaggccaaggatgttaactggaccgccgttgcggccacatttgaggatatcgaagagcttgtcaatgacactcaattcgatattggatccccctcgtccggcggtggcaaggcgggcaagttcaccaacgaggccgggttcctcagctactacgaggtctgctccttcctggcggcagacaacaccaccctagtttgggactcggagcagcaggtgcccttcgcttaccgcggcaaccagtgggtgggcttcgatgatgagcgttctctcaagaccaagacggaatggctgaaggagcagggctttggaggcatcatggtgtggtccatcgacatggatgacttctccggtcgctgcggcagtggtaagtacccacttctgactgccttgaacgacgagctgaaggactacaaggtggagttggaatacgatggtccttatgaatcccatggcccacgaggagcatacaccaccaaagatcgagaacgtctgcgactggcccgagaacgtcgagggatgccacacgcccacggaggcgccagcctaagacctccatcttcggatggacttgttaatattatggaatcgatgccctag

SEQ ID NO: 2637 - protein, 696 aa, DROSOPHILA
MFPPRLLRIAFVICLLIVLLSPSADSAQTKTRRRLRRPTTSVSSSRSNLIESKKSTEAPEAEKRIDQITSATTTSARRTRLRSKAKLGAAAAGGAAVAAGGTALVASGSSLKGKKTKVDDGTPKIVCYYTNWSQYRVKIGKFVPEDIPADLCTHIIFAFGWLKKNKLSSYESNDETKDNVPGLYERMMTLKKANPKLKILLALGGWSFGTQKFKDMSSTRYTRQTFVYSAIPFLRKRGFDGLDMDWEYPKGSDDKKNFVLLLKELREAFEAEAQELKKPRLLLSAAVPVGPDNIRGGYDVPAIASYLDFINLMAYDFHGKWERETGHNAPLYAPSTDSEWRKQLSVDNAASLWVKMGAPKEKLVIGMPTYGRSFTLANPDKHGPNAPASGGGREGVYTKEGGFLAYYEICEMLLNGAVYVWDDEMKVPYLVDGDQWVGFDDERAIRNKMHWIKSNGFGGAMVWTIDMDDFKGEVCGGNVKYPLIGAMREELLGISRGKEAKDVNWTAVAATFEDIEELVNDTQFDIGSPSSGGGKAGKFTNEAGFLSYYEVCSFLAADNTTLVWDSEQQVPFAYRGNQWVGFDDERSLKTKTEWLKEQGFGGIMVWSIDMDDFSGRCGSGKYPLLTALNDELKDYKVELEYDGPYESHGPRGAYTTKDRERLRLARERRGMPHAHGGASLRPPSSDGLVNIMESMP

SEQ ID NO: 2638 - DNA, 6043 bp, DROSOPHILA
ggagtacttcaccgtgggttatgccatatatgtggccaccgccaccgattcctaccctgtgatttacgtggcagccctgcgaactcatattctcttgctcaaggaccgtatcatttacttgggcgatcccagcaacgagggtagcagcgacccgagctacatgtttaaatcgttggtggattgtatcaaggcacacagaaccatgctaaagtaagtcagtttcattatcctaccggaaatatcaacaaccgtgaattatgttttcactcaacggatctgaatttattcggaaaactgaataaaagtacaacttttataagaactcgctattgatatttctgaatatataagagtatatttttacattcaggataaaataaatggtatatcaaacgattcgacataaaactattttatttcaaataaattagcttacattttttaaaatatatgcattaatttaaattttcaatgttaaaaacccatcccactgtttcccatgcagtttttgtgatgccattcaaccaatcatctctggcacgatatttgcccaattcatcatatgcggatcgatcctgggcataattatgatcaacatggtattgttcgctgatcaatcgacccgattcggcatagtcatctacgttatggccgtccttctgcagacttttccgctttgcttctactgcaacgccatcgtggacgactgcaaagaactggcccacgcacttttccattccgcctggtgggtgcaggacaagcgataccagcggactgtcatccagttcctgcagaaactgcagcagcccatgaccttcaccgccatgaacatatttaacattaatttggccactaacatcaatgtaagtccactgctctcggttagaacggggaaggaagcaaagtccgaacttcaatccttgcaggtagccaagttcgccttcaccgtgtacgccatcgcgagcggtatgaacctggaccaaaagttaagcattaaggaatagaaaggaatactcaatacaattgaccgcaccagaggtaaacgtacatagttttatgaacttaacacttttttgcttcgtagaattataataattgtatatgcatacagcgaattatgaataaacataatctagttaaaacaaatattgatcgaacaatgggaagtaaagaaaatcgctacatatgtataccgtacagcccctgcagaagtctatttgtaggctgggaacctggaaccttgtcctcggcaattggaatatgttcctacagaggccggattcatcggctgtgatctggtcaataggttcacttgatccctgcgactggccttttctttgaatgaggtgctgggtgtcggaagatggagttagtgacgcgttggcgagaattgcacattttatgcgaagcatggagtatttttagctcgcttctagttcgaatgtttcggcggcagtttatttcgggctaggaggaagggtagcggagggtcgacacgaatctaagtttattgatgatatttttaatggctggcatagatgaaacagcgaaagttgttcatttaacaaaaacttaggcgagataactatatgtgtctttgtgtccctccattcgctctagatactccttctcgatcaggatgtctatgcacttcttgatcacgggcaccttaggcttaaagcgcgttgacagctgattaagcacctccgatatgagattggtgtggttgagtcgtttgcgcatcttcatgatgcggacgatcgccgcctggatcagtaattttcggtcctcctctatgtgcttatgtacagtctcctgctccactttaagttcagtcttcaaaggctggttgatgttaattcggcgcttcttgtttttgtaatcgaggaacagctccaccgtcgactctggcgtcagcgagttctcattgtcgctggaggtcagcaccttcgccttgagcagtatttgcaatacctgaagaaattcttacataagtctctattaattctatctattgacactactctcacctgaatcaagttctcctgctgcgtctgtgtgttgtcctgcagttgctggactgtaaaactgagctgatcgttaaactggagcagcactgacatttggaaggtgctggcctgcagggtgtaggtggaggaattattgcggttgacgttcattatcagttcgcccttgcacatctgatacaaccagttgagcttgcggccagagtggcgggcggcgtagaactcattgaactgtcgcactgaccgctccagctcagatggtagcaggaagttgttgctcagctggaaaggccaagagcctgaggacaggacttcgatgccaaagtctatttccatggtcaagttcttttcggccaggtactgcttaaagtacgagttcaagtcctttgagacgccaatgtcctggaacatcctctgaagcttgacggtgtattcgtaaccacatgtctgcttcagtttggagatcatcatagcctcggcgtcatccgaagccgatgtgtggttaaccaagcgcttagcaagcatcttggagtaatatttttggaagacgtccttatcctcgatatacttgaacacgaccatcacctggttaagattgtcctcgagctccttgtcctcgggatttttcgaggatttttttaataacagatcgcagtacttggccagcaattcgggcgacttgctagcactgtttgcgatcgtgaccacgttcgagtttatgaactttccacacgccttgtccaaagcggccacaaatccgttgtcattgttgaacgccgtcagaacgagggcgttgtacttcttgtgcacgtccaggatggtctgtacgtacgtcttgggatcgttggccgcgtcggtagtgcaacacttggcaatggcctccgtgccctggtggagtatatggttctcaaggatggacttgagatctgtcaggtttttggacgagagggcgaccaaggagtacatccgtttcagatcatcgtttcggtctgcgttgagcagattctgaaactcggtgtgaaagattttcagatgtttttcgataagaacctgaaagacattgattcggttagtaggcggctttaaagttggacacggtaggcaatcccacctcttcgcatgtggacttcagcacatccgctgtggtctcgtgcagataggaaagaccgttctttgaattaaagccgcggacgcgctgcgtctcctcctccagcctgttttcgacgtgcttcagatactcggtgaccgtgttggtggacagaaaggcgtccgactccttctcgtagaaggctgatgtgtctgcgatgaacttgttttcaaagttttgcttgtagacggataacttctgctgctcggcatcggtatcctcctcgttaaagctgagctccacgtagcactcgataacgtcgcggaccagcgaccggttaatgagcttgccttgacgctcctcctcaatggacttgagcactgccttggtgaccggctcatttagcacttggaacaaatgtcccttccaggcgacgagggccagtcggtagatcttgtagatacccttctgcccctcctcgcactcgcgcttcacccagttccgattcaggtagttgcagatgccgtccagaacggtactggagaactgatacgacttccactgtttggtgtagcgcgacaggagtacctcctcgccgctgatggccttgaacttggtgagcagctcgctcaggtatgacttgagaaattgttccagccggtcgtacagcttcttgcccaccagctgcgctccgcctgtctttccgctgctccgtccgcttggagccgcgctcacgctggtgcagtagtcatagacgtgagtgtagaaacgcatgtactggctgcgggtgagggacttctcgtgctcaaacacctgcataatgccctcgaccaattcgctccagatatcgtccaggttgacgagtttctgtgtggtctgggaattgccggagcggttcattctggcggcggtgggttgtggcaacggccttctgccttcttccactggaggatgctgtccctgcagtggcgctgggctggagaaggcaatgaccctaggtggcgaatgctgcgcgggcgacaggggattgctgctgctttccaggtggcgtcgtttcgcggctctcgtccttggagttgtggccggaatcttggcgaatcggtgttccaattttggaatttaaagtgtcaatctgcagatgagagaatcggtacaaaaacggaatgggattgggaatgtagtaggcctcgccacgttaaaagcgacgacccgaaggtcgcctattatgatccaatgtcacagcaataaaagagaggcttgcggaatacacacacacacacacatgcacgcacaagctgtaatgcaatgcgcggtggtcggacatgccctgcaatgtagggtattggccaatcgcatggcaggtgaagccccaccaccgcccccgctatcgttagatcgtgttcgaaaacccaacttcctggttaaataaacactcgcatgcacacatatgcagtcgccctcgccttcacacacacacccgcacccacacaaaggcacataaagccaagagaaaagatagcggacataaccatttcacaactaaattgttaacatttttttcgatttttcacatagctccctccaaacgaaatttattttcctggtaaattgagccgtgcgactgagttttcttttcgtgacgtcgtgatggatttgatttccccttggagcacacacactttttctcttttgttcgccattttcaaagcacgaaatcccgtctctttgcatttccctcattttgctttatattacctgttgccagacgctgctaaaattaaaactaaaactaaattaaaattgtgtttcactgctttgcttataattaaattaattttttttttctgtgaaaattgctaactttcgtttattcctaactattaaaatgtgtgaccgttcggccattgcgctgcaaggccctcgacggtggtatcgcttaagaccagctatcgttggcgatctatttattgggcgccactattggtggcgatctcatttttcagggaattctttacacggaaagcagttatattatagtttataatatcaaatatcgctgttaggctcttcaaagcgtgatgtaaaatatcggcaacgcggttcgtatcttagattttacaaatccgttagcggttacagaaaccttcttatagatgtcattttcctgggcacacttcctggaacttgagaacaatctatactttatataaaacgattggtcttagcacttgcataataaaacccttttcaaataattagggtatgcttatatagtcttatacaggttcaccctaatgcccgtacgaaacacaactcctccaggactcaaaccaatgtgaccgtgtatagaaggcatacgcatttacttcaatttcgattcgtttgctttgacatgtgcggcaactctgacgccaagcaaaacaaaaacagtgcagcaaagaaatttaaaaggtcattgtttatgcttagaagcggctatatttagtaattttgatagttggatacgaaaagatgtcctgtcgctgcttctgcttagtggctgcagcactgctgctgctgttcttccaccagcaatcctgtgacgcagccacccagacgccccaaaagacggtggtaattgcggagcagagtgcgccggctgctgaggtggaggccaaaaagccagtcgtgaagaaatcgcaagcagagaatcctccggcaggaccaaaggattctatggtggtcgtagacgatggcggacctgctccggttgctccaggtgcttcggttgccacacaagtttcaccaggagatgccaaggcaccggaaatggtgcagcctccgggaggtcttcccgtggatgatgttcatgttgaacgctctcccatgtcccccgatgtggactttccgggccaggctgttgtctacatcctcgtgggaatcaccagta

SEQ ID NO: 2639 - DNA, 3303 bp, DROSOPHILA
caccgtcgagggccttgcagcgcaatggccgaacggtcacacattttaatagttaggaataaacgaaagttagcaattttcacagaaaaaaaaaattaatttaattataagcaaagcagtgaaacacaattttaatttagttttagttttaattttagcagcgtctggcaacagattgacactttaaattccaaaattggaacaccgattcgccaagattccggccacaactccaaggacgagagccgcgaaacgacgccacctggaaagcagcagcaatcccctgtcgcccgcgcagcattcgccacctagggtcattgccttctccagcccagcgccactgcagggacagcatcctccagtggaagaaggcagaaggccgttgccacaacccaccgccgccagaatgaaccgctccggcaattcccagaccacacagaaactcgtcaacctggacgatatctggagcgaattggtcgagggcattatgcaggtgtttgagcacgagaagtccctcacccgcagccagtacatgcgtttctacactcacgtctatgactactgcaccagcgtgagcgcggctccaagcggacggagcagcggaaagacaggcggagcgcagctggtgggcaagaagctgtacgaccggctggaacaatttctcaagtcatacctgagcgagctgctcaccaagttcaaggccatcagcggcgaggaggtactcctgtcgcgctacaccaaacagtggaagtcgtatcagttctccagtaccgttctggacggcatctgcaactacctgaatcggaactgggtgaagcgcgagtgcgaggaggggcagaagggtatctacaagatctaccgactggccctcgtcgcctggaagggacatttgttccaagtgctaaatgagccggtcaccaaggcagtgctcaagtccattgaggaggagcgtcaaggcaagctcattaaccggtcgctggtccgcgacgttatcgagtgctacgtggagctcagctttaacgaggaggataccgatgccgagcagcagaagttatccgtctacaagcaaaactttgaaaacaagttcatcgcagacacatcagccttctacgagaaggagtcggacgcctttctgtccaccaacacggtcaccgagtatctgaagcacgtcgaaaacaggctggaggaggagacgcagcgcgtccgcggctttaattcaaagaacggtctttcctatctgcacgagaccacagcggatgtgctgaagtccacatgcgaagaggttcttatcgaaaaacatctgaaaatctttcacaccgagtttcagaatctgctcaacgcagaccgaaacgatgatctgaaacggatgtactccttggtcgccctctcgtccaaaaacctgacagatctcaagtccatccttgagaaccatatactccaccagggcacggaggccattgccaagtgttgcactaccgacgcggccaacgatcccaagacgtacgtacagaccatcctggacgtgcacaagaagtacaacgccctcgttctgacggcgttcaacaatgacaacggatttgtggccgctttggacaaggcgtgtggaaagttcataaactcgaacgtggtcacgatcgcaaacagtgctagcaagtcgcccgaattgctggccaagtactgcgatctgttattaaaaaaatcctcgaaaaatcccgaggacaaggagctcgaggacaatcttaaccaggtgatggtcgtgttcaagtatatcgaggataaggacgtcttccaaaaatattactccaagatgcttgctaagcgcttggttaaccacacatcggcttcggatgacgccgaggctatgatgatctccaaactgaagcagacatgtggttacgaatacaccgtcaagcttcagaggatgttccaggacattggcgtctcaaaggacttgaactcgtactttaagcagtacctggccgaaaagaacttgaccatggaaatagactttggcatcgaagtcctgtcctcaggctcttggcctttccagctgagcaacaacttcctgctaccatctgagctggagcggtcagtgcgacagttcaatgagttctacgccgcccgccactctggccgcaagctcaactggttgtatcagatgtgcaagggcgaactgataatgaacgtcaaccgcaataattcctccacctacaccctgcaggccagcaccttccaaatgtcagtgctgctccagtttaacgatcagctcagttttacagtccagcaactgcaggacaacacacagacgcagcaggagaacttgattcaggtattgcaaatactgctcaaggcgaaggtgctgacctccagcgacaatgagaactcgctgacgccagagtcgacggtggagctgttcctcgattacaaaaacaagaagcgccgaattaacatcaaccagcctttgaagactgaacttaaagtggagcaggagactgtacataagcacatagaggaggaccgaaaattactgatccaggcggcgatcgtccgcatcatgaagatgcgcaaacgactcaaccacaccaatctcatatcggaggtgcttaatcagctgtcaacgcgctttaagcctaaggtgcccgtgatcaagaagtgcatagacatcctgatcgagaaggagtatctagagcgaatggagggacacaaagacacatatagttatctcgcctaagtttttgttaaatgaacaactttcgctgtttcatctatgccagccattaaaaatatcatcaataaacttagattcgtgtcgaccctccgctacccttcctcctagcccgaaataaactgccgccgaaacattcgaactagaagcgagctaaaaatactccatgcttcgcataaaatgtgcaattctcgccaacgcgtcactaactccatcttccgacacccagcacctcattcaaagaaaaggccagtcgcagggatcaagtgaacctattgaccagatcacagccgatgaatccggcctctgtaggaacatattccaattgccgaggacaaggttccaggttcccagcctacaaatagacttctgcaggggctgtacggtatacatatgtagcgattttctttacttcccattgttcgatcaatatttgttttaactagattatgtttattcataattcgctgtatgcatatacaattattataattctacgaagcaaaaaagtgttaagttcataaaactatgtacgtttacctctggtgcggtcaattgtattgagtattcctttctat

SEQ ID NO: 2640 - protein, 774 aa, DROSOPHILA
MNRSGNSQTTQKLVNLDDIWSELVEGIMQVFEHEKSLTRSQYMRFYTHVYDYCTSVSAAPSGRSSGKTGGAQLVGKKLYDRLEQFLKSYLSELLTKFKAISGEEVLLSRYTKQWKSYQFSSTVLDGICNYLNRNWVKRECEEGQKGIYKIYRLALVAWKGHLFQVLNEPVTKAVLKSIEEERQGKLINRSLVRDVIECYVELSFNEEDTDAEQQKLSVYKQNFENKFIADTSAFYEKESDAFLSTNTVTEYLKHVENRLEEETQRVRGFNSKNGLSYLHETTADVLKSTCEEVLIEKHLKIFHTEFQNLLNADRNDDLKRMYSLVALSSKNLTDLKSILENHILHQGTEAIAKCCTTDAANDPKTYVQTILDVHKKYNALVLTAFNNDNGFVAALDKACGKFINSNVVTIANSASKSPELLAKYCDLLLKKSSKNPEDKELEDNLNQVMVVFKYIEDKDVFQKYYSKMLAKRLVNHTSASDDAEAMMISKLKQTCGYEYTVKLQRMFQDIGVSKDLNSYFKQYLAEKNLTMEIDFGIEVLSSGSWPFQLSNNFLLPSELERSVRQFNEFYAARHSGRKLNWLYQMCKGELIMNVNRNNSSTYTLQASTFQMSVLLQFNDQLSFTVQQLQDNTQTQQENLIQVLQILLKAKVLTSSDNENSLTPESTVELFLDYKNKKRRININQPLKTELKVEQETVHKHIEEDRKLLIQAAIVRIMKMRKRLNHTNLISEVLNQLSTRFKPKVPVIKKCIDILIEKEYLERMEGHKDTYSYLA

SEQ ID NO: 2641 - DNA, 3479 bp, DROSOPHILA
ttgccggggctcttggctattctggatttccagcgaatggtttttgcccgcttctgtaagttggcaaacccgttttggagccgcggcactcctcctgccctcttgtcctcgcatccacggccgtaaatcaaaggcggatttctcaatcatttttcaaaatgagcgaagcttcctcatgcgcactagatctcacttgagatcaccgaggatggagtgcagggtaacccattttgggggagcaatggggctgagaattgtaagactgcggtatgagtaattgaaatacccgctgaaagctgggcataattaatggcgcttactcaaggttgcctacactcaacaaaactacgttgtaaatttggggttctttctgatattggaaggtgttaaagagtaggtagtaggtacctactaatgaataattaaatatcgcgaaaaacgcttcatccctcagatagcccatttcaaatctctgctgctaaaacttattaaattgctaaataaaaaacaattagagatgatctaattaaaatgtcaccattattcttatagtaataattctaatgattatatacatcagttacccctccgaaatgaaagtttagaatttcagatttctgatttgctattctacattcatttgattacgaaggcaatcaaaatgtctgcaccttttgtgttgcagtgtcgaattaagagtgagtgagttagcttccgaacttgaaattttctcaagcgcgaaacgaaaactggatagaatcgcttgctacctctcccagtgaatctctctgagaacttcgagctctccgcctctcgaatcgttccgtatcacccaagaccttcaatgccgagctctgactttggctttggacctctccaatcaatgacctcaatgtctcaatataatttgaatttccttgaatgagcgcgtagcctagttgtgtgtaagccactggatcattaacattagcattagtcgaagcttggtatttcccaaaacatgatccactggagacttctttccgccctacttgtgggcctggctatagctttaacgcttccagtcgacggggagctcttggccagatcgccggccagcgtctcgagtaaccgctttggcctacgcctaactactaagttgggactaactcaaccagatgcaaatgtggtggtttcccccttgcttatacaggcggcgctcagcctgctgtatgcggaaagttcttcggagtacggtagccaactccgccaggctctggagctgacccacgccagtcacccgaagcttgcggtgcaggacttcgagacccttttgacggacctcaagcagtcggctgccattggctgtcgcttgcggttgctgagtgacctctacgcacagcagcgcttcaccttcaacttccgcaatgaattcgagaccttggccgcccgaatgggcgtcggctgccaccgcttgtcgtgggaaagtgcgtcgaacgcggcccaggatatcaactacgccttccttagccgcagcaacttcagcctgggggagctcgtcagtgccccccaactcgagtccttggccgagcacaacacgccctttttacacgtctcgggagtcaccttccgagccccttgggcttgggccttcgatcctaccgagacgcagagcatcaacttctttgccgggggaaatcgccccaggctggtggatgccatgttcggacagcaccgctacaggtacgctgaagtgcccgctctggacgcccagctcattgaggtgcccttcgccactgcagacctccgaatgctcattgtatttcccaatcggcctgatggcctggcccaacttgagaggaagctggcgcagtccgatctccaccagctaaggtcccagctcgaggagcgcaaggtggccctcactctgcccaagctcagagtgctagtccactccgacctgaagcacgtgctcgaggaggtgagttaacaactgttaggatttctcttggaactgcagcttgtacaagttcaaatcaaacgttttccatatggaacgcaatattaaataagaaacgctagagttacgtggatacttattaagctaagaagcagtcattagacttctcctttggcttgagtgggaaatttaatgttctcaacatgatttcccttgcagttgggtctggcaaaactattcacatcggaggtccacctgagcgaggtcttcagctccatcctgtccagttcggctccacccttgggagcagtggtccagagtggtctcctggagctacaggaggatggcggcaatgccgacgactcgttctgtaagtgatcacgccagtctctgaccaagaagcctcctaaaccaggtgtacttctagccttcggggatctgttccgacgagccctgcccctggtcatcaatcacccgttcttttacgccatcggcaatggcaaaactctgctgctgtccggccacatcgtcgacatctgagtctttctaggcatacctaattctcgattccaatgctagttcaagccgggcgggctatcgccttatcagccccactcaaatctccgcgaaataaacagaatcacccgtggccagccaaaggtgacaaatgatttgtaaacacacttgatcggtatttgtatttgggacccgagagctgagtttcgtgtttgaatccgacttggatcaacctctataggcgctctgcgatcgcagagatttcagttcacattccgacgagctcaagtgcgaatcaagcggagcaggagacgcccatcaacaatttatgtgacgaccatggctgtcatcatcagctgcctattacgtaagccccaattaagcgatctggtttgtgcactgtacgaaagctgtacaggaatgtatttccactttaaaggccgttgctatcaaaagagttgctacaattttgggtgttttattatcattaagaataaatttcttctattttcaattgatatttgacgtaatgccacagtttctaacttggtgataaagtcaaatcgatttcaaagtgacaaatatccttcctatttctgtgaaaattatataaaaagtgaatcaaatcgcacgaaaaaatatgtgaattaaatgtgacaattattcgagctataattttctccaagtgtgcctcatctggcggggcggagcctgcaaacaaattgcgactaatgccatgtttcgcatcgattcctttagttctcctcgcgacagtgtcgcagtccaagaccgtgggttacgatgcggctgccgatcgcaatttgctggctgccgatctctacaacgccgtggccgccgatcatctgaacgaaaatgtggtcatctcgccagcgaccatacagagttccatggcgctggccttcgtgggggccaagggtcagacggcatcggagttgcagcaggggctgcgtttaggtcctggcgatgcggatgcggtgagccagcgcagcggtagttaccaaca

SEQ ID NO: 2642 - DNA, 1236 bp, DROSOPHILA
atgatccactggagacttctttccgccctacttgtgggcctggctatagctttaacgcttccagtcgacggggagctcttggccagatcgccggccagcgtctcgagtaaccgctttggcctacgcctaactactaagttgggactaactcaaccagatgcaaatgtggtggtttcccccttgcttatacaggcggcgctcagcctgctgtatgcggaaagttcttcggagtacggtagccaactccgccaggctctggagctgacccacgccagtcacccgaagcttgcggtgcaggacttcgagacccttttgacggacctcaagcagtcggctgccattggctgtcgcttgcggttgctgagtgacctctacgcacagcagcgcttcaccttcaacttccgcaatgaattcgagaccttggccgcccgaatgggcgtcggctgccaccgcttgtcgtgggaaagtgcgtcgaacgcggcccaggatatcaactacgccttccttagccgcagcaacttcagcctgggggagctcgtcagtgccccccaactcgagtccttggccgagcacaacacgccctttttacacgtctcgggagtcaccttccgagccccttgggcttgggccttcgatcctaccgagacgcagagcatcaacttctttgccgggggaaatcgccccaggctggtggatgccatgttcggacagcaccgctacaggtacgctgaagtgcccgctctggacgcccagctcattgaggtgcccttcgccactgcagacctccgaatgctcattgtatttcccaatcggcctgatggcctggcccaacttgagaggaagctggcgcagtccgatctccaccagctaaggtcccagctcgaggagcgcaaggtggccctcactctgcccaagctcagagtgctagtccactccgacctgaagcacgtgctcgaggagttgggtctggcaaaactattcacatcggaggtccacctgagcgaggtcttcagctccatcctgtccagttcggctccacccttgggagcagtggtccagagtggtctcctggagctacaggaggatggcggcaatgccgacgactcgttctgtgtacttctagccttcggggatctgttccgacgagccctgcccctggtcatcaatcacccgttcttttacgccatcggcaatggcaaaactctgctgctgtccggccacatcgtcgacatctga

SEQ ID NO: 2643 - protein, 411 aa, DROSOPHILA
MIHWRLLSALLVGLAIALTLPVDGELLARSPASVSSNRFGLRLTTKLGLTQPDANVVVSPLLIQAALSLLYAESSSEYGSQLRQALELTHASHPKLAVQDFETLLTDLKQSAAIGCRLRLLSDLYAQQRFTFNFRNEFETLAARMGVGCHRLSWESASNAAQDINYAFLSRSNFSLGELVSAPQLESLAEHNTPFLHVSGVTFRAPWAWAFDPTETQSINFFAGGNRPRLVDAMFGQHRYRYAEVPALDAQLIEVPFATADLRMLIVFPNRPDGLAQLERKLAQSDLHQLRSQLEERKVALTLPKLRVLVHSDLKHVLEELGLAKLFTSEVHLSEVFSSILSSSAPPLGAVVQSGLLELQEDGGNADDSFCVLLAFGDLFRRALPLVINHPFFYAIGNGKTLLLSGHIVDI

SEQ ID NO: 2644 - DNA, 3968 bp, DROSOPHILA
gtgcccgctctggacgcccagctcattgaggtgcccttcgccactgcagacctccgaatgctcattgtatttcccaatcggcctgatggcctggcccaacttgagaggaagctggcgcagtccgatctccaccagctaaggtcccagctcgaggagcgcaaggtggccctcactctgcccaagctcagagtgctagtccactccgacctgaagcacgtgctcgaggaggtgagttaacaactgttaggatttctcttggaactgcagcttgtacaagttcaaatcaaacgttttccatatggaacgcaatattaaataagaaacgctagagttacgtggatacttattaagctaagaagcagtcattagacttctcctttggcttgagtgggaaatttaatgttctcaacatgatttcccttgcagttgggtctggcaaaactattcacatcggaggtccacctgagcgaggtcttcagctccatcctgtccagttcggctccacccttgggagcagtggtccagagtggtctcctggagctacaggaggatggcggcaatgccgacgactcgttctgtaagtgatcacgccagtctctgaccaagaagcctcctaaaccaggtgtacttctagccttcggggatctgttccgacgagccctgcccctggtcatcaatcacccgttcttttacgccatcggcaatggcaaaactctgctgctgtccggccacatcgtcgacatctgagtctttctaggcatacctaattctcgattccaatgctagttcaagccgggcgggctatcgccttatcagccccactcaaatctccgcgaaataaacagaatcacccgtggccagccaaaggtgacaaatgatttgtaaacacacttgatcggtatttgtatttgggacccgagagctgagtttcgtgtttgaatccgacttggatcaacctctataggcgctctgcgatcgcagagatttcagttcacattccgacgagctcaagtgcgaatcaagcggagcaggagacgcccatcaacaatttatgtgacgaccatggctgtcatcatcagctgcctattacgtaagccccaattaagcgatctggtttgtgcactgtacgaaagctgtacaggaatgtatttccactttaaaggccgttgctatcaaaagagttgctacaattttgggtgttttattatcattaagaataaatttcttctattttcaattgatatttgacgtaatgccacagtttctaacttggtgataaagtcaaatcgatttcaaagtgacaaatatccttcctatttctgtgaaaattatataaaaagtgaatcaaatcgcacgaaaaaatatgtgaattaaatgtgacaattattcgagctataattttctccaagtgtgcctcatctggcggggcggagcctgcaaacaaattgcgactaatgccatgtttcgcatcgattcctttagttctcctcgcgacagtgtcgcagtccaagaccgtgggttacgatgcggctgccgatcgcaatttgctggctgccgatctctacaacgccgtggccgccgatcatctgaacgaaaatgtggtcatctcgccagcgaccatacagagttccatggcgctggccttcgtgggggccaagggtcagacggcatcggagttgcagcaggggctgcgtttaggtcctggcgatgcggatgcggtgagccagcgcagcggtagttaccaacaggccctgacccgcgacaacaacttccggctggccaacaacatttacatcaacgagaaccttgagttcaagggctccttcagggacgtggcccagcgccagttcgactcgaacatcgacaagctggactttcacccgccgtacaacaagcgcacggcggatggcatcaaccgggcggtggccaccaagaccaacggcaagatcactgacatcctccgcgccgagctgctgaatgatcgcaccgagggagtgatcgtgaacggcgtttcctactcagccgcctggcaaaaggccttccggctggacaagaccgaaaagcgctccttccgcaccggaagcgggcagtctgtcaaggtagacaccatgtggacgctgcagaacttcaactacgccgaggtcaactccctggacgccaaggtggtggagctgccctaccagaaccccgacttctccatgctgctgctcctgcccaatcgcaaggatggtctgagatccctgcagcagtcgctgtccggtaagaatcttctggccgaaatcggagcgatgagccagcaaaaggtggaggtgctgctgcccaagtttagtgtcacctttggcttgggtttggagggaccattcaagaaggtaagtaggaatcgatttgagcgaattttcaagtggttacgatattgtaataatatttctttggattatgagaaaggtttttttcataagtcagttgataaattctgattgcatttttacatttttacatttttaaaagactatcaactatttatgatgatgtttaatctaacactttaactttcgtcaactagctgggcgtccatacaatgttctcgagagatggtgactttggcaacatgtaccgcatgtttgtcagccatttcattaacgcagtggagcacaaggccaatgtggaggtcactgaagctggcgtggatcaacccctggaaactggatgtgagtagacacctaagtgcactaagcagatcccagtgaagtgactacctttcttccgaaatccagtgcttaaaggactcttttcgcgctccaagaagttcgaggcagatcatccgttcgtgttcgccatcaagtacaaggactcaatcgcctttatcggacacattgctaactatgcttatgtctaagctagatcgcagatacggagtagatcattttgttaaaacttacaaataaaaaacacacgtaaattgacctaatgaatgttactttttgaacaaaagactgacagaaattaacaacttgtatgaaactggaatggacgacgtccaagtgtttttcccaaaggttgcattttagattatttttaatccggcgcggcactcacctttctagctcaacaggcatttgatttggggtatccatgtttgcggagcggaggatgtatccgaagtttttatggctggcgttctacgggctgatgtcttttcggtttctttgtcgcttgattggcactcacaggtatttcactggtgacactgggggcgggggtgatgcctttcggcattacttatatttattatcttattctgcggtttctcggccgactgcgctgcgttgtttcctttaatcgcgcacataaatcaacaaaagccgagccagctgacaacaatttgagcttaggcgtatttattataaatttcttggcgcgttcgtgaaaaaattcgcggagtgcctgtcgataaactggttcgcgcaccgaattaactttggctccaccaaatggctcaggcccgatctagctgcctaattgtatttatgcatgtgcttggggtgggggacacttcgcaggggttgggtgaggagggggtggctgctggccatttaaaataattgatgcacatttcccggccgctcaagaaacacacgcagccacactgctgccaccgacggcaggcatttcattattttccgcaaactccttttcctggccactgcacgcgacagctgcccgatttctggactcccgttcaccgattcccggcacttgataagcccaaaagcgcaaaaaagcaaaaacgcgggggccgtcgctgatccgttccgtttccgtgcgttccctaacgttcctttccgtttcgtttgccttcgagcgttccgttcgcgcacgcgcacgtccgcgagttcgatgttcgtgcgaggcgcgcagcagactgacagcgatgtcgatcggccccaaagacgaactccaaaaacggc

SEQ ID NO: 2645 - DNA, 1316 bp, DROSOPHILA
gacgagctcaagtgcgaatcaagcggagcaggagacgcccatcaacaatttatgtgacgaccatggctgtcatcatcagctgcctattacttctcctcgcgacagtgtcgcagtccaagaccgtgggttacgatgcggctgccgatcgcaatttgctggctgccgatctctacaacgccgtggccgccgatcatctgaacgaaaatgtggtcatctcgccagcgaccatacagagttccatggcgctggccttcgtgggggccaagggtcagacggcatcggagttgcagcaggggctgcgtttaggtcctggcgatgcggatgcggtgagccagcgcagcggtagttaccaacaggccctgacccgcgacaacaacttccggctggccaacaacatttacatcaacgagaaccttgagttcaagggctccttcagggacgtggcccagcgccagttcgactcgaacatcgacaagctggactttcacccgccgtacaacaagcgcacggcggatggcatcaaccgggcggtggccaccaagaccaacggcaagatcactgacatcctccgcgccgagctgctgaatgatcgcaccgagggagtgatcgtgaacggcgtttcctactcagccgcctggcaaaaggccttccggctggacaagaccgaaaagcgctccttccgcaccggaagcgggcagtctgtcaaggtagacaccatgtggacgctgcagaacttcaactacgccgaggtcaactccctggacgccaaggtggtggagctgccctaccagaaccccgacttctccatgctgctgctcctgcccaatcgcaaggatggtctgagatccctgcagcagtcgctgtccggtaagaatcttctggccgaaatcggagcgatgagccagcaaaaggtggaggtgctgctgcccaagtttagtgtcacctttggcttgggtttggagggaccattcaagaagctgggcgtccatacaatgttctcgagagatggtgactttggcaacatgtaccgcatgtttgtcagccatttcattaacgcagtggagcacaaggccaatgtggaggtcactgaagctggcgtggatcaacccctggaaactggattgcttaaaggactcttttcgcgctccaagaagttcgaggcagatcatccgttcgtgttcgccatcaagtacaaggactcaatcgcctttatcggacacattgctaactatgcttatgtctaagctagatcgcagatacggagtagatcattttgttaaaacttacaaataaaaaacacacgtaaattgacctaa

SEQ ID NO: 2646 - protein, 393 aa, DROSOPHILA
MAVIISCLLLLLATVSQSKTVGYDAAADRNLLAADLYNAVAADHLNENVVISPATIQSSMALAFVGAKGQTASELQQGLRLGPGDADAVSQRSGSYQQALTRDNNFRLANNIYINENLEFKGSFRDVAQRQFDSNIDKLDFHPPYNKRTADGINRAVATKTNGKITDILRAELLNDRTEGVIVNGVSYSAAWQKAFRLDKTEKRSFRTGSGQSVKVDTMWTLQNFNYAEVNSLDAKVVELPYQNPDFSMLLLLPNRKDGLRSLQQSLSGKNLLAEIGAMSQQKVEVLLPKFSVTFGLGLEGPFKKLGVHTMFSRDGDFGNMYRMFVSHFINAVEHKANVEVTEAGVDQPLETGLLKGLFSRSKKFEADHPFVFAIKYKDSIAFIGHIANYAYV

SEQ ID NO: 2647 - DNA, 2310 bp, DROSOPHILA
tggtggccaatagcaacgccaacaacaacgtcggcggcggcggcggcggcggaaacaacagcagcggcagtggcgccggcagcaacagcaacagcggcgagaaaaaagtgaaaaagagtaagagcaaagaaggtaaatgcgttgggtttatccttcgtttgattgttcctatatataaccaaataaccatatatccgtatatccatatgcatatatatactatttatatatatatatatatactcttgtggcctgccatgttgtcggtgtgcattagatgttgtcgttgtcaattgtcgcaaacaacgaaacgctaaatttcgaaagcgtagcagagcaaattcaaaattcaatcgtggctgcgtaaatacgaaattgtattgtataatgtgtaatttgataatcctattatctgcaatccaatttttgatcaagataatccgtattaatcgtatatatattttttacctatcatttctctgtattctttcgcatatttatttgcgtatttttgcatgcgtcgttcgttcgttcaaccaaatcaataaaccaaactctactcttcattttactgtgtctgtgtgtgtgtacaatactttgtaagataaagttccattatgtaatagtatctaagatacaacactaacaatatcacacgaaacaaggagtcattttttttcgcttggttctgtctttataatatataaatagttaggaattttggcttttaggtgataaaactaaagtattaaaatacccattccgaaagtcctctatattgtttttaaagattagtgataagggcttgaaaatacaaaaaagttttgttaaactatttcatttatagttctgagtaatggattaagcgatcgatatatattaccaacgcaataagttaggcttagtattccaaattataaaggatcagtttctatacaaaattgctagcccacacatgcacatacacactaatcaactaacactggacatgtactctatgactatcgattcctgtccaactgagtttctaactatgtcattcatcttctcatccgtctcaccaactgcaggcggtgcagtgctcatcgagggcgttctcttcagggccaagtacttgggctccacgcagctggtctgcgaaggtcagcccacgaaatcaacgcgaatgatgcaggcggaggaagccgtctccaggataaaggtagagtatcctccgacatttcctatactcatgaaaacgatgcccacgtccatgttccgcctgctcactggccaggaaaatcccatatatatttaagcctgcgggagagtaataaatggcgattattgttaactataaaaaaaacacaaccttacaagggtattacgatatttagtatatatacctatacatatagagaaagaaagtggaagaaagagtaaatatatgtatgtatatgcgtgtgtacctatatatatatgctaaacatatactacacacaggtgtatcgattttttttgtgagtaatactagacaaagttcgatcggaggcaagttaagatcagctactacgacaaataagaggaagcgataactaacacacacacaaacacatagcacgcctttttgcaaagcttagtaataatagttaataatgtgtgtgagtttgggccatcggccaggacatacatatatacatacataaatatatatgaacagaatgacctttttgcgaaaacgtccttagcttagttgaaccgcgacattagtcagagagtacagcagctatagtaacagaacccccatatatgcttacccatacttattgtaaaaaaccaaaaaaaaaaaaaaagaaatccacaaaaaccatggcaactcaaacaaacccaaacaagatttgaattcagatacgagacaggcagctcttttgatattgcatatataatccacacactatatagcaccatcccgaatatatttatataaacaaacaaaaaagacagaggggggggatgtggaaaagcctaggacagatgggaaatggttagagaaatggaaatgaaaatggatattgtaactgcagcgtttcgttttctactcgcacccatagccgagaattttgatagttattaaacggatatagccagatcgtaatgtatgccatgtgtaaattaaggagcgctttacacccccacaaatacgaacatataccccccatagaggatttagtttagcaaacacttacactcacactcacttagacgcttcgatttcaaccatcttcgtccaaaaattgtgctactactcgttaaacaagttgatagatataa

SEQ ID NO: 2648 - DNA, 802 bp, DROSOPHILA
actatcgattcctgtccaactgagtttctaactatgtcattcatcttctcatccgtctcaccaactgcaggcggtgcagtgctcatcgagggcgttctcttcagggccaagtacttgggctccacgcagctggtctgcgaaggtcagcccacgaaatcaacgcgaatgatgcaggcggaggaagccgtctccaggataaaggtagagtatcctccgacatttcctgcacccgatggcgatgtgcagcccagcacagaggtggatctgtttatatcgacggagaagatcatggttctgaacacggacctcaaggagatcatgatggatcacgccctgcgcaccatctcctatatcgcggacatcggggatttggtggttctgatggctcgtcgccgcttcgttccccaggacatcgatgatgcacccaaaccgaatcgcacgcccaagatgatctgtcacgtgttcgaaagcgatgaggcgcaatttattgcccaatcgattggtcaggcctttcaggtggcctacatggagttcctcaaggcgaatggcattgaggatcatcggtttgtcaaggagatggactaccaggagcgaggtggcattgcggaaaggggtggggttcgtgtgggtcatcgcatcatcgagataaacaaccagagcgtggtggctgtgccccacgagaagatcgtaaacttgctggccacttcagtgggagagatactcatgaaaacgatgcccacgtccatgttccgcctgctcactggccaggaaaatcccatatatatttaagcctgcgggagag

SEQ ID NO: 2649 - protein, 251 aa, DROSOPHILA
MSFIFSSVSPTAGGAVLIEGVLFRAKYLGSTQLVCEGQPTKSTRMMQAEEAVSRIKVEYPPTFPAPDGDVQPSTEVDLFISTEKIMVLNTDLKEIMMDHALRTISYIADIGDLVVLMARRRFVPQDIDDAPKPNRTPKMICHVFESDEAQFIAQSIGQAFQVAYMEFLKANGIEDHRFVKEMDYQERGGIAERGGVRVGHRIIEINNQSVVAVPHEKIVNLLATSVGEILMKTMPTSMFRLLTGQENPIYI

SEQ ID NO: 2650 - DNA, 28660 bp, DROSOPHILA
ttagatattagatcgtatttagtaacttatcggctagtttgtgtgcttgtgtgcaactctctctgtgtcagacacaatcatcacaagaaggtacttatactctcattgtgcactgtttggtgcattgataaatcgaacagaatagtcttagcctataactattaggaccttagtctaggaaataaccgaaatacttggttgggctatcaactttatgcgggtctaacttagcttagggcaagcacggcttatagcaactatatgatatgatagtggatttccacacagttctcatctatcttcgagcttttaaaagaaatataagaataataggctatcgtactttatcccaatttgtgcaactcattgggggatttccttgaagagaaccgctggggtctggcatagaaattatataacactactgctgcacgcccttattttatttatttatttatttgattcgcctaaatcaattgactagaagttagcaaaaggcaagagagcaagagtgagttctgtttctgtccgttgtttgtccgtccgtagtgccgaatgttgagcaggcttcgaagtccggggatagaaagtgttgccattgcgtgcccggccgttgattccggttttgacagttgaaattaaacaatttaacaattaacgtcaacaagttggagctcgcggtgctgacgagtcacgcaggagccataggctgtgcactggaaaccccctctcaaatatgcatgtccgtaattatcgaaggagccggggctgtccggctaactacctagctctacactaaagatatggcctgggtctgctattcgcttcatttctgttcggttcggttttgtttttgctgttgtgagatttatttatttcagggttctactaaagctagttgcgtccgtcctatggggtcctttctctgtatatcctaggaggcataacttaggggctagtttaaggaagcaagttgtgatgatacgcttgatgatcgcctctagaagggcaatgtggtgacgaacatgttctcgatgagagctggcgcgggcaccaggtcctccagcttcaggtagaagatcctctgcagtccctggacactcagggacctcagctccggcagcttgcccagcaggcggctgaagtagtgctgcttcttctgggcctcggcattgtaggtgacgtggtcgcgcagactgccaatgatcttcatctggagctgctccaccttcttcggctcccgcaggccatggcgttctgtagattcaataagtcaataaaagggggatttaatttagctttagcttttgtcaattataaactattgtagttataaagttaggagcaagaacagaaactaaaatcagaaggtttaatttcagaaagcaagagtattcttgcaaataatcctatatccttatagaaggatacgttacccacctgtgatcagggttagggcacagaggcaggcgaaggcggagatgtcgatctccaggttgtgcaggctgcggctgaactccatgatgtcgttgagccactcgccgaaggagcgcaggcactgggtgcggtggagcaccgtgccgttgcagaagatcagcttggtgtcatcgatcctggcgcgataggccagccgcaggacgaacagttccagcgatgcgctctggaagagcagctcctgatcctccggcaggagatcgaagtagccgggaatcttctcggcgaactgcttgatcacgtccacggagctggtcagcagctggtaaaactgttgcaccttatctgcctcgctcatcgactgctcctcatagtggctgtagtccaggcacgagggatccggagtcgtgtcgacatggctgcgaaccagggccgtgatcaacgagatgggtggtgatggtggcgactcctggggcgatttcggttttgagggcagtctcccgcggcgacccttcaacgagtccgtgcgcaccacttccttgaccatgcctacgaccaggcacttctggaaccggcagaactggcaacggttgcggcgcctcttgtccaccgggcaattcttgtccgctaggcagacatacttggagcccttctgcacggtccgcttgaagaatcccttgcatccctcgcaggttcgcactccataatgctggcaggcggcggtgtcgccacaaacggcacacagctgcgacggagcctggagcaaacggcccgcctgcagatccgcactcgctggcgaacttgccgccgaattgggtgccgagttgagctgtagggcatgggcatgggcatgggagtgccgctggttcagtgtgatcttggccagcttggggctctgcgccgtggagccggctggcgaaacggttcgctgaaccggcagcgatgctcggcgtactggcggcggaccgcccaccgaaggggaggagactgtggccgccgccgcagcttcgacagcagcagtggccgcagccagctccgaaatcgtgggaaacgtgggcagcgagtaacgctcgccattgtgcgagttgtagttctaggggaagagaacaatttatggggagttagtcatacactgcaatgctaactttaaacttttaaggaaaccaaaagagattgttatttaaatgtttcttcccattttactatacttacatgttgctgatagctttgctgttgctgctgctgctgttgtccgtagaagttgtccgctgcggaaacaccattatattcgtagagggaactggccgaggagctgggcgacagattggcgctggcattgatggcattgaagtggccgtggtagttgtagcccccactgttgttgtggctgttgcccgcgttgttgctgctgttgttgctgctgttgggatgcgacatctgggcctgagactgcagggtgtgcagctgctggagctgggagggggcgggcggactggcactccagccgccggacagaggcgggaagcagtcctcgtccatcttgagggtcagcacctggtcagtgggcgtgggggcggcggtggaggaggaggacgcctgctgggggctgctaccgctgctgctgttgtacttcaaggagtaggtctcctggaagctgggcaagctgctgccacaggacaggggccctccaatgggcgagatcagctggagttgaagatgttgctgctgctgctggtgctgctgctgctgttgctgttgttgctgctgctgttgctgttgctgctgtgcgtgcaatgcaatagccggatcgctgctggaacgcaggctgagcaggcagagctgctgctcctgctcggaactgagctgctgctcggggatcgaggacagtcgcttgtcccgcaggcacgtcaacttggtgaggttctcaatggagctggtcagatcctcggcgggattgtccggatagccgctggtggtgggcgagagcagggagttgttggagtccgaggggaagaagagatccgagaagagttcgctgtgcgacacgacagacgagtctgtcaggttgctgatcaactgatcctcctcatgggagagcagagtctccgacttaagcaggtgttgctgggggctcacaagctgttgctggtgttgctgttgcagatgttcctgctgctgctgctgctgctgttgttgttgctgttgctgctgctgctgctgctgctggttgtgatgctgctgatggaggaggtggttatggtgttggtggtgtccagctgccgatgccgacgtcgtggtggtcgtcgaggcggtttgcgtggagaagttatcgaagggcgacaatgaactaaaggagctctgcaatgaaagacagtcgcgacacgaatgagttagtgagcttgcggttcccgtctagatatcctagccctaggggtggagtctagcttttccgacgtccgacatgcgcatttcccgcagcaactgccattggctccgtggccggcaaagcaacccctgttgcgaaaactcctcgttgatgatttcctaattggttatgcttatgccgaggtgttttcccaacataacgcacctaacaatagatggctaattgctgtttataccgatctgactgatctcctcacctcgccaaatgactttcctccagaggagtcacctcctcgcagctggcaattagcacggccattcatttatgggcccgccaaatttgcatagatttctctgtttaatttttcacaaatgatatctcagtgggggcttggtttgtcaattgcaaaaaaaaaaaaaacaaaaacaaaaactttgggcatcatactattcaacatgatactagtgccttatcccttccaaggactaatttatcaagatactttctacttacattgggttgcagaagtaacatgcttgttgtggcttggttagtaagcctcacttggctgattttggctgctgctgctgctgatgctgctcctcccgcttctgctgctgctgctgttgctgctgctgttgcggcaagtgtcgttgctgatgttgcggatgtggccgaggtgctggcagctgctgctgctcggctgtcgcagttgctgttgctgtcgctgttgctgtcagttttcccgactttcaatttgcccgcgccgagtggttttatttttctcggctcagtggctggcggtgctggtgttagtgccgctgcacctgcaaggataattcggaggaaaggtcttagccatttagaatacgcagagtcaagtgggcatgaatgccacacggagtcccgggggtgagcttaatgctaaatggctggtgaaatgccaaatctgcgctgatatgggcagattcatattgctgccgtgctaatgttgccgctgctcgttgcccaattgtctcgcgttccacacgcaagcagcgtatcgaatgtcttaattagaaatgctcggtcttgcagtcggtctttcgtctgtgagtctccgtctccgtctcaatctcagtctcaggctctggtgtccccataggtatccacacaatgtatggatatactttgaacatcccagagtcgtcgagagacacctcctcattgtgtgtggcgggattggccaagaggcatgctcaagctgcagctagcaacttacagctagcgacttgcaacaaagatgcaagcaaagacttaggaaacaaacctgagcgaggatcacatctccatcgccgcttaatgcggcacataaaatgtaataaattgtgttgtccgatgctgcacggcacggatctgcggcctgaccacgttgcgggtgttcggattttgattataataaatattttggccgcttcgcgttgcaaaatgcaagctaaagttcgcggcgcccctgccaaatcatttttcacaatttgcataatttatgctggaaatcggagaccaggttcttggcaagatgttataaatcaaaaaagatcaggcatatttgatcaaatatgatcgatcatatgatataagactacaaaatagaactattcaatataacattaattcccattaaactatgtaaagccagctagagttttaggcaactcataaactgtcaacgagttctattaaccattaattaaaccagccaaaacaatcagacaagctaaccaactgcgaaaactattattcacacatgctcatattttgccaatcaactggcgttttgtccgtatatttttcatttaatcttttccacagattttcccccaactctgctgacttctggccgcctgactctctgacactttttatctgcgagaattagttataagcggcaacaaaataacgaaaataataatcacagcccagcagattttagtttctcgtaatatttcctaacgtgtctgcctcggcttgaatttgacaaattaataaatgttgctgcggctgtcgtgtcagttgtcttggacaaagccaagagtcgagaaacaaaacataaacgtggacacagttcaaaggggcagtcataaaaaaataatggaagaggtggtcgataaggcaatacatttatatagatgtaaaaatatacatgataggtgaatgaaatacggcacaagatgtgtttgaggatggtggagcagcgtacacgggtacacgagttcaataaacgttcgctttcgggaaaactttaaaataaggtaacgtaagcagcctgcgatggcagtaggtgcaataaatcattcgagcactggaacatcttctgcaagttagaagccattttcggattctactagaatttccagtttccctccaactatgaataaaaaccaaccgaaaacaagcattcaacgcaatcaacggatcgaaatgcaagccaaacgcataacttgacttttgggtgcttaattgctgcatttggcttacaacaacaccaaaaaaaaaaaaaaaaaaaacatgaagcacacatgtttcgctgctgctgctcccaaatttgccgcattctttggctgtgagatatttacattttgcatagtacactgaattatctcattaaccaagaaagtatctcagcattgcaactagcggatgagctgaagtatctgctgggttgcaaggctgtttagggcccacaaattgcccgtgatataagtgcatcttctgctttgcatcgagcaattaactgacaatggagaaaaggtccgaaaataccgacgggtattgcataaatcaatcaaattgtctctcactcggtcgccccattgagtaatagatccaatttcgatatgaaacagaaattggggtttcttctcttctttagttttagttttagttttagtttcagttttgtgtctctatttgtgggtcttgggcttttgcacaactttaaataccaaccccattacctattacccattacccagtacccactacccattaagcaacaaagatggctagcacaacaatgaacaacaattgatgaaaatcgacaattaatagtgaaagtctaggcccagacggagcatcatcatcaaaggtactgcaggaagttagttgctcggggaccgaagacccagactgcagactggggactcctccatgtctattaggccatgagtctggctttgtcgctgtcgtggatttcaaaggcgatagcatcgaagccgccaagttgccaagttgccaagttgccaagttgccatgctgccatgttgccagttgcagtcgagaagaaaaagcgaaaaacctgccccaaaatgagtaaactcctttggcccatagaccgaaccaaaccgatccgaacccgagacccatttgtatacttctcacagatcttcacacggcgacggactgtggcacccactgactcaatgactgagtggccgggcatgggccattttgacctggccaaaaagtgaagacgagacgagccgatccgagtccggctcgcattaccatttctttgggtcactgcgcaagcatctccaccacccctatccctcccgcccccccctcccctagccagtcaatttcggcagatgcctacatgtccaggtccattgatcaggtcccccagtgtctccacctcatcctccggcttcgcctgtgcctctccatctgcctccattgtgggttcgcagttcaaagtacagagcctgggctgagagcttgccaaataatatgtattagcgatattatataaaaagaagagaaacgaacgaaaaaaaaaaattagcaatcttatgcaatggccacgtctcctcctcctcctcctcctcctgtctgcattgtaataaatttgttaacgagccggccagaaaatctgcagcgttgcgggtcctaaaacaattagaaaatcccgctcttcgtggaagatgctgccggaaagaggatggaaaaatgcatatatatactggaaatttgctacccagcccaaatctttacaaatctcctaatgttatttgctctggggccatcggcagacaatggctcaaatgggcaatcttaaatgtttatcgcgcactcttcccggtagcatttttggcagtagcccacggtagttttattcagcatcttttatttatatttctatttttattggctttgtttgcagatcgcaaagttcggccagagccgcgtcttcgatgaattgctttctaaatgacccaaggccatattcggaatgatatttcacattgatctgggaacatgggccaggccaggagttggctctccggcggaggcattgtttctgcccaagtaagctgccgctcagcaaaggtgtgtttattaataaaacaacaaagaaaaagcaacataaaaaaaaagaacgattactcccaatgtgggagatacaaaaatctgagcgtgacttttgacatgccagttaagtaaagggaatattcaattctcattcagggaaatttctgttgtaatatttcctggaatcaactgataaaacctgatcttaaaatatactgaattggctgaccatgcttcttggatgttatgttgattgagaatgtatttctaaaatagtagaattttattgaccagatgtatgtacaatttgctttctgcggagcgaagttctcaagttgttaaacatggatgtttattactggctttgtttgttaattaaaataaatacttagcgggggaatcctgagcaccaaacacacaacctaatggtagtcgtgcctgcccgccccttatattttgaatctctaacgaaatcgcccattggtaactaatattcagttaaccgtcggtcgtttaattcagatttaatggattcttcgaggcgagcataaatctcggctggcataaagccaactggctagcacctattcacctattctgcactaggggaaatagtcgcactcgcacctaataacgccgtacaattaaatgtaaaccgaaactgtgtcagccatgttcggagatgcagatgcaagatgcagatgccaatgccgatatagaactaactaactatccgtggcaaaaggtcgaaagtgttggctatcaactgtcgagatgaacagcgacaaaatcattaaaagacaataacattgtccaagaatttcaattgagtgagtcaagatcggcgacgatcggtgcacaaaaaatggttgaatggcatggaattgtcgcagtaattcgtatgaatctctttgcgccactttgaatgctaagtaaaccagcggggaccacatcgtcatcgctttttaatcgctgcaaaaatcaccgaaggccatcttggacatttcatagtcgcaatacccatcccatcccgtcccgctcgctccgattttaagccaaatcaaaccgaacccgagacgaccatccgaacggattgaagtcattttcgagcgcatctcaaccagttgtatctgtatctatatgtgtatctgtgcccgcttctacctaaatgcctatatcagtgtgttggccaatacctgtgcttgacacttgtcgccaacgtgtactgagcgaaattaataaagtacagtaaagtgcaactaaagccaaccattcatgcgatggctaaaacatattccgtgcagcccagtgtccactgtgccattatgcaaaaagcagattcgttaaatgaataaaatacaaatacaaagtgaaacaccaccgaagacgagaagtccactgcaatccgatctggttggaatgggtgtgaggcattagcatgaaattctaataaaggaattctgccgttaaggtgttagccgggatcagttgcagatggcttcgcgttgtgcaaactggtttaattgaattgttatatcaccggctgtatcatcatcatcgatgccagtctgatttcttcttattcgcagcccaaagagaagcggccagcatatgactaatgcttaacagattcatctacatatgagtatctcaaagatactcagatacgttaagatggcctgacttaatttatacgacttgtgtgtgcaggagtattggataatcccagtcaaattggtttgatttatatggttgcaatgtgagcgaaaataactctataacagtttgtctggatatgaaaagaatgatgatgttacaagtgaagtagacacaagctgatcttaacaagagtgcactaaatattatttcagtagactgaatatattacaataaatttgaatctgtttccaagaggatgaacgagtatttttgtatattctatatattttctcagaaaagacatctgcatatgttgaccaaatgctgtacaatcatgcagccgaaatttcggcatgtgattgcccatttagaagaccctcgccctcgatcgattctccactcccagtcccacttccagtcgcatttccagctccaatcccacttccaataccaacgcgaattaccccgctaaggtcttggttttccccacatttattatacagattgagccgcctaatgtgcatgttgagcggcgccccaccaaactcggctcactctggcgggtcaaaggtgcccatgatgctgcagtgcatcagtgccagtggagcggagctggtggtgcctttgccattgccttcgacttcttggctctgccaccgactgattgacatggctgagacaaagataaataagctgccagttttggaacgccgcttacataattacgggcatggaatggattttcgctaggtttctggtagagattttttctatcggttgccaggcgcatccgactcgcaaaatcgaagccaccaaagaaggtgtagctggtttcgaggtgggaagcttggccgacacaaaaaaaaaataaatacaacaaaataaacgtggctaaaacgtggtatcaaaaagaatgcgcatcagaaaagattgcaattttagatgatactgtgacaaaacttaaggtaatgtgttatttttaaaaccatttattctggattaaaatttaattgaagccaagttgtttcttcaaatgtaaaattgctcattagaagaaatcggcattttctcgctgcatggttggcttttctgaacgtttgttgtttttccctcaaactccccgaaatatcagcgagctatcaaaacacgcgacgtctggcagtagatgtatctatagctttgactatgggtctgtgcggatttccaactcctgcacctcggaatcgtattagtgttaatttccagctggcttctctaccctttttgtgcccattgttgcacgttttgggtttttcttgcattcgggtttcgctttcattcgctgagcaaacatttgggtgggtggcttgggggacgatagtggggcgctgggagcatgcgggggatcggttcccaaatcgattagcccccgccaacccccgccaaagtgtcgtaaacaaagcgggcagctccgtgtttttcccagcaggttgcagcagccacaaacaccaaaggcaaaacatgcattaaaacgccaatattgccttttgtcttgccttcgtatctgcgagatgcacacagctcaagccccccaccccccacccttcccgccatcaagaccccctttgggccgccaaaccgcgcaaagtgagcctaacccatatatttgtcgtttgggggctatggctatggccgatgctcatgaagatttgatttagtgtgagtacgggaaaattgctcgaaacgaacgtttgcatatctaaatttgagttttgtatctgccagatacaatagatttatctatttgggaacttgcctaccctcggcgcctcgccacaaagcaatccaaatggcagccggctaggaaagtagagattcttgggaaaatcttttcgaaacagcaaattgttagcccattaaggattgctaagacattatgcccaaggtactccatgtgttgcaaagacacaaggagtacgttatggttttgaacaccttaaactgcaagcccataaacttttagcatctgtgctgtaaccaaatgctggacttcctattcacctcttgcttcacattaaaaaatatgcatgtatctagaaacgcgaacatgtcgaattactcatacgcccattggccctctcatcgtcgcatcctggcttccttattagtttttaatagctcgtaagaccgtgactctttcactttcattttgcatttgccatcccattgcccatagcccatagtcaacagcccatatccattgcccatattggccatattttgataacgcccacgccagcaagggaaaatggccatttggcgcactgtgaaacacaaacacgatcgtcagacaagcaaacatcatcatcagcatgatcggccactatatgcacatccccatttcattcacagatataagcgcccatactgacatggcgctgccttttggccgggctcagactttgcctgccttttggctttctggtgtgctgtggtgtggtgtgctgtggaatttgtggcatcatcatcggcaacaacttgactctgagccgaagtcaacttgctgcagttaaagcgtgtcttcgagactgttattaaatcaataatgaagcacacgaatcgccccggagactcatcgtcatcatcatggagatcgggctacatcattagcactagatgttggtagtgtagtgttgctggtgttgctgttgccattgctggttgtcggcttctctgccacaccggctgacacacaaaaaacatcgtggagttcacggaacgcacccaaaagccaaactccgttttcctgcgatttttcgttcggttttggcattagacaagctttgttttccagcaccaaagttggtcgctggtggggttttatttttatttttttttttttttttgctttttttgggggcgcttctccccgaaagaaatcgaattcgaactattaacttattgcagtcagtgtaagtcaaagtcgagacgtttgccatatttcctcagttttccgtttctgtttctgttttggtttcagtttttggcgcattccagccacgtttgtcgctgtttcaggctcggcaaggtgtcggggttaactaaggtgtgataaatttctgccatcgataggtcgccctagtcttggcgttttgttttccgtttttcgtcataattgttttattatggtcgtgtgggtcttggctttttgtggggggccaagctcattctcgtcgcagggattagaccgaccaacaggccaacagagaagtaaaccgaggggccagcttcgtgactgcgctccctcgccataacgaagactccgctctataaggtctgctttaattttctgggcctaatctcttttatttccgagggttctcacagtccgcggagaatcgtcttctgatcccgacaatcggcattaaattcaattgaagccacttgttttggtggagcagtggagcttcgatgccatgaacttctatgcttctacactttaaattttaagtacaattaccaaaaattaagcaaatactttactgaaattttatacgattatttaatggcctgcaatcaattgactgcacaaactaaagtcttgtcaacagaacgcttttattgaagttgtccagtaaatttatggctgacttcaacatattttcgctcattcacccacgcaaagcagtagttgtgctaacaatgccggcgatttcgatttccccaagtttgttttccttttttattttggtggtaattaatagtcaaaggcagcaacagaagcgccttggccaacagacaacttcgggctctcaggttgggcataaaaatttgtccattcgctggatgcacacagttcagatgctgctgctgcatctgctgttgcagttgcagtggcaacacgcaagccaaagtttgtttgtctattacttaattgccagtccaactggggtataggtttaagggggtggctgtggcgggggctgcaataacaattagcgtggcattttaatatgcattattgctgtgaaaagatcgcaaactgatcgcaaaccccgccaatgcagaagagtcacgattttgcagcaggacgacgaggaagccatctccaaatgcgtttcgtatattttccccaaatcggttgcatttgtcgaggggaatcttaattacacaattaatttgttgaggcatgcaaataagtggcttggactttttgcaaatgggtttagtttttggttttggttactctaggagtccgcaaatgaaagtgatcttggttgcattctcatagcagatctttaaaaatgaataccttattctaggtaaaatacttaaaacatacatttaaataagttaaatctaaggtaccatttgttaattgccagaaagcgccaattcgacacctgttgcaaattaagactgcacttaacacaggcccgaatcaacactaataaattccttttgtgtttatttataacaaacatttttagatctgttaattgttcgccttgattagctatgcaatctaaataggtaagccgacaccgctataaaaagcaactacaacaccatgcggcacaagaaaataacgataatctgcccgttgacagctcactgagcagcgacacgcagaatggagctgtaagaacaaatgtatagtgttttttttttgttatgggtctcggataaaccagtcggcgatccatgggagtcgggccactacaaaagaaaacaaagtaaaaacagtggacacaagaattgattacaatttaatgctgcagccattgccaatttagccacatcaacgcttttgtgccggaatgtctctaaatcgccagtctctggcgcatccagcagccaaatgaaagcaaaagcaaaagctaacgctgagatatggccaagttaagagcacgagcagcggccaactcgagaataaatcaccgcacaagcaccagtcacagttatgggccagaataacagtaagaactgcgatgatgcggcgcatgcgcaacgctttttctgactctctaccctttcagcgggtatgtgggttaaccagagaagcagaacaaacactaaagtaatatattattatatatattcaatatattattgtaaaaattacaaatggcttggaattgagccatgaaaataaagttctgtgaattttcagttttaaaagggcattcgggctacatgattcaaatggaatcttttctttgtgttactttgtacgctctgctttttttttctttgcgagaagcggagaattctgcgtttggttctaagaccgcatcgaatcgctcggatttggtggccgggcagtggggaagtgggcggctctcgggtcataaattcagagactaactatagaagtcgatccgatgcgatacgacccgaaccggttggttcacttttactctcatcgccagcggattgccggtcgcatcttgggttctcgcaccctctggccgcctcttcggattgcgccgtaaaccaattttaatttatgctaattgctgcgagttggcaacatcaattgggcgacagcacgcgagaaacgcagtcaaatgcgatgccgaaatcatcggcatttatttgttacttttaattggaagccaaaattcgttagaccttcgcatcgttggatcgcacagtaacagatcatcgttgtaacaggcacaaaactgtggcgctttttgcacgcatttcttttgctgccgcggattggggcacaaggtcggaatcggtgtctcttgatcgatgcacaattgccggcaagtgatgggtgccgatctagcgatccatccaccgatcaccaatcaccgatcaccgatcaccgatcagcgatcatcgactatgcttattggcaactacaaaaacttgccccataattcatagcattttatttttattgtgctgagatactcttgatgccccgatgttttccctctttccgtggcgtgtcaaatgcacaacaaggttcttgtttcatccgttagatccgccatgatcataccacataccacttacatacacactgtgcggccataaatcatccggagctgtgggaatcgaaatgtatctcggaatctatatctgcatctctaccactatctgtatctgtagccgttgctatagctgtatctgcatctgtatctgtatcggtcgccgctgctctggagatggcgaaaagttcaatgttaaaggcaagagacaaacgaatttgccacagttcaaagcatcattcattatccaattgcgatcgagctggagcgtttagaccgttaacagttaactgggcaagtcaactgggtccacagagccaaggaggtcccagcaaattgaatacccaaatccgaaactgggcgcgtttcggatctgctatttgtcttagcctttgtcttgtttgctttgcatcggtttggtttggtttggttagttagcgctgcttgttaccaatttctggggtttctggggtttgcgaggttcgcgaggtttgtggttcaaggctttcgcttgacagtggctcaaaggacgtgattatttggttaaaaggggagcggtagttttattcaataaacaatcttccaaacggttcatatttacaccttactagttaacttgaaatggttaataaattaaatgtagttaataatatcattaaaaatgagttggtttttgctacgcaactctgcccgaaattattccgcatttatttggaaatatttcaattaacgcgaaatatgaaatttatatgcgaaaacggttttatcagcccgaaatacataaatgccaaatcgctaatcgattaatgtgatttgctgtacattttgagcgctgatttgtcactggttagaatttaatagtgccataacttaggcaaaacctgtagccacgaccattgcttggctaccaaatgagcgtatttagggcgagttaattaattcgattgcaaaacaaatgtgttaattgaaccaaaaatgttcccagctgttcgaagacgagcgcagtgccagaacaaagccctggggaaaaagttcagtacaagaaaagtgaaggctcttggcctcagactcgaaaagtgcatccaatgaaacggccatttggtcagtcgaagtctgagaactttcaagtcacctgcagatgcacatggataagtgcatactggctgcatcattgcgatttactcgccgtctggcactccgaaatcgagtttcgttgacggctcctaagcatctgcaaattgtaactaagctgcgcggttttattcgccgcaactagcagcggctttaattgagtatatgagaatgagaatattagattttcaaggacagagtccgctcggatctcggatcagcacagcttacggcttagttgcgcaaccacggtgaagttggcggccatccgaccagtggcgatgatggtgggcgccccatcacgtaactagaacacaatgtgggcactcgggagctcacatttgcggggattggggcgaggtggagtgattaaagactacacaaaaaggctactatatacatatatttcaattcagcttatgttcttttatattactttctttgaaatcttaaaattctattattttaatcaagtaaactccttttaccgcactgctcgaaagttcttaatgaaatttaaaatttattaagcaaactgtgtcctataattgatcaatttagctccctttaatgccgctcctgtcgaaatgcattgcaaatcaacatataaactgagtgctttttttactcggtcaagtgagtgtcccgcagtgttaatttgtgtctaaaagcaactcattaaaagcgatattatgatgaatataacgaaaattaattaaacatttttatgatgcaccaaacagttggggccataaaactgaagattcagatgtaccgattgtcggcgattcatcgggaagaacgacttaatgtattctcttagtagcgcataaattaaccgcctaatgggggagccgcagaaagtatcgcacaatatctagatcctgttcagagcaaggtgcgaatataataatgacgtctgattcacttatggatacactcagttgtataatatttaatttaaatagttgtaagggtatactttctttagaatttgaatcaataaccaacaggcttggtgaaaaacaagtgtgtaatttaatgtatctgagtcgaagagtttttccttcatcagatcacaactgcttaacgattcgaattggaatacatctctgcgactggttcgctgctaatcgattcatttatgtatatctgcatttatcacaactccccattcgttatgcctgacaaaccgaaaatcgaataaacaagaagcaaacttgaaatcataaaagagttctatggccatatataacaatctaatattataaagaacttaagaacttgttatattcccgctgcaagctgcacatcgccaagcgaaagtcgaaattaaaatcgcacaaaagggaggaatacgaattcttttcttttctttcgtattctaattttataatcgaagcagacaataatttctcaaggtcagcaaagagtttgaatcacgatttttttttttttttgctgctggctattggtcaggaaatgcgcaaagcaaatttatgaattcaagtttatgaagctgccaaaagtgggagagaaaatgcagattagattgaataaacaaaatggttggccattttggccagagagaactgatccgttattttaattgcaatgttctgaattcgagcagcgaatttatggcaagaagcggtcccaagaatgcaaaaaccggctgagtcaaaattatggaaattcaagatgtattttatagcccaaatacccgtatttcggagtgtgtgctcggtgcgagcgcgttttgcatcgaatgtttgatgtcactgccgccagttatttgacaatcttgtcacatcgatgcctctcttcttgttgccctgctgtcctgttgtggtggtgtttttattttaaccaaactccatcggcgtctgctacccagcttgtgtttgacttggtaatgagacacgctcgctgtcgccgcttcaattaagccaatcttgatgcggctgattgcgatggcatcttggctcgaagccagctagcagctagcatctagctccccagcgatttcatttgtatctttgttttatctgtgttttgtttatttatatagactgttaggctcttctaattgtcgggctaccgaaatcagccgtttaattgggcacctaacttgctggacagtctttttgtttactgttcgctcccacacgtatggtatacgtaatattacgcatacgcagagtgggacatcgagtgcatccgtctcgcttccgccttgacgtcacgagttctatttgcaacttggcaacagccgctggccacgaacagtcctgcgtggctttatcgatcgcctgtgaaccccaagccgaggattgtggcagtccaaagccaaggacgtcatcactttcaagtgcgtgtcgcacacacacacacacacacacaatgtggcgtatatatgtatgtatatgcatatatatgttcactacatctggtctggctgtgatttgtgttagctccgcgagtgtttcgggccttaattatatgcctctggcacgagcccccccaatgtctgagttgtttgcctttctgtttgtttcgcctgaagttgtataattgcatgtcttttgtgttcgattattgcttatgttgcatgtctcaggggagcagaagttggttctttgacgcacttccacctgtgattattcgttttccttcgcttaatttatgagctgttgggctaggctgagttttcatcgtttatttatggttatgggcaccagctaagaggttttccgcgaatcgcctgagattaacatatctttggtttttgaaatatttcaacatcttttcaaaattcctcacaaacgtatctatttgatttatttcaataatgttctacttttatattcccattcgcaccgtaaaaagtattaaagtataaagtttcagggacacccgagaaatgaagtgaagcccccattaaataatcagctgcctctactttcgttccgcctgaaaattcgtattctgctatttaaattccgcacacgatttccaaggtcctttggaaccgacccagccataaaaagaaacaaacccaaagttctgatggtaaaagaaggcgtgttacatcaaggacctcggcggggggtgtgtgtgtgtgttttgtgtatcctggcggtatctacaagtgtgaaatcatcgtgggggggccaaacaaaaacaaaagcagggaagagcgaacacccaacggacgaccttgggagccacgtgagagtcgtgaggcactctctgggcgaaacgagggggtgattgggttcaactttcgttggcagctgttggaaaagagagggaaagaaagtgagagagagagagagagagagagccacggagaaagagcccagccagagataccccgacctagtgacgaccccgacctagcacttttccacaatgacgtcacagcgccacaacagcgcagagagtttccagggggtgtatctgtggcctatatatatgtacaatgtgcccgtccggtggtgtattcccttccctttcccgtttgcccgtgtgatgattacgccatcaaactgacgactggaaggggctcgttggggtcttcgatttttccctgctcggtgttatttttgcacgtgagctcctcctcttcttcttcttccgcctctgcattgggccaaaaaggcggctgtttaaaaatagttatagccacaggacgttgtttttcactttcagcttataacctttaagcatgcgcttaaattccctatatagttggccaatgcagcaatattacttgttatccagctgagatgaagatggcaaaaggagcgcaacttgtgatctggttaaattggtagtaaaaggtggccaaatcaaataacttgatgtcaactgaaattacaaatatgctgacaagcacacaagtattccggttagtcgcaatctaagtggcaatcatttttatgtttggtattttggttagcctaaacacctccagtgactcttcaggccgatcggactttccgtgggccgtctgtctgccaatcaaaccgatgcggcagttgcaatctcgcttttcagtgcctaccgcatcttcaagtgcggcgtcgaacgagacaacgaaacgctggctggcaaacaagttgcgcgccaaaacatgaaataaacaagccaattgacaatgtagcagggaaaaacatggaattattggccacgctgctggagaatttgaaatgcactcatgcagatatacaaagtacggaggttggtagttgcattaaaaactgcgtgaagtggtcaacaagttatgagcaaagcggttgattaattttaaatagtaaagtggtgataaataattcgttgttttggctaattggagctttaataattgtgatatttcttcaatttaatttgattaaataaattcaaactaaaagtatcataactctgcaatgccgaaaataacgctgtagagtaacacacagagttgaacatacaaaaatcgcatcaatttgagccttacttaggcgaacaacgaaaatttgtacaccgcgtcgttgttagtagttatttcttcaattttttccattttttggccatttttattttcgattgctgggcagttggcggattttccttttggccaagaactggccaggcagacgacgaatcttctagcccggccacagagagtccgacccgactattagcaaacaatttttgtttgattacaaaaccaacgggcatacgcacaaggggaaacttgttaaatgcagcttcttttttcttaacgttttttacggcctttttcacaactcggcgaacacattcgtcaaggtggcagcgcgcaggaaagccagcagcaaataattaaaataataaaattaaccaacaaacattatagacaataaattttcttgaatttttgacgacgcactaatgcttgatgtttggtttttgtgttgttgtttttgtgatttttctttcggttttaattctcaacgtgtttttcggaattttcttgatttgattgcaatttatggctgggcctgttctcgctaaaatttgttaaacgttgtgcaaagcgttttgctgaatttaattacatcttaggtcatttgaatgggaataaaatgaagatacgtaggtgtcaggtgtccaaaagtacgttgaatgtaaaactatgtgcaaacttgcggcaataaaacaaagcatctgctcaaatatattgcaactttgcaaatatgtgctggtggtgtaaatgaaaaaatattttgaaaactatgtatcttccatacaactattttgttcgtacatatccaaatttaaatagttaatttgtcttgtaaagtatgacagattcaaggcaatcgaactgccaaaaacctcaaaattcacatcgagctcatcaagtgcatggcaaaattaagaaataaccaaaaaatgcacgaagaaaaaatagaaaaacgccacaacaagaggccaacggccaggcaatccaatcagtttcaaattaaggtttacatgtgcgagagccgccagcagcccgccagtcgaaattgaccaacaaccaacaaccaacaaccaacaaccggcaacaaagtggccaaaataaaagaaagacccgccgaggggaaaccgtccgaaaggaaaacctgtccgctgtccaatacttgatgtcggatgaactctggcgacgcctcaccgaagtattgcattcccaggccgccgatcaccagatgataatgaggatgctgctgacttggctggtggtgctagtggtgctactgactgctggtggtgatggtggtggtggtggtggtggtggtgctctgatgacatcgtcttggcagtggcttcatccgccgactgacagcacgttcttctggcatgccaccgatgggacatccaccacgcctcgtgatctgtggacattgcactcgatgggaagggaatggaagtggcatagaaatcgaaaccaaaacaaacccagccgcagaatgttggctgaaatgcagaaacacgaccgctgagtactgattgattgctgaaaatcacttcagcatccccaaatcatctcaaagttaatagagccttttgattaaatttaaattttaatgaaaatgaagctgaagaaagtttgattcaattaagctcaagttcattttaagtaatgaaccagtaagaaaatatctttcatcttttcgtttactaaaaagaattatgctatagaatatgccaaataaatatgatatcattgaaaatcaaacaaacgaattaaggagagtttgggctagactggaatgacttccgccctggctatatattacatcgaatgccccgactgaggacaactatgcggaattgaaaggcacttggaatagtttcatcgacccgggacgcgttctattcccgatcagccaaaaatacctccaatttggacatcaaactgggaggatagagcgatgctgtggctagttgggcatattggtgctggctaatggctaattacgcggcgattgtttaaatttaaaacaaggcagacgcatttagaaattattttaacaatgcacaagcagaagaattcgcgctttccgcatttattttcgttttcgaatcgccgccatcgtgtgaaccatcgaacgaatcgaatcgatcggcaattaataacgaaacgcgctcacaatcaatataataaacacaattaaaccgggcgcaccataattattacgtaattgaggtgggttgtccattatgcatctgatttgagttccccgataatccgacgaggggaactggaactaatgctggtctatggtctgtggtctctggtctctggtccatcaatgctttctggccatttggcttgttgctttgtggctttgtggatgtctcggccatcgatcagcgatgaagaccataatggcacctcccctcccccgacgcgtttcgttataaaattcgcataaatcaacgcaaataattaagcagtcgcccgagttgctaatatcgagagtttcctatccatctgcccagacgcgggtcacccgtcccatcgcaacagaaatatcagaagtaacaaaaatcccaagtcccagagcaaaacaaaacaagacaaagcaaaaatcacctcaaaaacacaaattaacaaattcacttttgtggtttttactcattcgcacagtgcgaaaatgaatagcaaaagtgcgagacgagctgattcagagatagttgagatacataggttgcagatggatttacattttaagattgcgattatgacaggcagaagtatttcaagccgaattgatgactgtttaatggagttggacaggtgatttcgatttgttaagcgggctttgggttaagtatctaatggatatcacatcattttactatttggtattgcttttgtaaactacttttattttcttgttctaagtccactattagcggaactaaatgcccatcgaatcgggcattagctcagcccaaccgaagaacaaagagctcgtggacatggaaaaatgttcagatcctaaccatgttagtgggctatccgactaacgcctttcgatccacctgtgccaccgtctgtgtatgtttgctcatgtgtttggccaaagaaaacgaaacttggaaggtgactactggtcttggcagatgaagctgctccggggaaaccggtgtgcagggtggtgtgagcggggatggtttacattttcgcagcggtgtggagtgtctctacgagtatgaggaatggccaaaagaggcaacaatcaacaatggccatcccgacagctgccgcggagataactcacaacgcacgacggatcgtgaataactacacaatgaaggggctacgatatattttgtatctaaattttttcgggtgtcatagatatgtgagtagttaggtattttgtgttttgcatcatttatcaagctcgtttcgctggggttaatcagtaagggaagccgcgatcatctcgatccctggccaagtgcatcgaacgtctatatatgtgcggctcgggcggaccttttgccgggtcgctttgggccatgttgaaatgcaattggctacgcccaagagatgttgccatgttgaacggggcgtatgagcaatcaaggcaaatcggaaagaaaagagtaaaagcaacagtgttttcacacgccccgccgtgagcatcgaacaaaaacacaactaaaaacaaaatcgaaatgtgactagtcgtaggaataagaaatacgctgacttgtgataatactgcaggcatacagccaactcatccccgaaataagacgtcatcagcacgtggccagccataaatataatgaaaataaaatcgaaccaattatgagatatatatatatatatataaatagatacacatttagggatgcagctgacgcaaagagagtgcaatcttttcacggtttcgtcatatattttcgttttcggcgcgacgatgacgttttcagcactcgtgcctcgggaaaacacccgtaatgtgaaaactgtgtgccgcctaatccgttaaactggccgatttcatggccccgctggcgtcatggcttaaatactatataccacaactagtggatgcacctcacctggtcatatgttcttcggcgatttgttttgctctggtttgtcatccgatgtcgggcacttttggcgcccatcgccattatggtactatatagccaacttataaatatagatgtttgttttgccacgtctaatagtcaactgagtctagtgcatttcgccctgcattttcacttctgcaatcgattggcaaccctcggtttagtgtttaactgcatttcaccatagaaactaattttctacttgggtagttgtttcaaaaaacctatccgaagactatcgaaaggatacctatccatatgtagcgcatgataatcattctgtaatattgacaattaaatcaatttagaatgtgcatatagtagattcctgtgaattgaaggctcacatggcccacttgcagttgaaaacgctaaccgcagagtgcttaaaagctgattgctgggaaacacttaatgggcgctaagttagccgcaaaatacagtcgcttaagaagcggctaacaagtggctaaccgactttgccgcagcgaatgaattggcaaagcctttcaagccgtttagtaagcccaataatcggatgccccaccgccgggcgccctaacaccacccaccgaaccaaccacccactcggcaatgaaatgatcgatctatctttcccatgcttgagcttcaatcggcgatgttttttttatgcggttattaataaaaatgcattggccatccctagccgtcgatagtgagtatctgtgtggaaatcggacgcactgcatctgtgtgcggtgtttattgtgcagcttgtaaatcattttgcgtcaggctgcgtccgctgccgtctgctgaaactgcggcgctttgctgacgctggtaaacatgtgtacgacaccaaaaacagcagcacatgctcaccgagagccaagacgggtctgcacacacaactaaggtcaaagtggtggtaattgatttaagcccgtctttacagttcggtatagttgcctcaattaattttatgcaaatgcactaaatttcatagcatacaatttttaatgcaaatgatagcttgaaactaattctgatgtaactatacaattaattttattaatgcactaaatttcatagcatacaatttttaatgcaaatgatagcttgaaactaattctgatgtgcttaaaaaaaaactataccgaacatttttagagctgcctttaatagtactccaaatgcttaaactttttaattgttaaatcatttttgaatcataatccaagaatttttaaagttctctgcctcattttcttgacctctactgtggttgctctcgtattttgcgaatggaagcttaatattttcaccatttttatgatgcattttgagcagttttcatgcaaatttatgtcgtcattgtgcgttgtccaacctacccccaccagccacgcccccttttttattcaagttgcatttttcagattttttcccgacctgccttctcaaacggattgagcaaacagttagcttcttggccgatttggcaatgcgcgctgcacattgcgtatacgccgcgtgtgctattagcgaattagaagaaaacaccacagcggcgtttgagtttggaaaatacaaaaaaacaaaaaacgaaaaagtcaccaacaccgataagccgaaagggaaaaccaaatacatacatgtgtttccattggcaaaaaagtggctgttgccgggtgagctggaggtggagttcgagtctgagttgcagttggagttggagttggaggaactgcagcaggccaggtgattgatatcgcaaccgtcgggaaagaggttgcggcaggggtaaatcaaaggcagagtcggcagaggcggcggcaagaggggatgttgctggtgtgtttggtgctgctgtgcgtgttgcaggtgtgatgtgtgtgactgctggtgtgtcggggcattgaggttctgtctgtagcaggagttgttgttgatctcctggaacaaactgctctcggtgtacagtgaggcctcgcacttaatggccgttgcctggtggtggctaatgctcgtgttgctgccgccctcttgcttcaccacaatcagcgaggcaagccgatcgcgcatcatagaccacgattctccgttaaagaacccaaaattaacaatgatgttgatggtgatgatgggacacaaacataaaacgcacacaggacgggacaacacagatcacacactatatggtttctaaataggcacctgtttggcgccccgagcggcgctggtgatccagcacgactgttccgagttgggctgggattttgcctcaattttcttggctgcggcaggagtggccgaagcttttgtcgcagtagctctgattgcagtagttattatcgggcttcatttttctgtccttgcccggctgttgtttttgttgtgtgtccttagacttgaacttgcctccttttttttttggcttttttcttgttgcctttccttttttccggcgtttgcgcagtggccaagtgacgatgtaagcgacgtaacgacttacgcacgctatactatatcaactggggtctctatatacatatacatatatattcggttgtggtagttgcagtagtgggaggcacaaggacgttgcttacactttacacactgatacacacacgcgcgcaatgggcaacacaaaaacaattactactgttcttcagctcacgtgctcgttaaaatgttagcaaaactttcagttcaaaaatatctgtgtcttgtctctcagaaatgaaacgaaatttgaattactatagattaatttactgcacattcgcagcggggtaagatagattaaacaaacatacgcagcgttgcccaccgaaatatatgcattgttcgcttaagaaaggtaaaggtgaagtatacgccgcgttgtcaaccgttggaagttattacgcatacgccgcgctgtcgaccggcttccgtttccgcatagaacgaatgcacgaatcgataaagaacaacaacttgttgcaattgtttaactcttgagcactcacacctatgttggctttgtgtttcgttaatactgaacgcgatgtttatatagttgtgtggattaaagtcttag

SEQ ID NO: 2651 - DNA, 3237 bp, DROSOPHILA
atgatgcgcgatcggcttgcctcgctgattgtggtgaagcaagagggcggcagcaacacgagcattagccaccaccaggcaacggccattaagtgcgaggcctcactgtacaccgagagcagtttgttccaggagatcaacaacaactcctgctacagacagaacctcaatgccccgacacaccagcagtcacacacatcacacctgcaacacgcacagcagcaccaaacacaccagcaacatcccctcttgccgccgcctctgccgactctgcctttgatttacccctgccgcaacctctttcccgacggttgcgatatcaatcacctggcctgctgcagttcctccaactccaactccaactgcaactcagactcgaactccacctccagctcacccggcaacagccacttttttgccaatggaaacacatgtgcagcggcactaacaccagcaccgccagccactgagccgagaaaaataaaaccactcggcgcgggcaaattgaaagtcgggaaaactgacagcaacagcgacagcaacagcaactgcgacagccgagcagcagcagctgccagcacctcggccacatccgcaacatcagcaacgacacttgccgcaacagcagcagcaacagcagcagcagcagaagcgggaggagcagcatcagcagcagcagcagccaaaatcagccaagtgaggcttactaaccaagccacaacaagcatgttacttctgcaacccaatagctcctttagttcattgtcgcccttcgataacttctccacgcaaaccgcctcgacgaccaccacgacgtcggcatcggcagctggacaccaccaacaccataaccacctcctccatcagcagcatcacaaccagcagcagcagcagcagcagcaacagcaacaacaacagcagcagcagcagcagcaggaacatctgcaacagcaacaccagcaacagcttgtgagcccccagcaacacctgcttaagtcggagactctgctctcccatgaggaggatcagttgatcagcaacctgacagactcgtctgtcgtgtcgcacagcgaactcttctcggatctcttcttcccctcggactccaacaactccctgctctcgcccaccaccagcggctatccggacaatcccgccgaggatctgaccagctccattgagaacctcaccaagttgacgtgcctgcgggacaagcgactgtcctcgatccccgagcagcagctcagttccgagcaggagcagcagctctgcctgctcagcctgcgttccagcagcgatccggctattgcattgcacgcacagcagcaacagcaacagcagcagcaacaacagcaacagcagcagcagcaccagcagcagcagcaacatcttcaactccagctgatctcgcccattggagggcccctgtcctgtggcagcagcttgcccagcttccaggagacctactccttgaagtacaacagcagcagcggtagcagcccccagcaggcgtcctcctcctccaccgccgcccccacgcccactgaccaggtgctgaccctcaagatggacgaggactgcttcccgcctctgtccggcggctggagtgccagtccgcccgccccctcccagctccagcagctgcacaccctgcagtctcaggcccagatgtcgcatcccaacagcagcaacaacagcagcaacaacgcgggcaacagccacaacaacagtgggggctacaactaccacggccacttcaatgccatcaatgccagcgccaatctgtcgcccagctcctcggccagttccctctacgaatataatggtgtttccgcagcggacaacttctacggacaacagcagcagcagcaacagcaaagctatcagcaacataactacaactcgcacaatggcgagcgttactcgctgcccacgtttcccacgatttcggagctggctgcggccactgctgctgtcgaagctgcggcggcggccacagtctcctccccttcggtgggcggtccgccgccagtacgccgagcatcgctgccggttcagcgaaccgtttcgccagccggctccacggcgcagagccccaagctggccaagatcacactgaaccagcggcactcccatgcccatgcccatgccctacagctcaactcggcacccaattcggcggcaagttcgccagcgagtgcggatctgcaggcgggccgtttgctccaggctccgtcgcagctgtgtgccgtttgtggcgacaccgccgcctgccagcattatggagtgcgaacctgcgagggatgcaagggattcttcaagcggaccgtgcagaagggctccaagtatgtctgcctagcggacaagaattgcccggtggacaagaggcgccgcaaccgttgccagttctgccggttccagaagtgcctggtcgtaggcatggtcaaggaagtggtgcgcacggactcgttgaagggtcgccgcgggagactgccctcaaaaccgaaatcgccccaggagtcgccaccatcaccacccatctcgttgatcacggccctggttcgcagccatgtcgacacgactccggatccctcgtgcctggactacagccactatgaggagcagtcgatgagcgaggcagataaggtgcaacagttttaccagctgctgaccagctccgtggacgtgatcaagcagttcgccgagaagattcccggctacttcgatctcctgccggaggatcaggagctgctcttccagagcgcatcgctggaactgttcgtcctgcggctggcctatcgcgccaggatcgatgacaccaagctgatcttctgcaacggcacggtgctccaccgcacccagtgcctgcgctccttcggcgagtggctcaacgacatcatggagttcagccgcagcctgcacaacctggagatcgacatctccgccttcgcctgcctctgtgccctaaccctgatcacagaacgccatggcctgcgggagccgaagaaggtggagcagctccagatgaagatcattggcagtctgcgcgaccacgtcacctacaatgccgaggcccagaagaagcagcactacttcagccgcctgctgggcaagctgccggagctgaggtccctgagtgtccagggactgcagaggatcttctacctgaagctggaggacctggtgcccgcgccagctctcatcgagaacatgttcgtcaccacattgcccttctag

SEQ ID NO: 2652 - protein, 1078 aa, DROSOPHILA
MMRDRLASLIVVKQEGGSNTSISHHQATAIKCEASLYTESSLFQEINNNSCYRQNLNAPTHQQSHTSHLQHAQQHQTHQQHPLLPPPLPTLPLIYPCRNLFPDGCDINHLACCSSSNSNSNCNSDSNSTSSSPGNSHFFANGNTCAAALTPAPPATEPRKIKPLGAGKLKVGKTDSNSDSNSNCDSRAAAAASTSATSATSATTLAATAAATAAAAEAGGAASAAAAAKISQVRLTNQATTSMLLLQPNSSFSSLSPFDNFSTQTASTTTTTSASAAGHHQHHNHLLHQQHHNQQQQQQQQQQQQQQQQQQQEHLQQQHQQQLVSPQQHLLKSETLLSHEEDQLISNLTDSSVVSHSELFSDLFFPSDSNNSLLSPTTSGYPDNPAEDLTSSIENLTKLTCLRDKRLSSIPEQQLSSEQEQQLCLLSLRSSSDPAIALHAQQQQQQQQQQQQQQQQHQQQQQHLQLQLISPIGGPLSCGSSLPSFQETYSLKYNSSSGSSPQQASSSSTAAPTPTDQVLTLKMDEDCFPPLSGGWSASPPAPSQLQQLHTLQSQAQMSHPNSSNNSSNNAGNSHNNSGGYNYHGHFNAINASANLSPSSSASSLYEYNGVSAADNFYGQQQQQQQQSYQQHNYNSHNGERYSLPTFPTISELAAATAAVEAAAAATVSSPSVGGPPPVRRASLPVQRTVSPAGSTAQSPKLAKITLNQRHSHAHAHALQLNSAPNSAASSPASADLQAGRLLQAPSQLCAVCGDTAACQHYGVRTCEGCKGFFKRTVQKGSKYVCLADKNCPVDKRRRNRCQFCRFQKCLVVGMVKEVVRTDSLKGRRGRLPSKPKSPQESPPSPPISLITALVRSHVDTTPDPSCLDYSHYEEQSMSEADKVQQFYQLLTSSVDVIKQFAEKIPGYFDLLPEDQELLFQSASLELFVLRLAYRARIDDTKLIFCNGTVLHRTQCLRSFGEWLNDIMEFSRSLHNLEIDISAFACLCALTLITERHGLREPKKVEQLQMKIIGSLRDHVTYNAEAQKKQHYFSRLLGKLPELRSLSVQGLQRIFYLKLEDLVPAPALIENMFVTTLPF

SEQ ID NO: 2653 - DNA, 7731 bp, DROSOPHILA
ttactttaaacaccgaatctcgtacagcttatatactatttacaccaataatatatcgcaggttgttgcttcatgaaaatgaagtgcaaaacacataaattcccttatatatattacacactttgtcatcctgctcgtttacccaagtttttatttatctttatataatgttataaacaataattgcaattaatttttcgaagacctgaattttacatcatcccaatgaagcgaattttgcgttaatggagcactataaaaatataattactagagataataatgatagcttctgcaaggctaaacttatatatcttagcagtatctcagcagagcgaatgtggacatttaatgactaaaaacaacgaaactatttaaattctttaattaacaattgatttctggacttttcgtccgatgactaaacttaagaaaacaaaattatgaaaactcttttaacttgaacaaaaattttatgcagtcaagaaccggtgctaagagatagtaacgtaaaaacggatgatcggacagacggtagtgctgactcggctcttgatactgaccatatatatatttacttcaaattcttaactctttcactgggtttcaaacttcttacaccaatcaaaataggttcgacacgggtaatagataaattttaataattataaaattattcttaaaacataaaatagtgcttaagcctagctaaaaaatttactaggaacttacataatggttctgctacaacaaatgtcaaataaaatctttataagacagtttcctatcaatatggtatggtttttactgtgaatattacttatagtagaaattcgcatatgttaaattcaaaaaaaaaaaaaaaaaccaaaccatttgacttatattataagattatacgggcctttggaaaaaaatcgctatcgattgatttgtaaaattatcgatgcccttaagtttctttatacatcgaaagttaaagtaaacatcgttttttgttccagctctaaacaagttttttttatagctctagctctacagtatttatataaataattcttgtatgtagtccaagtgtagaaaaaactaatttaaatgagctgttttcgagtatttctcttcagacaaaaacctgtttggaacaatttttaatcatgtgaaaatgtaattttgaaaaagatgtaccaaaaaaggaagacggtgttatgggcatatatgtatattttgtgtttttatatgtcaactatgttataccaacatatttgtaccggattgttaatcgtatcgaataagaatgtttccccgagagtaagatgtttgtgtatatatagagtttcttctgtctcctcggagagtgtgtcgtcactgtgtatgtatacagaaatgtcttttggtgtatacatacatatgtaattgtataatgctgttgggatgttttatcacttaaacatacaatttttaagaaatatattgattgttccgttataaattgaatgtcaagaactgcagatccgctatatattgttgatcttatgccatgttgattgtttatgactatgaatgttaaaaaatatattaatatttcgccaagccattaccaaccctgtttgtatagaaaatgtaccatacatgtattaaaatgtagtatcccacttaaattgataattggtttgccggcctgttaaataagtatttttgatcaatcagggtcgaatcaaatcaattaggcggtttccaaagttaaagcgaagtacttttaaaaatctcgtaatctgtcaggtggcggtagtcaacatataaatattgttgatcagcattaacagctgcttatttcgccgactgccgccgaacgcggcgcaaacaggatccctcagtcttaggctgtttgttttaaagatcaacttgtataaactttacataaaaatataaatacgcataatatgctactgttacattaaaatgttaacgcgtaatgatctcaaagcttagaatgagtagatataatatgtagttagattttgcaatgggtaaactaatttcagtcaggattgtcaacgaagtaaaggaggaaatgtcaatagaagaacacatattcttgatcagtttacacagccatgtcgatatattttttgtctttctttccgtttgccaaacgaccttcgaattgaaggttgaaatccttttattttgtagttcatatacatatacgggtcgaaaaagaatgccgttaaagtattgtttcttttttaactgcctagtaaactttttgacgagataaattgaaaagtataattccgctctaaaaaagtcgggttaaattttctaagaaccctaggtattatatcaatttcattttcagtatcaaaatttaatcttgaagaggtgaaaactaagtctacgttaaaaagaatactagacctaaatcacagatgaaaaagaaacaataatttaacggccttttcaatttaattttttcggattgttcctatatatgcatatatatttatatagtgatatatatgcacaaaagttgtattatttaactattgtcatcaaaaattaaattgcacctgactttataacgcactacatataatttactcatttataagaaatcttttaaagggtaaagtaaacaaccaaaccgcatagtagtctttagtctgttggtgcgcttcgtaactataccgtccaaagtgagaaaatcatgttacaagttacactgcagtttcagtgttttttttttatgcccagaattcgtacacggctacagcgttttgttgtaaaaattgttattttattgattgcagatggagcaagacactttggtgcggaatgacacagatgtagatgtagccagtcaacatattcttatttcggaggtttattgtatgcatttagcaagaaagctactaacgatctaacatcgaaaacattgctggcggtatgcaagaacgatcaaagcaactgcgtcttactgtttcctggacccagtcaaagtctcagattcatgacagttgtcaacgtcggagcatgttggcatgtaagaggcgcttaactaccagtaaagtgcttgaagactcacatccaccagtagctttccccaattgcaaatctcaccggcatcagcaacaaaaggagaaacataaagttcagctatactctggaaaacctttaagcattaagctgtacgtgccaggaagtattgagagtatcccaaaaattcgacataaggcgcttacgacaacgaataaacagcaaccagctatgcatcgaaagtctaagagcaaaagcaagtttcaaggttttaacaatctcaagccgctttattcaccgagtaaaagacaaccacccgagaagcattcatcagtactggtggaagcagggatagaatcaaaggcatcacggcattttgttggtaaaaagaggattaagaacagaaactgtttgttatcttcgcctcagccatcgccaatgagatgcaaaatgatgattccatttccaaagtttggtgccacatcctttgttacgttgctcactttaatttgtatggaaactgttttgctctccaccatgtctagttgcgccaagactttttacatgcattggaacacatcgaacagtatgtaagtactcaaatatagtggtatacttaagcagcggtattataattttattgaagttaaaaattgtagatttttatttttctctacaaatgtattatgttttattacaattattacagtttttaagtcagtagtatgaggattattattattcgtttaggggatttgttatttcaaataaaattttctttccaataataagactgctggccaataatatattgataaattaatccctaatgtcgcgtataaacacgctgggcttttataaactttcccagcaattagtaatgcacatgagtcattttcgatagaataactattgtcataatttgttgtgcaagtgagcagacgatgattaggcgatcccattgatccctaaggatcatgattagtaacttttttggtaatcgcatcagggcatatatggcctactcattttgtctggttttctctttctcgatataaacatatccatatcatctataccatccatattgcaatgggacattaagtttgttaggataatgttacttccaaaatcggacaacaaaccccaaaaacagaagacaaatgcacgttttcgtagccaaggcattaaacaataaagtctagatcagataaaaacaacccaattttccattttcaaaatgttaacttcagcattttcataaactgttgcttaaactattctgtgcgaactatttcagcattttccaaatctaaaattatatatgatatgtagttccttgaaccctacgcgttcagtgctcatcgttactatgtgtgatgttttgcacattaattggcccaaatttggtatttcgatttgcgcttatttattgaaaatcgttttctgactttctcaaaacaaaatgtaatttgattgcactcttatatccacagatttcggattgataacacagatcatattatcgatgttaataaaggcaatcttgcatttgagttcgatcaggttcatataatatgcccagtatatgagccagggacttttgagaacgaaactgaaaaatacataatttacaatgtgtctaaagtggagtatgaaacttgtcgcataacaaatgcagatccgcgagtaatagctatatgtgataaacctcagaaattaatgttttttacaataactttccggccatttacaccgcagccaggtggcttggagttcctacctggaaatgattattactttatttgtgagttcgtttgcattccttctatttaaaaaataatatttttaatatttatttagcaacttcatctaaggatgatttatatcgaagaattggaggtcgatgctctacaaataacatgaaagtcgtctttaaagtgtgttgtgccccagaggacaacaacaaaaccacggcgctaagcaattctaaatctgttacagacaccggaggagccattaatgtcaatatagcgaataatgatgaaagtcatgtgaatagccacggcaataacatagctattggaaccaacattggtataaatggaggccaaattatagggggaccgcagtcggcaggaattccaattaatccactaagcgggaataacaatataaatggcataccaactactattaattcaaacattgatcagtttaatcggattccaatccagccaaacataatcggtaatcatgtagggactaatgccgtaggaaccggaattgttggtggtggaggaataatattaactcctggccatgctcatggcaacattaatatgctgcaaccagggcgaggtggaataaacggagcatatcccggacatcaccacatccaaactgggatacggataaacaatgtgcctacgcaacacaactatccgtcccataagggtaatgctaacagtaatattaacggaaacggtacgtaatggccccatccaaatccacaaaaggagcgaacttttgaagcttacaggcaaaaatgtactccttgcgtacgctctattcaaactgtttttattttgaggcaatcggttacttatttgctaaattacatttcctacttagaaccaatattttcacgattccagtgctttttaaaacaaaaattttagctgaaaaactgtcttttaattctaaagaaagttacaaacgagattttaatgttttttgtttcctatgtctgcctttaatcgaatctgcatgccaatttccaactttctagcttttatagttcctgagattcgactttcatacggacacacaggcagacgaaatgactttagtaatacaaatgatttattttgttatttataatatcagaaaaggtatatagataaagaaacacatagagcacatgaaaaactgaaaaaactgaacactttacataaaatagcccgattcaaagtatttttatttaaattttttcaagtgtatacactataaattgttcataacgatctaaatctgaatctgaaagtcataacattcgactaaattgctgtactgtgtttgcgatataaaatatacttcatattgtttatatttttaatatttataataaatattttcagatgaccaccatcattacaacaaacatcccaacgaggttgtaaaaaatgaagagctgacctataatagtggtgctgcgacatcggatggtaacatcttcgctttatggatctggattttatcaattttcccactgctatctattcaatcttgccatttgtcttcatattggataagcgcatcatttttagtcagcactattgcaattcttggcattcactatcttattcaaatcactttgcaaaccacggtgcagcgatatagtcctggaatggttgaaatcaccgcgacctctatgaacgggatgtttgaccagaatgctggcactattgaatatgaccggtgaatttttgatgaacattcgattttgtgttccaatgttcaacgttattttaaagaataacaatatcacataaaaatatttgtcactcttctccggctattgctatataaacagtgataaaagtattaggtgtgagaggttggaatcaaatgatattaatttggatatgtaattgcaattgaacgagttactgtgactcgcaatttaaaatgatagatcagaaagaaaggagaaaggtgaaatagaattaataagtaaagaaattatatatatcaagtacattaaaacttagatttagtggtctagatctaactaatatcgtttaagaaaagtcaaaggatagaggaatgctatttcaaaacagattaatgcgaaaggccacttgacactgcctagccactgtgtcttctgtcctctcttttattgtgtccttctggttttccgaaaatgcttttatagcggtatgcgtgaaacagaaatataaaatattcccatttataaccaaaaatggtaaagcgatgtagcaaatacaaaatcattacagctatatttttacctgacttcgcgtctattagctaaaatgatcattccgacattcttttttcttaccgacatactaaaggaaatgtcaaagagtatagttaaaatatacttcaaaagaatcatagggctttggaatggattaatttaattacaatttcccattacaaatcccattactgtttcaaaactagttatcctgtacgaaggatatttcgactgaaattaattagcatcgctgactaaaaaacacgtagtaaataaaacattagtaatttaaagacatattgcatgcggattgccacgcattagtattgtaattgtataagatcaaatgaaacttatgtatgtgtttagtatgcattcgtgtatatttcaaattatggtaggtattttgaatatggtaaaggtgaaatttaaagaactcaactataagttttatgttctttttgttttgttttattttgtgttttccttacaataatacaattttattttgtaaatgaaccaagcagtatagagaagtgattcttaaccttaaataaaatatatatgtaaatacatatagcattcacatacttatatacaagaaatgtttaggtgaaacgttataaactttgtaaatttaaataactaaaaattaaaatatatcgaaaaataagaattattaaaat

SEQ ID NO: 2654 - DNA, 2367 bp, DROSOPHILA
ccagctctaaacaagttttttttatagctctagctctacagtatttatataaataattcttatggagcaagacactttggtgcggaatgacacagatgtagatgtagccagtcaacatattcttatttcggaggtttattgtatgcatttagcaagaaagctactaacgatctaacatcgaaaacattgctggcggtatgcaagaacgatcaaagcaactgcgtcttactgtttcctggacccagtcaaagtctcagattcatgacagttgtcaacgtcggagcatgttggcatgtaagaggcgcttaactaccagtaaagtgcttgaagactcacatccaccagtagctttccccaattgcaaatctcaccggcatcagcaacaaaaggagaaacataaagttcagctatactctggaaaacctttaagcattaagctgtacgtgccaggaagtattgagagtatcccaaaaattcgacataaggcgcttacgacaacgaataaacagcaaccagctatgcatcgaaagtctaagagcaaaagcaagtttcaaggttttaacaatctcaagccgctttattcaccgagtaaaagacaaccacccgagaagcattcatcagtactggtggaagcagggatagaatcaaaggcatcacggcattttgttggtaaaaagaggattaagaacagaaactgtttgttatcttcgcctcagccatcgccaatgagatgcaaaatgatgattccatttccaaagtttggtgccacatcctttgttacgttgctcactttaatttgtatggaaactgttttgctctccaccatgtctagttgcgccaagactttttacatgcattggaacacatcgaacagtatatttcggattgataacacagatcatattatcgatgttaataaaggcaatcttgcatttgagttcgatcaggttcatataatatgcccagtatatgagccagggacttttgagaacgaaactgaaaaatacataatttacaatgtgtctaaagtggagtatgaaacttgtcgcataacaaatgcagatccgcgagtaatagctatatgtgataaacctcagaaattaatgttttttacaataactttccggccatttacaccgcagccaggtggcttggagttcctacctggaaatgattattactttatttcaacttcatctaaggatgatttatatcgaagaattggaggtcgatgctctacaaataacatgaaagtcgtctttaaagtgtgttgtgccccagaggacaacaacaaaaccacggcgctaagcaattctaaatctgttacagacaccggaggagccattaatgtcaatatagcgaataatgatgaaagtcatgtgaatagccacggcaataacatagctattggaaccaacattggtataaatggaggccaaattatagggggaccgcagtcggcaggaattccaattaatccactaagcgggaataacaatataaatggcataccaactactattaattcaaacattgatcagtttaatcggattccaatccagccaaacataatcggtaatcatgtagggactaatgccgtaggaaccggaattgttggtggtggaggaataatattaactcctggccatgctcatggcaacattaatatgctgcaaccagggcgaggtggaataaacggagcatatcccggacatcaccacatccaaactgggatacggataaacaatgtgcctacgcaacacaactatccgtcccataagggtaatgctaacagtaatattaacggaaacgatgaccaccatcattacaacaaacatcccaacgaggttgtaaaaaatgaagagctgacctataatagtggtgctgcgacatcggatggtaacatcttcgctttatggatctggattttatcaattttcccactgctatctattcaatcttgccatttgtcttcatattggataagcgcatcatttttagtcagcactattgcaattcttggcattcactatcttattcaaatcactttgcaaaccacggtgcagcgatatagtcctggaatggttgaaatcaccgcgacctctatgaacgggatgtttgaccagaatgctggcactattgaatatgaccggtgaatttttgatgaacattcgattttgtgttccaatgttcaacgttattttaaagaataacaatatcacataaaaatatttgtcactcttctccggctattgctatataaacagtgataaaagtattaggtgtgagaggttggaatcaaatgatattaatttggatatgtaattgcaattgaacgagttactgtgactcgcaatttaaaatgat

SEQ ID NO: 2655 - protein, 652 aa, DROSOPHILA
MQERSKQLRLTVSWTQSKSQIHDSCQRRSMLACKRRLTTSKVLEDSHPPVAFPNCKSHRHQQQKEKHKVQLYSGKPLSIKLYVPGSIESIPKIRHKALTTTNKQQPAMHRKSKSKSKFQGFNNLKPLYSPSKRQPPEKHSSVLVEAGIESKASRHFVGKKRIKNRNCLLSSPQPSPMRCKMMIPFPKFGATSFVTLLTLICMETVLLSTMSSCAKTFYMHWNTSNSIFRIDNTDHIIDVNKGNLAFEFDQVHIICPVYEPGTFENETEKYIIYNVSKVEYETCRITNADPRVIAICDKPQKLMFFTITFRPFTPQPGGLEFLPGNDYYFISTSSKDDLYRRIGGRCSTNNMKVVFKVCCAPEDNNKTTALSNSKSVTDTGGAINVNIANNDESHVNSHGNNIAIGTNIGINGGQIIGGPQSAGIPINPLSGNNNINGIPTTINSNIDQFNRIPIQPNIIGNHVGTNAVGTGIVGGGGIILTPGHAHGNINMLQPGRGGINGAYPGHHHIQTGIRINNVPTQHNYPSHKGNANSNINGNDDHHHYNKHPNEVVKNEELTYNSGAATSDGNIFALWIWILSIFPLLSIQSCHLSSYWISASFLVSTIAILGIHYLIQITLQTTVQRYSPGMVEITATSMNGMFDQNAGTIEYDR

SEQ ID NO: 2656 - DNA, 4405 bp, DROSOPHILA
cgtcactttgccgtctatacctggcgtccagctgagcaggactaccagctcctcgtggagttggaaacacctaaggcagtggctctggattgcctggccttcgctgggcgtggctacgtagcagtgagctacaatctaacagagcccgtaagccaggcccgtgaaggatcacccatctatgagatttccccggaaacggggatacggacagtgcaatacttttcgggaacacatctgcgtggaatgtaccttcggatcagcagccaggaacttactctactgcatgccttcgaatcgaatgcgcagtgtccctacttcaagtggatgggcaagagtttccagagactgggcgcgattcactgcagcaaagctcgaagaatggaggccttcggcattgactacaccgactatgtggccgtagccaactacgcagatgcggagggacgaactgccacccactcagagatctttcgatgggatgccaagtcccagagattccaactcttccagcgactgcgcagcaatggagccgtggacgtaaagtacttcagtctcccagtaaacgaggtcagccgcaggcactttctcatcctgggcaacacaattggcggaactggcgccgaggtgggcgatgcggacaccgtgatctatgtcttcgaaaaggggcagtttgtgccgtatcagcgattgagtttctatgccttggaaagggttttgccagttcaggtaatttcggatcaaacttttcatggcattcataaaatgtggaatcctttagcactcaatatcggagaagtttctactcctggttgcttgtaataaacaggatgtcaagatctataaccttaacgactggcgattcgaggaatccaaggtgcagttcaccgagggagctttaagtcgtggtgtggcacgtatgcgaagctatgaggagggagatcaaagctatttgggtaagtatctttgggtttttatacatcgtatgctgaaatttgcctatatccagtgattgcgaatgagaatatggctgccaacgagacaaacatctttcagccactctacaaacaagatgagcatgccaacatacttcgccagcaaatcattgactgggctcgggagcaaagaaagcgattggagcaaatgaatttagatcatctattaataagattgaaagtaagttttgtgttctaaaagattcaagtaagtaaagaattcatatgtaatatgtaggacaagttaaagcaccgtgaggagaaactgaaagtgtcgattatcaagcaagtgaacgccaaatcggtaagaagtagcaggaaagtcaaaatattttgataaaaacctcatattttcagttcgaggataagcacatgaaactcacacctaattactggaaggctttgaagctaaccaagcaggccttggataaaatcgaacaaaaaacaaccctcgcaggttccagacatcccaataagagatccgttgatcaaccaaatgaagaacccaatttcgatgaggtcacggtggacacgctggtggtgcacggcgcagttaaagcagaccatatcaatggagttgatacgaggaaccctgtttatgattccgtcactgccaataaggtttatgttagcgcaaaatacaccgaacccgccggaaaagaaagaaaacttctgctggatgagctaatagtaaaggatctgcagcttgatgggcgactaaatgggctcaagtgggcagacctgtttgatctgactttaaaacgcagcaacaaagatgtgcagtttataaaggcagctgctgacttcgatcatctggaatccgacgctgcccaagtcaacaacaacgaggttaacgatagaccgttgggtctgctaatcccagtggatggtggagactttattgtccaacaagatgttcagttttcccaaccaattcaggtgaatcggctgctcatcaatcagcggctaaatcatatccacgtcgatcgtcagcgcttcgatgtcctgaccaagcaggcaaatcacacacaggtcatcgagggttccatgcgattcgagaatgttcgagtcatggaaccgattaccattgcggtgggtagccacagatatattattctaggacatattataaacttatttttcttcagggtcaaattatgggggccgaactgagagcgatgtcaccggcaaaggttacccacaagtcgcttcaacttaatggggatttcgtagttgacggcgatgtgaccattggacggctgctgcaaatgaaagattttgtggacgaatctactcagaaatctgcagcagaagcattgactcggggcctgcgattggatcaacctttggaggatgtgaatctcaactttgtggaaccacttattgccaacaataccgagctaagctttatcaacacgcaagatctacaaaacctggttaagctgaacgtgggtgaagtgcagttggtgcaggcaagtaaaatatttcctcaaaatgtagagatacgcgatggattcggtgagatcaagtggctaaatgggattgatacggaaagactcccggaaattatgctcaccaagagtggcaaccaaactatttcgagttcaattcaattacaaggcgtagaactgaaccatgtcaattcatcacagatcttattgaatgatttgggagttgaggattatcttcaaacaggtcaggatcaaaagtcaaatggaacactgtatatagacaacatggatgtgagggaaatgagcgtgaatgatctgcacctaaatggccatctctttggccaaacaatgtcctccatctacgaacatggaagcaagtccctggacagctggcatctgccacccgacttcaatggcaccattcacgcccagaatctgtggcttagtggccatattaacaaagtgaaggtggtccaattggagcagcagctgcagcaactggcgggcaatgtcaaatacgttggcgactttacgtttgagcatgatgtaaacatcagttccctcagctttgaaaactctctaaatggaattgaggccaataaatttggtagctgttggttggagaccgacagggaccagactttcacagccccgcagaagctggcttccctggacagccagcaaggtctctggctaagagggcaactgaacaaccacaccttgcaagatctggagaaccgtagctacaggctcaactcaccggagcacctgcaatcagtgcgatttggtgggttttataagaacggctacacgttatcaattataacaacattacctttcagcgaatcccattgtgttgcaatcggagctacagttggatcgcttaaatggactccgcgtcccagaggacgttatttaccataatggtggagcttacatctctgctcccgttagcgtagatggtgacctggaggctttaaaattgtccaacataaccaacctgaatggttatcctctggaggcgttggagatctatttaagtgggcaaaatgtgcgcacctttgtggcggagaatgttaagtttggcggagaaccctcttatcagctcctgaatggccacaatctaggaaaccttcttgatcaggtgtggctggacaacgagcagattgagttgagagaaataaaactggaatctgggcaattcgaaggcctgctggaattccaggtgagtgggtattgcacagtagaaacctatgttgtttacaagaacacctttccccatagggacccatcaacgggcaccaagtggatcatataactcacaactacttcagccggacgcgtagcaatctgctgaaaactcccctgagcttccagcatgacgtcacgttcgcacagcctccagttgccaaatacgtaaaactacgacgtggcagcagcggcgttttaatggagggcaccagtaggtaagtgaaattgaccaaatgatcaaggggcagggggcaatgaacaggggtaaagttggtatcacgtttcactttcgcaattgtttacgcgctaacagttttagagtcactgcatccgcagaagtcagctgtgcattccgtttggcaggtgaaatttctgtacacgtttgtacgtagcgcggggcgggggttgcacttaattcgaacactcgcaggtgtgcttaattaccttgtcaattggtcgctgattgggtttggttaaatgcactttttacggtcgggcagtttcggcagagcagaggtttgtgatttgaaacaacaaaaacgtcttcgctagaatcccaaacgcctggcagctggggatggcagaagcatcggtatatcgatgttttcacaactattatcgatctctacaataatcgttgaatttaaatataaatcgaatttatagaacttgggattaaaagattaattataaatcattttcggatcataa

SEQ ID NO: 2657 - DNA, 2239 bp, DROSOPHILA
atccagtgattgcgaatgagaatatggctgccaacgagacaaacatctttcagccactctacaaacaagatgagcatgccaacatacttcgccagcaaatcattgactgggctcgggagcaaagaaagcgattggagcaaatgaatttagatcatctattaataagattgaaagacaagttaaagcaccgtgaggagaaactgaaagtgtcgattatcaagcaagtgaacgccaaatcgttcgaggataagcacatgaaactcacacctaattactggaaggctttgaagctaaccaagcaggccttggataaaatcgaacaaaaaacaaccctcgcaggttccagacatcccaataagagatccgttgatcaaccaaatgaagaacccaatttcgatgaggtcacggtggacacgctggtggtgcacggcgcagttaaagcagaccatatcaatggagttgatacgaggaaccctgtttatgattccgtcactgccaataaggtttatgttagcgcaaaatacaccgaacccgccggaaaagaaagaaaacttctgctggatgagctaatagtaaaggatctgcagcttgatgggcgactaaatgggctcaagtgggcagacctgtttgatctgactttaaaacgcagcaacaaagatgtgcagtttataaaggcagctgctgacttcgatcatctggaatccgacgctgcccaagtcaacaacaacgaggttaacgatagaccgttgggtctgctaatcccagtggatggtggagactttattgtccaacaagatgttcagttttcccaaccaattcaggtgaatcggctgctcatcaatcagcggctaaatcatatccacgtcgatcgtcagcgcttcgatgtcctgaccaagcaggcaaatcacacacaggtcatcgagggttccatgcgattcgagaatgttcgagtcatggaaccgattaccattgcgggtcaaattatgggggccgaactgagagcgatgtcaccggcaaaggttacccacaagtcgcttcaacttaatggggatttcgtagttgacggcgatgtgaccattggacggctgctgcaaatgaaagattttgtggacgaatctactcagaaatctgcagcagaagcattgactcggggcctgcgattggatcaacctttggaggatgtgaatctcaactttgtggaaccacttattgccaacaataccgagctaagctttatcaacacgcaagatctacaaaacctggttaagctgaacgtgggtgaagtgcagttggtgcaggcaagtaaaatatttcctcaaaatgtagagatacgcgatggattcggtgagatcaagtggctaaatgggattgatacggaaagactcccggaaattatgctcaccaagagtggcaaccaaactatttcgagttcaattcaattacaaggcgtagaactgaaccatgtcaattcatcacagatcttattgaatgatttgggagttgaggattatcttcaaacaggtcaggatcaaaagtcaaatggaacactgtatatagacaacatggatgtgagggaaatgagcgtgaatgatctgcacctaaatggccatctctttggccaaacaatgtcctccatctacgaacatggaagcaagtccctggacagctggcatctgccacccgacttcaatggcaccattcacgcccagaatctgtggcttagtggccatattaacaaagtgaaggtggtccaattggagcagcagctgcagcaactggcgggcaatgtcaaatacgttggcgactttacgtttgagcatgatgtaaacatcagttccctcagctttgaaaactctctaaatggaattgaggccaataaatttggtagctgttggttggagaccgacagggaccagactttcacagccccgcagaagctggcttccctggacagccagcaaggtctctggctaagagggcaactgaacaaccacaccttgcaagatctggagaaccgtagctacaggctcaactcaccggagcacctgcaatcagtgcgatttggtgggttttataagaacggctacacgttatcaattataacaacattacctttcagcgaatcccattgtgttgcaatcggagctacagttggatcgcttaaatggactccgcgtcccagaggacgttatttaccataatggtggagcttacatctctgctcccgttagcgtagatg

SEQ ID NO: 2658 - protein, 725 aa, DROSOPHILA
MAANETNIFQPLYKQDEHANILRQQIIDWAREQRKRLEQMNLDHLLIRLKDKLKHREEKLKVSIIKQVNAKSFEDKHMKLTPNYWKALKLTKQALDKIEQKTTLAGSRHPNKRSVDQPNEEPNFDEVTVDTLVVHGAVKADHINGVDTRNPVYDSVTANKVYVSAKYTEPAGKERKLLLDELIVKDLQLDGRLNGLKWADLFDLTLKRSNKDVQFIKAAADFDHLESDAAQVNNNEVNDRPLGLLIPVDGGDFIVQQDVQFSQPIQVNRLLINQRLNHIHVDRQRFDVLTKQANHTQVIEGSMRFENVRVMEPITIAGQIMGAELRAMSPAKVTHKSLQLNGDFVVDGDVTIGRLLQMKDFVDESTQKSAAEALTRGLRLDQPLEDVNLNFVEPLIANNTELSFINTQDLQNLVKLNVGEVQLVQASKIFPQNVEIRDGFGEIKWLNGIDTERLPEIMLTKSGNQTISSSIQLQGVELNHVNSSQILLNDLGVEDYLQTGQDQKSNGTLYIDNMDVREMSVNDLHLNGHLFGQTMSSIYEHGSKSLDSWHLPPDFNGTIHAQNLWLSGHINKVKVVQLEQQLQQLAGNVKYVGDFTFEHDVNISSLSFENSLNGIEANKFGSCWLETDRDQTFTAPQKLASLDSQQGLWLRGQLNNHTLQDLENRSYRLNSPEHLQSVRFGGFYKNGYTLSIITTLPFSESHCVAIGATVGSLKWTPRPRGRYLP

SEQ ID NO: 2659 - DNA, 4616 bp, DROSOPHILA
ttcgaattggaaattggttttccagcgaccttaaattgcaagtaaattaataaagttgcatagactttcgaattccaacatggcgaccggctgcatgtgtgtgcgcgttcgattttgcctggattgtacccgtttctccttcccgttctcaagccgtttattcccgagtagtttctattggaattcgcaggcaaaaaaaaaatatccgcggcatgatgacacatggttagcagattattttcctgccctgcatctctgacgaagtatttttgcatattctttcccccttcattcccattgcttcttccaatttgcacttcgatgcaaatacaaagatttaaaaataacatgcaggaaaatcggcaagtgaaactgtcactggggtagaaaataaatcacaacgccctgcagttctcgccgtctctttcccttccttctctgcatgaccagcaagtgcactgcgcccgttcgccgtccctttctctcccgctctctccatctccctctacagtttttcaccctttggaatcgcggaattttcgccgcacgaccgccaccgaatgccgatgcttttggccatttccctttgaattttcttccaccgtgctgcgaaagctgccaaatttcggcatttcgacatttggctttaattgaaatccgtttgggtgtgcgattttcattggttttcccactaaaaacgccggccggcacattttcgccatgcactgccgcacttcccggctttccgacgagggtttctcttcggcttaatcctctccagccgaggagagtgcattttcccagtacgcacacttcggctccattcgtttctgtctggggctcgttattgatttttcgcccggtgcacttcggcagaggatatacacggcagtctttaaccaacagacacttggcccggtcgtggtccggctgcagagtacggaagatccgcatagagtttaaaaactgccatttttatgacaacgatttccttctaattctaggatatagcgtcgcgtgggtttgtgatcagtttctaagtgcgcagcgttgccgagtaataagaaactctagaaagtctcgtgaaaacaggtgagtttttctgcttgtaaattcttgctgcatacatttgtgggcaaaaatattatgggaatatgggtgtatttctcaatcgtacacattagtgtccataagagtccgtaaaaacatacatgtgtatttatatttttcctattattcagtataaggcttaatttgaactaattggtaaacttttcgcgtgattttcgtgtttactcttgaattgtttaaaattcgtattttcgaaatataaaagttcaatggttttccctggtgtacgtttgtgcctgtccgtatgaagtgtgcttttggtgtctacaccacgatgacacgacccacagcatacagacgtcactcgtctgcaccacccattaagttcagacccacattggcatgctacctccccgagtacggaaaccacccactttgctcatccgaatacctgcatcccttctgtctcccagcagctctaaaaaatagcttaatctgcaaggatgggcaaggagaagatccatattaacattgtggtcattggccatgtggactccggcaagtcgacgaccaccggccacttgatctacaaatgcggcggcatcgacaagcgtacgattgagaagttcgagaaggaggcccaggaaatgggaaaaggctcctttaagtacgcctgggtactggacaagctgaaggcagagcgggagcggggcatcaccatcgacattgccctatggaagttcgagacgtccaagtactatgtgaccatcatcgatgcccctggtcacagggatttcatcaagaacatgattaccggtacctctcaggccgattgtgcggtgctgatcgtcgccgccggaactggagagttcgaggccgggatctcgaagaacggccagacccgcgagcacgcccttctggcattcacgctgggcgtgaagcagcttattgtgggcgtcaacaagatggactccactgagccgccgtacagcgaggcccgctacgaggagatcaagaaggaggtgtcctcgtacatcaagaagatcggctacaatccggcctcggtggccttcgtgcccatctccggatggcacggcgacaatatgctggagccgtccgagaagatgccctggttcaagggatggtccgtggagcgcaaggaaggcaaggcagagggcaagtgcttgatcgacgcgctggacgcgatccttccaccccagcgtcccaccgacaagccgctgcgcctgccgctccaggacgtctacaagatcggaggcatcggaaccgtaccagtaggtcgtgtggagactggtctcctcaagccaggtaaggctccgggttgatgaggtcgggtgtgggccctcttttctctttgggcacttcatacatgtattctgcaaaatttgggtcgacagtgggctggcatccaacagccaccgcctccaaagcggagcccgcaacgaagtcttgcgcatgtatgcattattgagcgaacgtcttcgtcgagagcgagaccctccacctcatgcacttggtgaaattctcactccgaagagcttccattttcaacatgaaagtgaaaggccattaaaataaaataaccctagctaacatattaatatatgtagagctattgattcaaataaaaataaattggagttagttcgaataatatcgctccacgtttctctctctgtatgcacccacccccatccaaatgtctacacataacgtccggatatgtaacttcgtttcggtcgcttcgtttccggtttcgtttcaggcatggtcgtcaactttgcgccggtcaacctggtcaccgaagtaaagtctgtggagatgcaccacgaggctctcaccgaagccatgcccggcgacaacgttggcttcaacgtgaagaacgtgtccgtgaaggagctccgtcgtggctatgtggccggcgattccaagaacaatcctcctaggggagcagccgactttaccgctcaggtagggtaacaaagatgagaaatctttgatagttgaactcatctttgtttggtttttttttttctttttgcccacaggtgattgtgctcaaccatccgggccagatcgccaatgggtacactcccgtcttggattgccacacggcgcacattgcctgcaagttttccgagatcaaggagaagtgcgaccgccgtacgggcaagaccaccgagacggagccgaaggctatcaagtccggggatgcggccatcattgtgctggtgcccagcaagccgttgtgcgtagagagcttccaggagttcccaccgctgggacggttcgctgtgcgcgacatgaggcagaccgtggccgtgggcgtcatcaagtcggtgaactttaaagagacgacctcgggcaaggtgacaaaagccgctgagaaggcacagaagaagaaataactagggtgccagcagaacaacgtcatcactcgaacccaacaacaacaaaaacagacggctagagcaacagcagcaacaacacacaacaacaatacacatgtcaaaattataatacccactcgacgatcaaaatcacaccttgactccatggcaagagagacaccaattactactattactagctgctgggagaagcggcagatattaaccgaaatcgagcagattataccctatataataaccacacgtacgattagcgaggagaggagcatcaggtgcagcgaggatgcgaaggaggagcccttccagctcgccgggtcggttttggtcgccttcgccgtggtggtctactgcagctatctgaacatgtatcgtcaccgcaagtcctttcgtaggaaaccacccgctagccactccgcagagtggataggggcctccggagcactgctgtagcccgccccttcgatatatactcatctctacaactaaccttacacttgattagcagccacacatccggtcgcatccacctgtttcgaatggattttaaacactttttatacttttgataagtcaagtcggaggcattcgatttaaaatctattgaaatatgtaatttccgaatttagttttaaaccacgtccgcgctcccaaaaatcccccgaaccgaaaagactacattcgcgatgaattcaaaatttctcttgaaaccaaaagacaaatgcttaagaagtattacaaaaaagaaatcaacattacacacataatcatgcggtttttgaaaacattataaatgtttaatcgagcctcatttgcatttgcatattacataatatacgttagccacatgtcatctcattgcccataataacctgcatcctgcatattatacacgttaatctcacactctgaatttatacaaatcgaagacaattgtaaccgacaccagaacaattcttggatacagaacatgttgcttgataaaagatcttttaaatgatgagaaaaataaaggaagcttaaccgtaaaataccacacacgaacgccttttaattgaaaaatacttgaatatctatgaagaaaatgaaatcagtttaaaatgaaattcaaattaaggc

SEQ ID NO: 2660 - DNA, 1627 bp, DROSOPHILA
ctaggatatagcgtcgcgtgggtttgtgatcagtttctaagtgcgcagcgttgccgagtaataagaaactctagaaagtctcgtgaaaacagctctaaaaaatagcttaatctgcaaggatgggcaaggagaagatccatattaacattgtggtcattggccatgtggactccggcaagtcgacgaccaccggccacttgatctacaaatgcggcggcatcgacaagcgtacgattgagaagttcgagaaggaggcccaggaaatgggaaaaggctcctttaagtacgcctgggtactggacaagctgaaggcagagcgggagcggggcatcaccatcgacattgccctatggaagttcgagacgtccaagtactatgtgaccatcatcgatgcccctggtcacagggatttcatcaagaacatgattaccggtacctctcaggccgattgtgcggtgctgatcgtcgccgccggaactggagagttcgaggccgggatctcgaagaacggccagacccgcgagcacgcccttctggcattcacgctgggcgtgaagcagcttattgtgggcgtcaacaagatggactccactgagccgccgtacagcgaggcccgctacgaggagatcaagaaggaggtgtcctcgtacatcaagaagatcggctacaatccggcctcggtggccttcgtgcccatctccggatggcacggcgacaatatgctggagccgtccgagaagatgccctggttcaagggatggtccgtggagcgcaaggaaggcaaggcagagggcaagtgcttgatcgacgcgctggacgcgatccttccaccccagcgtcccaccgacaagccgctgcgcctgccgctccaggacgtctacaagatcggaggcatcggaaccgtaccagtaggtcgtgtggagactggtctcctcaagccaggcatggtcgtcaactttgcgccggtcaacctggtcaccgaagtaaagtctgtggagatgcaccacgaggctctcaccgaagccatgcccggcgacaacgttggcttcaacgtgaagaacgtgtccgtgaaggagctccgtcgtggctatgtggccggcgattccaagaacaatcctcctaggggagcagccgactttaccgctcaggtgattgtgctcaaccatccgggccagatcgccaatgggtacactcccgtcttggattgccacacggcgcacattgcctgcaagttttccgagatcaaggagaagtgcgaccgccgtacgggcaagaccaccgagacggagccgaaggctatcaagtccggggatgcggccatcattgtgctggtgcccagcaagccgttgtgcgtagagagcttccaggagttcccaccgctgggacggttcgctgtgcgcgacatgaggcagaccgtggccgtgggcgtcatcaagtcggtgaactttaaagagacgacctcgggcaaggtgacaaaagccgctgagaaggcacagaagaagaaataactagggtgccagcagaacaacgtcatcactcgaacccaacaacaacaaaaacagacggctagagcaacagcagcaacaacacacaacaacaatacacatgtcaaaattataatacccac

SEQ ID NO: 2661 - protein, 462 aa, DROSOPHILA
MGKEKIHINIVVIGHVDSGKSTTTGHLIYKCGGIDKRTIEKFEKEAQEMGKGSFKYAWVLDKLKAERERGITIDIALWKFETSKYYVTIIDAPGHRDFIKNMITGTSQADCAVLIVAAGTGEFEAGISKNGQTREHALLAFTLGVKQLIVGVNKMDSTEPPYSEARYEEIKKEVSSYIKKIGYNPASVAFVPISGWHGDNMLEPSEKMPWFKGWSVERKEGKAEGKCLIDALDAILPPQRPTDKPLRLPLQDVYKIGGIGTVPVGRVETGLLKPGMVVNFAPVNLVTEVKSVEMHHEALTEAMPGDNVGFNVKNVSVKELRRGYVAGDSKNNPPRGAADFTAQVIVLNHPGQIANGYTPVLDCHTAHIACKFSEIKEKCDRRTGKTTETEPKAIKSGDAAIIVLVPSKPLCVESFQEFPPLGRFAVRDMRQTVAVGVIKSVNFKETTSGKVTKAAEKAQKKK

SEQ ID NO: 2662 - DNA, 8596 bp, DROSOPHILA
ttaatattttaattaaaaattccatcgcaaatgctgccgcaaagtgtgagtgaggtgtggccgtaagcctggccaacagcccctccagatgcccctccagaagccccttgagcgaatgagtggccgagtgttccctgaatggcctctggaggcctatgactttgaattattgcacggcgagtcataaattaagtgcgtggccctcctgaaatggcggcgagtgtggtgcgcacgttgggcgccacttgtcggtggttgtggcaggtggccaatctagcacttgcattaagcattaagcgcttttcgagcattttcttacttttaaaatattataccttaccttgaatttatacttaattgagctacgattctgtcaagaaatgaacaaagctttgattgagttaaactcgaatggctgttatggttgcaaaccagtttcatggtcacaaatccactattttggttagcgaaaccaacctgttgatatctcatccactttgcaagagcatttccctccagcatcgctgctccttcactcaaatattccagtaatagaatttgaagaccgaaatcggcgggcggagaacgatttcgggagacctttagaccttcataaataaatgcgccaagttccacggggggagttgaatccattatccatgtaaaggagtgggagtggcacctctcgagtcgctgttgtggccgtgcaatcaaattcagacatttggcgacactcacgccgcccacttgcgttacttaagtgtcgtaaagtcctgccacggatgcgggttaaggctgagcggttgggtccaaaggagggtgggtgcaaggacaacaacaagtgccgcttttatgatttatgcaactatcgcctgcagccagaagtgggtggggcaggactccaggagagccattgccgaaatccttgagagagccgctcgaggcgcgtaaattcttttcttgagcgccgcgtcttccttttctcgcatttctatataaagttttttttttttttgggttttggacatacgtctcagactaagcggctcgtggggaaagtgggaaaagcgcttcaaattgtgcaatttttatggacgcagtgggcggctggggggcggcattcatgaataaaagattttccgattcaccccgacaccagaagcaggcaaaccgcctccttctccagctgctcctcctgccgcccaatttattatgctgttggccttgccgagtgcaaataataagcagcaagtgcacagccacgcccacacaattgtcgagggggcagaacgctgaggcgaaggcggtccaagtaggtgtggtggcactgaagaagaggctccaaaggcagaatgcctgcaaaattagcaaagcaaacgctcggctgcagtttacttgccatttaagcgccgcactcgacagctgtgtttgtcagtggcacttgcaacgagcaaccacctaggcgccacaacagcatcagcaacttgcaacgcacgagctacaagaggaaaaactgtcggcacacaaggaaaaaccaacagaatgccaggacgaaatgagtgcgtctctattttcaattaagttaatcaattaaattttagaacaatttttttgaaaaataattaaactaagaatctgacattcaccaacaggttacacacttaaaatttcgcttataaaagtatctcaaagtatgcaacatacgttgtggcactaaactcaatgatttccggtcctatacatcttggtgtcatgcataataatgcattatatactcaccttctagatatagatatttcttacaaaatttctttctgtggaatgctgcacctgccgcttgcaacggcagccacaacaacaacccacagcctaaaagttgaacttgcaattttattatttttcttgcctcgccattgtttgtctctcgaaaccaaagggtcgtcttcggtccaaaagaaatgcacataaaatataagaatattaggcaaacacagggcaatttggtcagaggatatacgagtgtttatgcaagttcacttggcaattagggagttcaaacaactaagaaacggcaattccgaccaatctgctcgaaaataaaaaatatgctgttgcacgtttaatttgtttaacaattacactttgctttgcaacttttcggatgtgcgaagtggtcggattatcttggaaagccctcggattgcaaatggtacaaaagaaattttaaataaacaattttaaataaataaaaataaacatactgtagaaaagtattcaataaacaaatgttaaataagcatagcgaaggttgtaaaatattattaaagagaaaatagtcaatcaattagcgtgaaacagtgcctcgcaaataataaaatcgaaaaacattaatgtcctttaagtccttttagaagtgccgccacctagcgactcaacatttctaaaacaatgcaaccaagcaaataacagcagcacattttgtatgggcagcactaagagattgtccaaactcaccacattggctcgagtcttggctaggtgtggaacacggctattgggattcattttttttcaagtctttttgaaaaatttaaaataaatataaattatataatataatataaattatatttaccagtacaaaaattgagatcaataaaaaaatatgtaatatttttcagatcttgaaataatgtgctcattcacacatgttattttgcttaaaatattgcattatctttgcaaattcagaaaaaaagttaaaaaataaatggacagtggataagtacagtgacgtttacctttattaaacagacttggctacaaaattgggggtcgcgatttttacaattgcaatttgaaagttccacctgaaactggtggaacttgaccaggtcggccaccgtttggggtatatcaactaaagtctaggattagttttttaatcgttatcggatcgacccgaggactttttggacttcttatgcttgcgcttcttttcgcgatgccgattctctgagctggaatcgcgtttgctcttggcgccggtgctggtggcatcggttttggacgcacttccggcggatgcagccgcatccgggtccacggaatcctcttcatgcagcttcctgagcgtctcggccttcaggcgctccagttcgttgagctcgcgggtggtgcgctccttatccaagtcgtcctggcgctgcttctccatgcggcgttcctcctccttggcgatctcgttgcgcatgtgctccttcatcagcatggcggcctccgcacgcttctgcatcttctcgcgggccgccttctcgcgctcctcgctcatgggcagcgcggaggtgagcttgggcagcggactgcgcgagcgacggcggcgagagcgactagttgagggactgcgactgcgcgaggaactgtgccaacgtccacggctgcgactgcgcctgttgccggacgattcacggcgtcttctgccatcggagtcctggcgccttctgccagaagattcctggcgtcgtctggccggtgaatccttgcgccttctgtcaggcgagtccctgcgtttcctttccggcgagtcctgacgctttctgcctggcgattcttgtcttttcacaggagaatcctgacgcttcttatcagaatcctttcgctttttgctcgggctatcctctcgtttcttacccgcagaatcctcctgccttttgctgtcctgtatctttttgtcttgggaatcctcccgctttctattggcggagtccttgcgcttccttgcaggtgaatcgtcacgcttccagttgggagaagcctcccgcttcctgtcgtgtgaatcgtctcgctttctttcaggcgagtcacgccactttctttccgttgaattgggacgcttcttactcggcgaatcctgacgttttcggcccggcgacaactgacgcctctggctgggtgaatcctgcctacggttctgactgcgggagcgctgctgacgccggcggtctccactgggcgagcctcttcctctgattggtgacagggggtaacgattgcggtactcattatcctgagagcgcgagcgacggcggcgatctctgtccgcgaagggatttcggcgattgccacgattaagctgattctgattctgattctgattttgattctgattctggttttggttgtagttttggccaggacgtcgggcaggcgagcgttgctgacgacgagcaggagattggcgacgagggctccgggaacggctgcgctttggcttggccttctcctcggtgggcttgcgctcatcgcgtttcgcgttgcgatccttgctggtcgatggctccactctgatatcctgcttgcttggtggtttcaccttcaactgctcctcgtcctcggactcgacttcggattctgtctgctgctcgtagtccaaggcgttcatgtccatcgacttgcggcgttttacaggagtcacatccctagccttatccttctcgccagccttttctctctccttggctttaccgcggtctgcggtgtccttcgacttggctttgtgctctggagagaatcgatccggagttattttgccaccgtaagtgctggcatgggatagctcgaaaaaggactgcttaggattctttgtggcctcctcgtggcgacgctttctctcatgctcgcgccgcttcatctcctcctcgcgcatcttgctctcctcctcaatgcgctccaagtcggacaacttgatggtgcgcttctgggcatgcttccagtgaggtggcgtagtgctgcgcgaacgactacgcgacggggtgcgaaagcgctgtaaatggtgtcattttagaaattgtgtgcggagttacaaacagttttatatactcacaaacactccgcgtcctttgacaatgcgaccactacgcgatgtaggcggtgcctgcttctttgaccaaccgaaattgttacggctgcggtctcgatcctgatctttgcctcgatcacgatcctgcccgcgtgctccacgctcctcacgatccagcgactttgatcgctctgcgcgcattaggaatttgttcgatacctaaatacagaagagtataggatgaagggtacatattcaagaacaggaacagagaatccacttcagttacctctggtatctcgttaggatctatctttgtaattgtgaccagcggatgcagttcgccttcctcgcggtcctcgtcatcatcctgcggggtctggtcatgttttccattcccgcgacttgtttcattgctgtacgaacgaaatgaaatgaaacaaattacaaaataacaaccactatcacatactcttcgctatcgctttgcgacttcgtatctttgcggctgcgttttttcttcttggccttgcgcacgacctttgcttcagcctcactttcctcgctgtttgaatcttcggtggccgtggagcgcctcttgtgcttcttctcctttttggctatgtgacgagaagcatgtcaagtataatggatatgcgaaaatggattacagtcgtaccctttgtctgtctaactagttcaccgcagttggcaatggctgcatcctgcagcgggcgtgagttccgatcgacaggcaagccctccaattggcgcaccaactcctgaccggatataacttggccgaatacaacatggatactgcaacgagaaaatatgacgctattaatctgttgatctacttaacgtgttcaaagctaacttacttgtccaaatgtggcgcaggctgtgttgtactacaatgagaaacagaagaagagaaaaatattctttacactttggctaactggttgttgggctgcagtaggcagttgtagttgaaatcggtgttgttgttgttgtttcagttgttgttgttgttattgttgtcggttgtggcggagacaatgtcatgtgcaacaaagtttaaaggtttctaggtgtgtaggcagaggtggcacacaggattttggcaagccaccaaccgcaagagccgctgccgctggccatggccagcacattgtcatctggcagatccatcgtgaggatccagcccaagattcccgcaaagatccacaaggagccgacagcgagagagagagagattgagacacacactgagacccaggcccagggaccaaagaccatggagctgaaagacctgcatcgtctttcgcttggtttttggacccacagaccaaatgcactagggatgctgggatggcggtgcatcggccgatggaggacagattgcgatgcatctgtccgctggtcagtgggacgctagctcacactttaacgcccacgggctaaggctaaatggcaatagattaatgaacaacaacagtggtttaagtatagatcaaaaagaagacgaagagagtttagctgtaatatcggtgcctgaaacagaactgaaactaaatttacggccacgttagtccggaccagccggttacggtcctccgtcgagagcacttacataaagaactgcgagccatttgtgttcttgccccggttggccatcgacagcaggaagggacgatcgtgcttcttttcgaagctctcatctggaaagaggaatcggattgtttaaaccaaattcactttaaatgttactttaaagcccaagagagatgagcaactcaagttatcttctagataactttttaatgcgcatgtaattggatttcccaaagccgcttctatttgcatatttgtcccattttccacccaaacgtataattagcaatatgtagatgtatgatgtgcaccattcccttatctttctaatggaaatatttgccaaaatgtaaatttaaattgagtcgcttgagtaaacatttatttttgacatttaaatggggcatttgtacactttggctggcatatcaaaagcgttttaatttttttcgacaaagattaaacttaagtagattattgtagtgcagtttagatgtaattggctggaagtttttaaatctccaaatgtgggtgtctgtatttacagtgtttttattacatttctccccctactgactctttattaattgcactttaagtaccctgtatattccctttcgttttctgttcttcttatcagataaccactgtattgattttttcccacacaaacagcagcacacacacacaagcgtgtatgtatgcatgcaggcatcgaatcggaagccggaagaactcaccctcgaacgtcccgccgtagatggactcgccgccggtgccgttgcccgcagagaagtcgcccgcctggaccatgaagtccttgaccacccggtggaatatcacacccttgtactgcagcttcttgccggtgattaggccaaatcccttttcgcccgtgcagagtgcgcggaaattttcggccgttttgggcgccacatcgttgaagagctcgaagacaatgcggcccatgcccaggccgcccagggaaatgtcaaagaagcaccgcggtcgcgtggcacccgcgtcgcgtttgtttaccgtcattatatgcgccgatttctgccaataaatgctgtttaatacgtatttcacgccgttttcgagttgcacaatgtcggcgttgccagctctactcagaactagggatgtcaaaaacatacagttagaaatatcgatgtgcaatatgcttagcatattttcgggtatcgatatattaattttaatatatatattttcttaaatttgttaatacatacatatgtacgctcaaataaacggtaaactttgagctatatatagtcaaaatacaccattgattactctcagcaaccaataatcattttatgctttttggtataacttccaaaacctttagaacatgggttgaaaatattatcttcaatgctcatatttttgggaaaaacagaatgtcgtttaaaccaactatgaaatgagatctggcctttatggtcatattatattaagctttttcagacaatttacacagttaacatctttgtatatagctttaaaagtttattatattattcaatacatagtaaaaaaataatttattaaattaccgttccatccctggctgcaatacggtcacacaaagccaatgtttacatggcagctcgcgtgtggctgtagctgtgtgcgtgagcgagagcgcaagagcggcgcgtgtgtgcgtgcgagcgggagagcagggcgaagacgtgttcttttcgccgaaaaagcaaataattgggttggtttatcagagaaaaacaaaaaaaattccagccagtgtcgcgataaaaacacgacaatcgcattgcagccgcctcagaagtgtaagatcagcctcagctgaccggaaagttaacattgcgacgtggaaaaccacgaatcaccagcaaatttcagcaaaagcaatcgcatttcagaatgtgtggcatattcgcgtacctaaactacttgacgcccaagtcgcgacaggaggtcctggatctcctgttgcagggactgaagcggctggagtaccgcggctacgactccacgggcatagccatcgatgcgctgaactctggcgaggcacagtccataatgctggtgaagcgcaccgggaaggtg

SEQ ID NO: 2663 - DNA, 3157 bp, DROSOPHILA
ccgacattgtgcaactcgaaaacggcgtgaaatacgtattaaacagcatttattggcagaaatcggcgcatataatgacggtaaacaaacgcgacgcgggtgccacgcgaccgcggtgcttctttgacatttccctgggcggcctgggcatgggccgcattgtcttcgagctcttcaacgatgtggcgcccaaaacggccgaaaatttccgcgcactctgcacgggcgaaaagggatttggcctaatcaccggcaagaagctgcagtacaagggtgtgatattccaccgggtggtcaaggacttcatggtccaggcgggcgacttctctgcgggcaacggcaccggcggcgagtccatctacggcgggacgttcgaggatgagagcttcgaaaagaagcacgatcgtcccttcctgctgtcgatggccaaccggggcaagaacacaaatggctcgcagttctttattacaacacagcctgcgccacatttggacaatatccatgttgtattcggccaagttatatccggtcaggagttggtgcgccaattggagggcttgcctgtcgatcggaactcacgcccgctgcaggatgcagccattgccaactgcggtgaactagttagacagacaaaggccaaaaaggagaagaagcacaagaggcgctccacggccaccgaagattcaaacagcgaggaaagtgaggctgaagcaaaggtcgtgcgcaaggccaagaagaaaaaacgcagccgcaaagatacgaagtcgcaaagcgatagcgaagacaatgaaacaagtcgcgggaatggaaaacatgaccagaccccgcaggatgatgacgaggaccgcgaggaaggcgaactgcatccgctggtcacaattacaaagatagatcctaacgagataccagaggtatcgaacaaattcctaatgcgcgcagagcgatcaaagtcgctggatcgtgaggagcgtggagcacgcgggcaggatcgtgatcgaggcaaagatcaggatcgagaccgcagccgtaacaatttcggttggtcaaagaagcaggcaccgcctacatcgcgtagtggtcgcattgtcaaaggacgcggagtgtttcgctttcgcaccccgtcgcgtagtcgttcgcgcagcactacgccacctcactggaagcatgcccagaagcgcaccatcaagttgtccgacttggagcgcattgaggaggagagcaagatgcgcgaggaggagatgaagcggcgcgagcatgagagaaagcgtcgccacgaggaggccacaaagaatcctaagcagtcctttttcgagctatcccatgccagcacttacggtggcaaaataactccggatcgattctctccagagcacaaagccaagtcgaaggacaccgcagaccgcggtaaagccaaggagagagaaaaggctggcgagaaggataaggctagggatgtgactcctgtaaaacgccgcaagtcgatggacatgaacgccttggactacgagcagcagacagaatccgaagtcgagtccgaggacgaggagcagttgaaggtgaaaccaccaagcaagcaggatatcagagtggagccatcgaccagcaaggatcgcaacgcgaaacgcgatgagcgcaagcccaccgaggagaaggccaagccaaagcgcagccgttcccggagccctcgtcgccaatctcctgctcgtcgtcagcaacgctcgcctgcccgacgtcctggccaaaactacaaccaaaaccagaatcagaatcaaaatcagaatcagaatcagaatcagcttaatcgtggcaatcgccgaaatcccttcgcggacagagatcgccgccgtcgctcgcgctctcaggataatgagtaccgcaatcgttaccccctgtcaccaatcagaggaagaggctcgcccagtggagaccgccggcgtcagcagcgctcccgcagtcagaaccgtaggcaggattcacccagccagaggcgtcagttgtcgccgggccgaaaacgtcaggattcgccgagtaagaagcgtcccaattcaacggaaagaaagtggcgtgactcgcctgaaagaaagcgagacgattcacacgacaggaagcgggaggcttctcccaactggaagcgtgacgattcacctgcaaggaagcgcaaggactccgccaatagaaagcgggaggattcccaagacaaaaagatacaggacagcaaaaggcaggaggattctgcgggtaagaaacgagaggatagcccgagcaaaaagcgaaaggattctgataagaagcgtcaggattctcctgtgaaaagacaagaatcgccaggcagaaagcgtcaggactcgccggaaaggaaacgcagggactcgcctgacagaaggcgcaaggattcaccggccagacgacgccaggaatcttctggcagaaggcgccaggactccgatggcagaagacgccgtgaatcgtccggcaacaggcgcagtcgcagccgtggacgttggcacagttcctcgcgcagtcgcagtccctcaactagtcgctctcgccgccgtcgctcgcgcagtccgctgcccaagctcacctccgcgctgcccatgagcgaggagcgcgagaaggcggcccgcgagaagatgcagaagcgtgcggaggccgccatgctgatgaaggagcacatgcgcaacgagatcgccaaggaggaggaacgccgcatggagaagcagcgccaggacgacttggataaggagcgcaccacccgcgagctcaacgaactggagcgcctgaaggccgagacgctcaggaagctgcatgaagaggattccgtggacccggatgcggctgcatccgccggaagtgcgtccaaaaccgatgccaccagcaccggcgccaagagcaaacgcgattccagctcagagaatcggcatcgcgaaaagaagcgcaagcataagaagtccaaaaagtcctcgggtcgatccgataacgattaaaaaactaatcctagactttagttgatataccccaaacggtggccgacctggtcaagttccaccagtttcaggtggaactttcaaattgcaattgtaaaaatcgcgacccccaattttgtagccaagtctgtttaataaaggtaaacgtcactgtaaaaaaaaaaaaaaac

SEQ ID NO: 2664 - protein, 970 aa, DROSOPHILA
MTVNKRDAGATRPRCFFDISLGGLGMGRIVFELFNDVAPKTAENFRALCTGEKGFGLITGKKLQYKGVIFHRVVKDFMVQAGDFSAGNGTGGESIYGGTFEDESFEKKHDRPFLLSMANRGKNTNGSQFFITTQPAPHLDNIHVVFGQVISGQELVRQLEGLPVDRNSRPLQDAAIANCGELVRQTKAKKEKKHKRRSTATEDSNSEESEAEAKVVRKAKKKKRSRKDTKSQSDSEDNETSRGNGKHDQTPQDDDEDREEGELHPLVTITKIDPNEIPEVSNKFLMRAERSKSLDREERGARGQDRDRGKDQDRDRSRNNFGWSKKQAPPTSRSGRIVKGRGVFRFRTPSRSRSRSTTPPHWKHAQKRTIKLSDLERIEEESKMREEEMKRREHERKRRHEEATKNPKQSFFELSHASTYGGKITPDRFSPEHKAKSKDTADRGKAKEREKAGEKDKARDVTPVKRRKSMDMNALDYEQQTESEVESEDEEQLKVKPPSKQDIRVEPSTSKDRNAKRDERKPTEEKAKPKRSRSRSPRRQSPARRQQRSPARRPGQNYNQNQNQNQNQNQNQNQLNRGNRRNPFADRDRRRRSRSQDNEYRNRYPLSPIRGRGSPSGDRRRQQRSRSQNRRQDSPSQRRQLSPGRKRQDSPSKKRPNSTERKWRDSPERKRDDSHDRKREASPNWKRDDSPARKRKDSANRKREDSQDKKIQDSKRQEDSAGKKREDSPSKKRKDSDKKRQDSPVKRQESPGRKRQDSPERKRRDSPDRRRKDSPARRRQESSGRRRQDSDGRRRRESSGNRRSRSRGRWHSSSRSRSPSTSRSRRRRSRSPLPKLTSALPMSEEREKAAREKMQKRAEAAMLMKEHMRNEIAKEEERRMEKQRQDDLDKERTTRELNELERLKAETLRKLHEEDSVDPDAAASAGSASKTDATSTGAKSKRDSSSENRHREKKRKHKKSKKSSGRSDND

SEQ ID NO: 2665 - DNA, 2625 bp, DROSOPHILA
tatacgcctatatatatatgtatatatatatatatatattagtacgtttaaagtaagttttccatttctaagttatacagtttatcgttctctttgtgttccttttccttttttgcattgcgttatgttgcaaaaaaaagttgctgtcatttggcgatctagtcggtagcagcaagtctccaatggaatcgatgccccaccactccatcatcatcttcttcttcttcctcatcttgttggtgttattggtgttatggtgttgtggccgttgcggatgctgttccaagcgctgttgcatgtatcctcgtattgttgttgttgttgtagttgctattgcacgcattgttgcatacatcaacgtgttgttgtcgttagtgttgcacgcattgatgcatgcatcatcgtgttatttggttttatatgtatgtatcttgtcgcatcgccgtccctttaggtattggaactaaatgccgcctgacggagcagcacatagatcttctccttgatccaatccttattgtagggcgcataggtattggtgctcttctggtaaaccatgcagctaatgtccaccattgtgtcgatgaaatcgaatagctggctaatgtcatacgtaatggtcggagtgtttggattgcggcgcttcaggtgctcctcgtagatcttgcacacgccctccatgcactcgttgacgctctcgtagtcacagtaagtgcgggtctccggacgagcacccggctgtaccaataggatggtgtgcgacatggtgatctgcaaggcaaaaatggaacattaatgttattggcggtgatctatgtactcaagcgatatgtatgtatgtatgttactagtgtgcgtttcattacattacgtttcatcttcatcacttacatccttttttttaacaagcgttttttctatagcaaagtccgaaagattccgagactctcgaagttgaagtttacttcgccagctctgcaaaaattgtgcataaatatttattagaagcatagagagctgtcagcaaaaaaaaaaaagacaaaaaaaaaaggaaaagaacaaaaacgaaagagatggaagagatatgctgttgccgcatgcaacgcatcgccccatctcgctcgcgctctcgccgcaacaccaatacacgcgcaccacacatgctggccagcagaacgctctttgattttccaatttgcaactgggaaatagactaagatggcacttccagcatggaaaacgagtaatttgtgtgtgaagcgaatgttggcaatggagaaatgcgtacatttgtacaagataatgcacgcttatgccgcttcactaaaacacaaacattcggaagcgcgaacagacacgcacacacatgtacaaggagtaacggccgccgcgtgtgtgtaactaactgtatgcaatcacttgtttttcttccttttcaccgatttttctcgaattttaaataattcccatgtctcccgtttagtgttcaacttacccgttcgaacgccggactatatggactatgataatatgctgattcagtaaagagattcggtaaaatcagcgcttgattcgtttttttttattttgccagttctatgggttttgaagaggaggctgaagctagagatgagcgcttcgctgcgtgcctcgccgtgacaaaataatcgaaagatatcgattaatactaacatcttttatttgatatacattgtttaataatatttaccaaattaaatgacaattgtgattttttatacttaattgtatcaatgtatacttgcatttcaatttgtatatgtatttgattccatattatgttcattcacttttttattgaaaagcacactttatgtatattacgcctttaggtataaagcatgtttttcaatgcatattttcatttcatttggcgtaattcattccatatttagtcttcagattttttaaataaaattaactaaagcttttaacatatactcatcatagtaatacattacaataactacggaaattatttatttattatttttattttatatatttataaaaaaattataattataatgtcaaattaaagtggattgcattatttatttaggttcattttattttgttattacatataaatattaggtattacgtttatttaagttagaataaaattaacgcccatcaacaaattatggtcattaaagtctttatgaagtaaacttaatgtacaatcattttcacttaaagtgcatattaaaaagcatatttttacattttttagtattgtatttaatataaagtcaaaagttacttttaatgaaacaaaactatcgcccatcgccagctccgcagtctggccactgttctcactgttcccagtgctgccagacagcggcaatcgaagatccgagtgcccaccagctgtttgatctcaattggaccaattggaagagcgcggtgtcgcgggcagcgcagtcgagcggcggcagagcgatcggcaaagaaatcaacaacaaaaagcaaaatctcgtctcaacattatttacgtgctttttgttttagtgaaaagtgaaggcgcagccgcagcagcccgtgtttcgcgcgttcccattaatttgttgttattttcaa

SEQ ID NO: 2666 - DNA, 716 bp, DROSOPHILA
agcttcagcctcctcttcaaaacccatagaactggcaaaataaaaaaaaacgaatcaagcgctgattttaccgaatctctttactgaatcagcatattatcatagtccatatagtccggcgttcgaacggagctggcgaagtaaacttcaacttcgagagtctcggaatctttcggactttgctatagaaaaaacgcttgttaaaaaaaaggatatcaccatgtcgcacaccatcctattggtacagccgggtgctcgtccggagacccgcacttactgtgactacgagagcgtcaacgagtgcatggagggcgtgtgcaagatctacgaggagcacctgaagcgccgcaatccaaacactccgaccattacgtatgacattagccagctattcgatttcatcgacacaatggtggacattagctgcatggtttaccagaagagcaccaatacctatgcgccctacaataaggattggatcaaggagaagatctatgtgctgctccgtcaggcggcatttagttccaatacctaaagggacggcgatgcgacaagatacatacatataaaaccaaataacacgatgatgcatgcatcaatgcgtgcaacactaacgacaacaacacgttgatgtatgcaacaatgcgtgcaatagcaactacaacaacaacaacaatacgaggatacatgcaacagcgcttggaacagcatccgca

SEQ ID NO: 2667 - protein, 104 aa, DROSOPHILA
MSHTILLVQPGARPETRTYCDYESVNECMEGVCKIYEEHLKRRNPNTPTITYDISQLFDFIDTMVDISCMVYQKSTNTYAPYNKDWIKEKIYVLLRQAAFSSNT

SEQ ID NO: 2668 - DNA, 4416 bp, DROSOPHILA
tgtggcagaacgggaccaacgcccgcgtgcatctccacggtgaggccgagtgcttgcggaatgacaaggatgtccgaaaatattatggaggcgtccaggtcgaagcggcgcaatggctgcatggtcacttcgcacgctagctccggggtgcggcagacggtgaagaagtcgtggtgctttcgcagctcctggaactccggcaggtagcgccccgcttggcgcatcacccaaacaggcacccggtccaccacctcgccacgtgcggcgcgcagcaggttatcattcttgagcacgggaaagggctgaaactcatttccaatttgatcagttttcacgtttttcagcaggaaaatacagagacacagcaatcgaagtccaaacgacatgatgtaactgcaggcgccactccgatcagctgggaaactcacctttgcgtctttcatagtgacttttggctgttaaaaaggtagtagagggctaacgaagttatttccactgatgaaatccgtaaatttgattaaatctgtcacggaatcccgcaattctgcatgagtgtgcgttctctgccagactttgtttacgttttcgcctggtggtgggagaggtgcgatagtcgccggcaaatcgataattagctaatctggacaacttttctttttaggagaatcagaaattattccacttatgaatagttaattctttttcttggcttgggtttgttatgtgtcgagtggccgaaagataatccagattttgatataacccgtgatcataaaacatttaattttaataagttaaaagttttcgacgactttataatatcccttgatttcaatagaatgtgaaataattccataaggaatagaactaactagggaaatagaacttaaattttgaaaaataatcgattctttaattagcggctactcgaaaagcacctaaaattcaccaaccgcatgatttgatttttgtaaacaatttttgcagccggtggacatggaacgtttggcaagaactttctcccagcagaacgaactgataaccctgaatgagaactacaaggatgagttcgaaaccttcaagtcattggcatccatgccagcggacattctgcagatattccagaagctggcgctcgacttgctgcaggatttggagcaaccggttgacaggaaaggatgcgcagaacgttcgaaaaatctgcgcgaggagggaaaccttatgttcaaagagtccgcatcgggatcctccaaggactcggttctgaaagcatgcaggctttactcggaagccgttttcgaggctgagaatgctgtggaagagctgtcgctggcgtttgccaaccgaggaatagctttgcaggagtacgggtactacagagaagcctatgacgactgctccaatgcgctggagtgcggatacccggaaaggctgcggcacaaggtgatcatgcggcaggccttctgcgcctggaagctgaagaagattgcttcgctagaggagcatttggattatctcgggcagctgcagcttaaagagagctttgagcagcagctggaagacctgaagcagaaactggagctgctaaagaaccaacccagagagcaggaaacacaagggaaagtggtggataaatctctaggggaaatgtaagtttccaaatcgattctggccacttcttaatttgtaacctttacttctcagccttacagatcctggtccccgtggtcgatatatggtggctaaggaagcgattagcaaaggcaacgtaatcttttcagagcgcgcctcctgctttgttccattggagcaactgcttatttgccagcagtgcgccgccaccttaatgagcgcacccataccctgccccaattgccatcagcgggtagtctactgctctaggaagtgtcgggaggcgcactcggccatccacaaattcgagtgtgccgcctacagaaaggatatcctccgacttttgggcatttcgcatttggccttgcgattgcttttgacttacattccctacataaggcctcatttgcaagagatgaccagtgcaaagggtatgtgggaagaaataatgaatctgtcccgaaaaccggaagagagtgaaaacgctccagagtatttgcgaagcctgcgcatggtcagtcaactggatcaggctatcgatgaggagttaaattaccacatcctctgtgccaatctccttcaactttacctgaaagagcacaccgatttctacgatcagttccactcattgccagccagcattgaagattggcaactgattatatcagcactgattctgcgcttcgccggccagttgctggcgaatgggcatgtaggcgatgcgttgctcggagttggcatggagccaaaagagtttgtcatgctgcagccggagttgtggcaaaagcctcgacacctgaaacgcggccagctgcacaatctatcccactcggatcctatcacggctatcaatctgccctacttgagcttgtgcaaccacgcctgcgaaccctcaattcgcaccaagttcgatggatgttccgtggtgaactacgctgcaaaggacattctagaaggcgaagagatcttcaattgctatacaatggattacagaaacagtttaaagctacaacgatctcatccgctcaaggccatctacaaatttgagtgcacatgcgctaagtgcacacgaactgatcccgaccagaactatgtacgttttcaaaccaagcaaagccatttgtaaatgtctttcccaatcttccagctttcttttcatcgttatcgctgcgaaaagcccaactgccgacaagaatttctgccagacgccaaagttcagcagaataatcttcgctggtggctgagatgcaatgcagagaaaccgattacttgcacggtgtgccacgagcttcaacatttcgcctggtacaatgagttccttggactcatcggcagcagtgccgattcgtcaaaaaggcaggcgctgttcaaggcattcgatgatctagacaagtggcttgtggatcaccacagcttaaaaagaattatggccgaggaactggtaacagcctgtttttatgagatagatggtaggctacggctggattttgttacgtcgtaatttataaacctctacttaaacaggaggcacttcattggatgagtttgagtatgaagatctggcgaggattatccgcaaacagctggaaggcattgctgcgcagtgtggcgataactcaacggaatacattgctcgcatgacctatttgtgggatatcatagcccagaagaaatgccgcaccgatagaaaggaactgctagagatgaaaggtaaggtggattatctggctagcgagcatcgcgaggttttcttgaactattacaacgattttattgagcaataatgtaaataacgatatacacgcattaaattcgctagtttcgagctacaagcattaaacactggcacttcttgttacctacaactaatctgagcttcctaacgggcattcgtccccacaaattctctagataaagtgggaggcatattcgtggggcattacaccccgtcggggataaaaggtgtgggtggtggagaacttgagcaggttggttatgtcgctggtgtagatgtcggcaaagcggaagaggcgtcttgagaagtaagtggggttgtggtaggtgcggaaaacgctgccaaactgctcgttgaacacgttcttcgttttgttgctgtcgaagattggattcggatttagagatattatcgtaagccactagataaatgtatattttcttaccgcaactgatcccgctcctccatccactcctttaggcagatctgcgctgcctcgctatcatcgtcctgggtgtcctcgatgagctgcgtcagcatttgcagccagttggcgctcatcttgaagtccttacgattgagggttttaatttcgtgctgcaatacgaaaatacccttagaggcaatacgataattgcttgatataaaacacccacagccagttcgctaataatggctcctgtcctccagctgtgcttcagagtaacatctgctaggtcgctgtacggatgatctccgaaatagagcacagagtgaccacgccagcccttcagctcttgaagctgtctcaccgaaccctgtgaagaacatcagacaacagggttgattactaaccaagtgggaatgggaaacccttacctcgtagtagatttttcccttctccagcttgaatacccgatcccataggtgtgactgcgttcgctcgtcgaatagccttattggtcgagattcatccgtaaagaactttggtttgcgggcctgcacgatgaccacatcgaagaaatcacgccagttggcgccgaccagaaaggacatgccacagtttctac

SEQ ID NO: 2669 - DNA, 2252 bp, DROSOPHILA
aacgtttggcaagaactttctcccagcagaacgaactgataaccctgaatgagaactacaaggatgagttcgaaaccttcaagtcattggcatccatgccagcggacattctgcagatattccagaagctggcgctcgacttgctgcaggatttggagcaaccggttgacaggaaaggatgcgcagaacgttcgaaaaatctgcgcgaggagggaaaccttatgttcaaagagtccgcatcgggatcctccaaggactcggttctgaaagcatgcaggctttactcggaagccgttttcgaggctgagaatgctgtggaagagctgtcgctggcgtttgccaaccgaggaatagctttgcaggagtacgggtactacagagaagcctatgacgactgctccaatgcgctggagtgcggatacccggaaaggctgcggcacaaggtgatcatgcggcaggccttctgcgcctggaagctgaagaagattgcttcgctagaggagcatttggattatctcgggcagctgcagcttaaagagagctttgagcagcagctggaagacctgaagcagaaactggagctgctaaagaaccaacccagagagcaggaaacacaagggaaagtggtggataaatctctaggggaaatccttacagatcctggtccccgtggtcgatatatggtggctaaggaagcgattagcaaaggcaacgtaatcttttcagagcgcgcctcctgctttgttccattggagcaactgcttatttgccagcagtgcgccgccaccttaatgagcgcacccataccctgccccaattgccatcagcgggtagtctactgctctaggaagtgtcgggaggcgcactcggccatccacaaattcgagtgtgccgcctacagaaaggatatcctccgacttttgggcatttcgcatttggccttgcgattgcttttgacttacattccctacataaggcctcatttgcaagagatgaccagtgcaaagggtatgtgggaagaaataatgaatctgtcccgaaaaccggaagagagtgaaaacgctccagagtatttgcgaagcctgcgcatggtcagtcaactggatcaggctatcgatgaggagttaaattaccacatcctctgtgccaatctccttcaactttacctgaaagagcacaccgatttctacgatcagttccactcattgccagccagcattgaagattggcaactgattatatcagcactgattctgcgcttcgccggccagttgctggcgaatgggcatgtaggcgatgcgttgctcggagttggcatggagccaaaagagtttgtcatgctgcagccggagttgtggcaaaagcctcgacacctgaaacgcggccagctgcacaatctatcccactcggatcctatcacggctatcaatctgccctacttgagcttgtgcaaccacgcctgcgaaccctcaattcgcaccaagttcgatggatgttccgtggtgaactacgctgcaaaggacattctagaaggcgaagagatcttcaattgctatacaatggattacagaaacagtttaaagctacaacgatctcatccgctcaaggccatctacaaatttgagtgcacatgcgctaagtgcacacgaactgatcccgaccagaactatctttcttttcatcgttatcgctgcgaaaagcccaactgccgacaagaatttctgccagacgccaaagttcagcagaataatcttcgctggtggctgagatgcaatgcagagaaaccgattacttgcacggtgtgccacgagcttcaacatttcgcctggtacaatgagttccttggactcatcggcagcagtgccgattcgtcaaaaaggcaggcgctgttcaaggcattcgatgatctagacaagtggcttgtggatcaccacagcttaaaaagaattatggccgaggaactggtaacagcctgtttttatgagatagatggaggcacttcattggatgagtttgagtatgaagatctggcgaggattatccgcaaacagctggaaggcattgctgcgcagtgtggcgataactcaacggaatacattgctcgcatgacctatttgtgggatatcatagcccagaagaaatgccgcaccgatagaaaggaactgctagagatgaaaggtaaggtggattatctggctagcgagcatcgcgaggttttcttgaactattacaacgattttattgagcaataa

SEQ ID NO: 2670 - protein, 718 aa, DROSOPHILA
MPADILQIFQKLALDLLQDLEQPVDRKGCAERSKNLREEGNLMFKESASGSSKDSVLKACRLYSEAVFEAENAVEELSLAFANRGIALQEYGYYREAYDDCSNALECGYPERLRHKVIMRQAFCAWKLKKIASLEEHLDYLGQLQLKESFEQQLEDLKQKLELLKNQPREQETQGKVVDKSLGEILTDPGPRGRYMVAKEAISKGNVIFSERASCFVPLEQLLICQQCAATLMSAPIPCPNCHQRVVYCSRKCREAHSAIHKFECAAYRKDILRLLGISHLALRLLLTYIPYIRPHLQEMTSAKGMWEEIMNLSRKPEESENAPEYLRSLRMVSQLDQAIDEELNYHILCANLLQLYLKEHTDFYDQFHSLPASIEDWQLIISALILRFAGQLLANGHVGDALLGVGMEPKEFVMLQPELWQKPRHLKRGQLHNLSHSDPITAINLPYLSLCNHACEPSIRTKFDGCSVVNYAAKDILEGEEIFNCYTMDYRNSLKLQRSHPLKAIYKFECTCAKCTRTDPDQNYLSFHRYRCEKPNCRQEFLPDAKVQQNNLRWWLRCNAEKPITCTVCHELQHFAWYNEFLGLIGSSADSSKRQALFKAFDDLDKWLVDHHSLKRIMAEELVTACFYEIDGGTSLDEFEYEDLARIIRKQLEGIAAQCGDNSTEYIARMTYLWDIIAQKKCRTDRKELLEMKGKVDYLASEHREVFLNYYNDFIEQ

SEQ ID NO: 2671 - DNA, 4973 bp, DROSOPHILA
accggacggagggcccccaaaaaataccgactcgcggttggaactactgtggccatatgcatattcaaattattgaacccaacatttaaaaaattgtaaatattatataataggttaataataaattacctttgcggaaacatctttacgataaacattaaaataagaagttaaaattgcttgacgctacaagattaagcaattgtgttattcttatttattattgatatttatttattaaggcgtaatttatgtattagcatttgaatttattgtatatttattactagtttaaatttaacggaaaaacatcggctatttatccgttactaatcggcaagatttgccgccgtttttggtaattcaaaagagtattacagcttttctggtataagttccacatggcgttatggatttctatattttaatcacaaacccgtgatttgtaacactattcgttgtgagtgccaagcagtagtgactgaactatcggttgctgaacacgcttcccagggaatgcaaaattttcatttcggcaataattaaaaaatccacgagtgcaaacaaatttgaagtaattttcctagcatacatatacaaacgagcccaaaagctaaacttgaaacaccaaagcaaccggaaggaagtggaaaaggaggtcgacgacgatcagccatatattctgcctcaattgcccgtgtgtgcgtgcgtgtgtgtggtagtagtagtattttttcatttctgttttcgctgtacgtgcggattgattcatattgtttcattacgtgagctattgcaatattgtacacactgggccgaggacatagccaatcggatttttctcatgaaaccattaaaccgagtttaatgtttatttgatttacgcgtaaatagatgccgcctgcaatgtagagctgctgatggccccttttatacgggggccgcggccaatgaatctacagacccaaaaaagaacaaaaaaaaaccaaggaaggcagagacaaaaacaaattgcgccgtaggtgaaatgaaaagcgccaagaagcaacagcgaatacgtcaaatatctctaatctccaataccagtgcacgctaaacgtgtgtgctgaacaaaaaattctggtggcctccaacaaaaacaacagcaacaagaaacatccgctgaggaattgacaactgatacgtagaattatgaacgtagagagccaactgaagacaccgccaacgcacattcgaaatctggtcaagcacgtgaacaagcgaaattttaatgagagcagcgagcaaataaatcaggtaggtgcccaagttattctaccaaagtttccatgaaccatttccaattcattttgtcaacaataacaacaacattttgtagggggcgggggtttagtgttgccaaaccgacaacatatcgcacctggccaaccagagttgccaattgttcgcactcacgaatgggctattgccatttcactcgctcgtgcatttttgccgacgccattacagttttttggtaaaggcagctgaaaaaatttctctgcacggcgttgcgcgttttgtgagcgttttgtttaagctaaaagttttatagaatgtgtaaaaccaggccaattgtgtgcgcttagccacaaacgtgtttcgtgagttgatggcagtgtgaattttgcagcgtagtagtgcgaaatcgaattgcgaaattcgaattgggaagcccaagccaagcgcagggcttttcggccccgaaacttctgttttttcattgccaaacgagagaaaccaaattgaatagtaagttcgtgggacaaattgcgtgggaatatcaattgcggccgctttcttttcgctagagttgcaatatgtcgcactttttcctgtgacccccttcctttcgcgcaccgtcatgctctcttctctccttacccatgtaacgtttcgccaacgtgtgcgagcgagagggcgcgtgtgtaatttgttgtggagcagctgcgacggcggggccaaagctgttgtctcgctcccccgttcggagtgaggccttgattccggactccgagctccggatcaaatatttcaacagttttggatccgtagggagggagggggatatctagcctcctagaaaagttttgccattcaaattagtatcataacaaatacttggcttagaatggcaccatttgcccaacaatcccctaaaaagtaatcgtttgtgggacaaactatgctacagatcccgttttcttgacagtaaatggcatattcctcaaaaattaaaaaaaatgataaaaaaaaatgataacaaaacagagtcatatacttcagtattttgaaattctcaacaatctatatctgccatttaaaaagcctgataagttttcaagttattcgaactcagtaggattaccaaattttcactgatattcaatgttggaatgaagtactaggataacccaacggaatttatagtaagaaaggtctaggaatttgttggattccatggagaaattatcggatagaaaatacattaactaacttaacgatagcccaatttgagatatagtcttccatttagttatagcattcaagataatctcagaaacctgtgagcccaacaatggtgcacctaaactggaattcccaatgataaaattcatgttttaaccctctggttgcgcttttaaaaagccaattgggtaaagtttttaagcgggcaagaaataatgacttaatggatttacttttgaaaacagttgcctggagttagaaataatccctccaaaatgttactttacatcttgccctgtatccgtaaacacatatccaattgtacagagaaaagttgagacactcacagaacataatagaacctgtcaaaatttccaagtttgcgatgaaaatcacataaaaaaaaatcccggtcaccgcagaatctgaggaatcgtttgaaacatacactgtcccttatacagtgatatgtgtcccagattgcgggcagtcgctgtcaaggcacttatattggcttccaaaccctacgcaatgcagctctttgattctaaaccatacattactgatagcatttacgacatcttgcagttcgttaaagagcacggcctggaagcggatcgcagcagcctgcgccacctgttctccgtgatcaacttcagcgatctcgtgccatcagttacggtccagctgcaggcgaagctcctgggcatccagttggagcgtcagcttcacagttcatcgtttgtgtccaacatctgctacgcttttgaccagttcttcgccagcaaccagaaggtaagttgagtttacaatgcccacaatgtgttgattacttatggatactcattcctaagcagtccctgaagcctgttgcggtagcggatctcgttggccaggtcgcccgactgaccggcatcaacaaggtttgtgagtgcgtctttgccttggccttgacccactcctcgtacacagaactcaaacattctgccaggaacaacctaaaaggtagcctcagcgaacttatagactcttacttgggtaataaaggcaccggcccagccgacagcggtctccgggagatctccttcgatctactgcagtatttgttgtgctgccttagcgagtacgtacaaccgcaggtggaagcacagtttttgatcaagcttcgtgaggagtttccgcgccaggcggtaccgctggttctagcgccgttcctttacggctcgacgacggcgacgattgcgggagcaggtgccagcgaaacggatgcggaggccgaagcgacgactaatagcaacagctccagtttcgaagcagatgctttgaacgaggtgggaatcgaggatatttatgaccatttaagcgagataatattcaccaaccaggtgcgtaagacactcattgaaaaagacaattcgctaattgaatgttgtgttgcagggcaaaaataatattatggacacatcttggattaatctaatccttgaaatcggttatgaatttacatcgagcgttgaagagtgtaagaatcatttgtgttcccgcgagcgagaacgcgctgagctccagtccaaagatgtcgccaagatcgtgggtcttatgtgccgacggcactcctccctgctcgattgtaatgtgaatctaccgacgccggcgaacttctggcctggtcagggacagggcggtggcagcaacagcagtggctcttcgcagacacaaatcactccgcagcaacagaacccgggcagcagtaacaacaacgatggcagcgatggcaattcgtccagtgataagaaggacaagaaggagacgacggaggccacgcaaacttggaagccagatgtctttgtgcaggcgctcaaggaggtggtgcctcagctcaactggaaggacgtgtgcatgggtaatagctagataattgcttcgcaatcgccaatctataggaatatcattcttaatttttagaacttgatcatcccgagttcgtgctgaaggatcgcatcggtttggagcttttgctcaccatccttcggctggccactggctctaacatatttccacatccagaatgcatttaccgtcactgggcaaacacggaaggtcagctgtcgcttatcgcgacaatgctgaagaacccggatctcttttccttcgccgactttgtatttagccagccagcgttggatgtgcttaagacggctccggatgcggacaataaggagatctcgtcctggaagtcgcttcacctggtggaggtgctgctctccattgcggacaagggatactatacgcaggtccatgagctattcaagttcccagcgcagaactgtcccgatgtgctatttttggccttattgaacacaagtccgcctatgacgccactgcgtcaggatctgtttaaccaactgataccaacgttccttggcaaccatcccaactcgaacgtgatcttggccagcgcctgg

SEQ ID NO: 2672 - DNA, 1111 bp, DROSOPHILA
acaaaaacaaattgcgccgtaggtgaaatgaaaagcgccaagaagcaacagcgaatacgtcaaatatctctaatctccaataccagtgcacgctaaacgtgtgtgctgaacaaaaaattctggtggcctccaacaaaaacaacagcaacaagaaacatccgctgaggaattgacaactgatacgtagaattatgaacgtagagagccaactgaagacaccgccaacgcacattcgaaatctggtcaagcacgtgaacaagcgaaattttaatgagagcagcgagcaaataaatcagttcgttaaagagcacggcctggaagcggatcgcagcagcctgcgccacctgttctccgtgatcaacttcagcgatctcgtgccatcagttacggtccagctgcaggcgaagctcctgggcatccagttggagcgtcagcttcacagttcatcgtttgtgtccaacatctgctacgcttttgaccagttcttcgccagcaaccagaagtccctgaagcctgttgcggtagcggatctcgttggccaggtcgcccgactgaccggcatcaacaaggtttgtgagtgcgtctttgccttggccttgacccactcctcgtacacagaactcaaacattctgccaggaacaacctaaaaggtagcctcagcgaacttatagactcttacttgggtaataaaggcaccggcccagccgacagcggtctccgggagatctccttcgatctactgcagtatttgttgtgctgccttagcgagtacgtacaaccgcaggtggaagcacagtttttgatcaagcttcgtgaggagtttccgcgccaggcggtaccgctggttctagcgccgttcctttacggctcgacgacggcgacgattgcgggagcaggtgccagcgaaacggatgcggaggccgaagcgacgactaatagcaacagctccagtttcgaagcagatgctttgaacgaggtgggaatcgaggatatttatgaccatttaagcgagataatattcaccaaccaggtgcgtaagacactcattgaaaaagacaattcgctaattgaatgttgtgttgcagggcaaaaataatattatggacacat

SEQ ID NO: 2673 - protein, 301 aa, DROSOPHILA
MNVESQLKTPPTHIRNLVKHVNKRNFNESSEQINQFVKEHGLEADRSSLRHLFSVINFSDLVPSVTVQLQAKLLGIQLERQLHSSSFVSNICYAFDQFFASNQKSLKPVAVADLVGQVARLTGINKVCECVFALALTHSSYTELKHSARNNLKGSLSELIDSYLGNKGTGPADSGLREISFDLLQYLLCCLSEYVQPQVEAQFLIKLREEFPRQAVPLVLAPFLYGSTTATIAGAGASETDAEAEATTNSNSSSFEADALNEVGIEDIYDHLSEIIFTNQVRKTLIEKDNSLIECCVAGQK

SEQ ID NO: 2674 - DNA, 2250 bp, DROSOPHILA
gctcgaggttaaccacgatgactatctaataaatatttatacaaaatcttatttattttttttgatctaagtaaataaaacattgggaaaatcaatcttttgtcttctctctaaagatctattcagcgaatagttgtgaatgaaaagtgtattataaatcctatctatagttttaggagcgcacgtgcgaaaaatatatatacaactaataatccactaattaattttgttgtattgtatagattgaaattctaatgataatattttcgactgggaaaatccacaaaaatatgcgttatctccaaaagtagaagatagttcgcctataaaaagatctaagtctaagctgtgagcttcagtccaaaaaataacattagcaaacaaacatttgctgctttttccagtctgtaattatatattacttaatatgaactttagccatatttttttgtttgctttcatcatcctgacaattaacttgcaacactcgcatgccggttggctgacggatatagtaatctaagaccgatctaacttaacttccccttcacagaagaagaaatctgaggagacttttaaatacttaaaaaacgcagcattggaggtcattgacgtcggccaaaaagccgcggattttgctgccattgccaggggacagaaaaagtagatctctaccagatttttcttgatgagctacaattgctgcaaatatttaataaaatcaaaaagtataaaataataagaacctccaaaattctattttaatttaaccagtaaccagcttgtgcgattacatcttgataagcctacaggggaatatattttcaccatttcttattgttgtatatagtgtcttaatttgtttttattaatatctgcttgcttatattttaataatttgacattggcattgagtatctattttcattatgttaatcttcctaatgcattaataataaataagagaaatgagcgggtcgaggatcttcgagacttgatttcaacctcgagcggtggctgcaacattggcggcctgttgggcgattccgaggacctggattgaggcatccctggtatgctgaccaatgcgttcctaaaaggaaaatcgaaattaataattcattttgtttagttttgaagggaatccatacgattttttttcccagcttcctaagccaaccagcctctgagtttcccaggctgatggccaggatgagtgccacaaagacgaagatcttgttgaagttcatgacgagattgttggcttacgatcggattgaaagaaagcttaagctgttgcagtgagaactgtgcgactgatgattggacatcgaagagattgagcttatatagcgataccaacagatgctacggctgcacagacgggaattttttgctgcgggacaaaagttcaccagcagatggactcagttcggaaccgccatgaaagtgacttactcaagtgatatttcagagtaactggttggttgcaagctatgatttgattaatctattgaattatgatgatttaaactagcttaaaaataacgtaaaactacaattaaaaacaaagtaattataatgaaacattactttttaaacttttaggggaacatacactaaagtgtagtgtgtttttccctatatagtattcccgtaagacaagcctcccatttttattattattttaatttttattattttttttacagacaaaatcccatttgtcatcgttttagcatcacagatgctgtattcttttttttagaatttataagactatcagtcacttagttcgcaatggaactgaattatcagcagagttaataagtcggagattgaagcaaatgcaaataaatactccaagaaaaatgttattttatacactaatatatttattttctatagcccagaaataaaaggtaacaacaactttacacagcatcagtagaaatatgatatttcctggacataagaaatcccctcaatcaacatggcattatccatttattgtacactcatttatcccatttatccactcccagcataatgaattccataaattgtggtcacaaacaatttcaatagaaacaaaatacattcgcacagcaaaagtacgggaaataacgccaaacattcgagcgccaagcgaaatggattaatcagcaaacacgttttattggcttctccacaacagagtaaaaaaaaaaacaaatgagtattactcaatgggttgaacgctcgtagaat

SEQ ID NO: 2675 - DNA, 192 bp, DROSOPHILA
atgaacttcaacaagatcttcgtctttgtggcactcatcctggccatcagcctgggaaactcagaggctggttggcttaggaagctgggaaaaaaaatcgaacgcattggtcagcataccagggatgcctcaatccaggtcctcggaatcgcccaacaggccgccaatgttgcagccaccgctcgaggttga

SEQ ID NO: 2676 - protein, 63 aa, DROSOPHILA
MNFNKIFVFVALILAISLGNSEAGWLRKLGKKIERIGQHTRDASIQVLGIAQQAANVAATARG

SEQ ID NO: 2677 - DNA, 5423 bp, DROSOPHILA
gatttagacacacactgacaggcacaccttactgactaaatatgtatatatttatatatatgtatataattattttttttattgcgatcagttggttgtgatggtgatagatgcggtgggctcggctcctgagcttctggccaatttttgtggtggacccaggagactgaggagaacaggcaacaggatcaagccgtgggctgctccaataaggacaatgcccagatacatccggaagtagaacacctggaagatttgcgaattggagaagcccaggacaacgatgcccgcgaatttggtgagagttatgccggagaggacactacttccggttacattaagggagtggcgtgcccgctcctgggcagttccttccgcccttttaaaggaccgcactatatgcgccacaaactcaactccaatgcccacgcaaaccaccagattcaccagcgatatggcattaagattaatgctccacgcccacatcatgcccagcatattgatcaatatgcagatcaccatgaagagaacgatgaacgttgatgtgatgtccagaccagtgatcaatagagtgaccaagaatatggccaccaaggacattcctagcgaaaacattgcatctccccagatcgtcaggtactgctcgtagtagatgtagaaaacacagtacgcgaatatctccgcgtccacgttattctctttgaacatcgcatttatctccccagaaattcttcgcacttcgcgcagctgcgaatagaattcttctgaggtggtcgatgttgtggaatattgcatgaagtagctgtcctgtacagtggacattcccacatcgtcgatggtgtagatcacggccttaaaaaataaaaaatatgtaatttgattcagttatattcatttcccaagcttaagaatgtaaacaaaagttaaatctaaataaatgtattctatatctgcaatatgtctattctaaatgctattatcattgaaaaaaaaagttatttgtagttataattataaatccctaattaggatattactcacatcagcgtatgaagctctaccagccttggcacactcggcatctggcagatcgaatagaaaatagggaatgtacttgttgaaggtttcggcatcaggtcttaggccattctcagtaaatcctcgttcacagggcagacagtcttcacttttggagtctagaaataacaataataatggttacatgctttttatatcgttttgattgtgaccttataacatttttcctataataccattgcaatattattgaagtagaaaaaacgaaaggattcgatgaatactcactgctggaacaaaatccgccggtggtgacgttgtacttgcagcaatcgctgatggccagccaatcgatatagtcatccagccaggaagaggccggtcgggccaatgacgtaatttccgggtactgggcctgcgtgtaaagctggacggacagtgagttgttattgcactcgactccgccgcatatgagattctgttgcagcggttcggagtaattgagtccgggcttgaggacccagtagaccggagctcccatcgctagcaggtcgaccatgtagcggaaatacttgaccacatgggagtttttcggcatggacatctcttgatctagacccttctcaatagagggcgtcaccataagcgaaaggcaggtaatcacggtgaagatcagcagcacggacaccttaacgggcctaaaatggcagttaaaattaggatagtatgtaaatgagtgcccaggtgcgctcacttacttcgacagtaggaagggggaatagaagttcttgaacaaggtctccagcaagccgacctccttgggtctatccacgccatcgccatcctcgtcattgatcttctttccaccactctttacacagcacaacatgtccagtcgtccgtccaagtaacgcttctcatcgatggccatcagggccacaaacgcggtgatctggagcagaaagtccaggagaatggcgatggcggcatacatggcgaaggtttttacagcgggcatatccgaaatacacccgatggcaaagcaggccatttcgctacccgccgtctggagtatcgatggacccacctggccaatggcctctccgattgcctcatgtgtggtcttaaatttcgaatgatccagtctctggtacgtatgcaccattatgaagatattatccactccaacagcgagcaccaaaaacggaatcacttcgatcgccagcattgtggtggttacatcgaggtaaccccagaagcccaagctgcacaccactgatgccaagacaatgactatgcctccgatggccagcattatccgagactccctcaggaagccccgacagctgcgaatgtgacccaaagctatggccacgtacacgaacatcaccacatagctgatgaccacagtgctcacttctccctcggataattccacaatcgcatcctggatggatctctcggccatgtaggcgatgtccagtcgatcgctcttgtagtcccgcaagaagtccacgaatagcttttcccacttcatattcggctccagcttggactcgtcgttatagttccgacccaagaaggtgagcactagtccggtggccagcatgtagtccggatcctcacccaccgccaccttaggcatgccaccgactgcaattccaggctcaatgggtccgccaaatgttccaaagcaatcctccatcatggggactctgaaaacacgaaatggtaaattttggatgaaccaggtctggcaagaaaacttaaatatcttgacttaattagctttcgtcattatatttgtatttgtatttttttttttttttagaaatatgttgctcaccgaagacaatcctccaattgattgaggtagttaatggtatagttattgctatcgacataagagttctcaaaacgatccatatcgtgctggaaatatccataaaccgactggattgcgcagcgatcgactgtgggcgtttcaccagccattaagacaggggcatagcagatcttatcgaggccctcattatccgccatacccaatttcataatagagtcctgcagctcgaagacttcctttaggaagttatactcgaaggctggaccaaagttcaggacaccattggaagtttcgtgggtgaactgtaaagagtatcgaagattttgatagatttttaggagggcttttaaacaagttacacaaaactggacaattttagtgtctattattgttgcgatttcaaatgacctttttacttaaactgacattttaacagcctagtttattgctacttacatatgtctgattgacggcctttacgaacatctggttggtgcgatagaacgggccgaagtgctgatcgaaatagtccttctcgatcctcgtctgactttcctcgcctgcccatagttccacaggatccgtagtgatggtcatgtaccgaatgccgaaggacagtccggcgatggcccaggaacagagtgccagaactatgaccgggtgtttggcacaaaaggtgccccagatgcggaagccatggtagaaaaactcgccgaagagggtgggcatgcagacactaggagccgatgtcttgccaaaagcaccccagaaaataaagaacgaaagggcgcaggcgatgattaatgccagaataaaggtgactccatacaatcctgcgatcttccacagctcgtcgggacccgtaggagcatcggtcaacgggcaggactcctcgcaatcgatgcaggcgcacgcgtagctgtcctcgtaactctcgccgcacttcagggggctcagatcgaggtatatctcattggaaccctcctccgcgtcctccgaccatttgtagttgatctggaacggcacgtagtcgccggaaacgtcgcccatgaactcgtaccatctccggtagttgcaggtcttggcattgtagctgccacagcccagatccatggcaggacgtccggtttgcgtgtgctgtataccaatgcagctgttgtagatcttcgataccgtatcatctgtaagtcgatagtcaatgtatttcacatagtccactcctgcatcgtttgtgtcattgtaggcggtcaagaagagagtgtggttcttggcacaggtcatggcgcatacggtcaaggccatgtttcttgtgcaggtgggacatctggagaagacaccatctgcttgtgataatccagattccatggtctcgatttgggccgcatcgcagcacagactgagctcatcctccccactttcacctttgtactccttgtacaacattggacatcgcttggcgaatatggcttctgaagttgggctattcagaggtctcgctggattcgtgtcgcccttattcacccaatgggcacctatcatgtgactctgaccataccaaatgcatcccaactgctctgcgctttgcgaccaagctccggctataagccatatagttgcaaaaatcactttcattccgacactaaaaaaaaaaaaatataaacaaataagcctatagaactctactcttcgtagagagtgaaaacaattcgcgccggcagcacgccactaactgaatcaaacccagcccaatccactgaccattaacacattaaaaggtgggcaggctatatcggaaatcgggttgagtacccatcgattagatttcccccgtttccagtttctttcgctatttttttcccccgtccttatcgccaggtgataagcttctgaattcatttggattttgtgttggagcaggcttaatgggtatgcagagggaccttatcttcacgcggattaatatgttcacatagcgacaggtgatcgaaaaacgattagatattagaggtcaattccgaatctaagtcccttgcagctaacttctttggatggcagagtaaccagacagtagctctcttcgaaggtctttcatgcagacacaaagctttataataatacttaataatgaaatgattttacacttagatttgtaattggcttcccccaatattcgctgttgataagaaacttagtatctgtagctcgtggaatctttttgattctgtttttcagcgctattgccgttacctttattttactcaaacatttactatatttgctcttggcaaaggtgcacaataatccttaattcaaactttttcacgttaacacttcgctggaactgcacctgtgcagacacctgagcttgtatcttgggcttatcgtatggtgaattggccccagagcagctggctcagctcgacggcacaataaaatcgcgatcggctcttggctggaacacctgttcccttctttgttgataagttaaaagacctctcgagaccctcgactgccgtaaagtttatactgctcggcaact

SEQ ID NO: 2678 - DNA, 3672 bp, DROSOPHILA
atgataggtgcccattgggtgaataagggcgacacgaatccagcgagacctctgaatagcccaacttcagaagccatattcgccaagcgatgtccaatgttgtacaaggagtacaaaggtgaaagtggggaggatgagctcagtctgtgctgcgatgcggcccaaatcgagaccatggaatctggattatcacaagcagatggtgtcttctccagatgtcccacctgcacaagaaacatggccttgaccgtatgcgccatgacctgtgccaagaaccacactctcttcttgaccgcctacaatgacacaaacgatgcaggagtggactatgtgaaatacattgactatcgacttacagatgatacggtatcgaagatctacaacagctgcattggtatacagcacacgcaaaccggacgtcctgccatggatctgggctgtggcagctacaatgccaagacctgcaactaccggagatggtacgagttcatgggcgacgtttccggcgactacgtgccgttccagatcaactacaaatggtcggaggacgcggaggagggttccaatgagatatacctcgatctgagccccctgaagtgcggcgagagttacgaggacagctacgcgtgcgcctgcatcgattgcgaggagtcctgcccgttgaccgatgctcctacgggtcccgacgagctgtggaagatcgcaggattgtatggagtcacctttattctggcattaatcatcgcctgcgccctttcgttctttattttctggggtgcttttggcaagacatcggctcctagtgtctgcatgcccaccctcttcggcgagtttttctaccatggcttccgcatctggggcaccttttgtgccaaacacccggtcatagttctggcactctgttcctgggccatcgccggactgtccttcggcattcggtacatgaccatcactacggatcctgtggaactatgggcaggcgaggaaagtcagacgaggatcgagaaggactatttcgatcagcacttcggcccgttctatcgcaccaaccagatgttcgtaaaggccgtcaatcagacatatttcacccacgaaacttccaatggtgtcctgaactttggtccagccttcgagtataacttcctaaaggaagtcttcgagctgcaggactctattatgaaattgggtatggcggataatgagggcctcgataagatctgctatgcccctgtcttaatggctggtgaaacgcccacagtcgatcgctgcgcaatccagtcggtttatggatatttccagcacgatatggatcgttttgagaactcttatgtcgatagcaataactataccattaactacctcaatcaattggaggattgtcttcgagtccccatgatggaggattgctttggaacatttggcggacccattgagcctggaattgcagtcggtggcatgcctaaggtggcggtgggtgaggatccggactacatgctggccaccggactagtgctcaccttcttgggtcggaactataacgacgagtccaagctggagccgaatatgaagtgggaaaagctattcgtggacttcttgcgggactacaagagcgatcgactggacatcgcctacatggccgagagatccatccaggatgcgattgtggaattatccgagggagaagtgagcactgtggtcatcagctatgtggtgatgttcgtgtacgtggccatagctttgggtcacattcgcagctgtcggggcttcctgagggagtctcggataatgctggccatcggaggcatagtcattgtcttggcatcagtggtgtgcagcttgggcttctggggttacctcgatgtaaccaccacaatgctggcgatcgaagtgattccgtttttggtgctcgctgttggagtggataatatcttcataatggtgcatacgtaccagagactggatcattcgaaatttaagaccacacatgaggcaatcggagaggccattggccaggtgggtccatcgatactccagacggcgggtagcgaaatggcctgctttgccatcgggtgtatttcggatatgcccgctgtaaaaaccttcgccatgtatgccgccatcgccattctcctggactttctgctccagatcaccgcgtttgtggccctgatggccatcgatgagaagcgttacttggacggacgactggacatgttgtgctgtgtaaagagtggtggaaagaagatcaatgacgaggatggcgatggcgtggatagacccaaggaggtcggcttgctggagaccttgttcaagaacttctattcccccttcctactgtcgaagcccgttaaggtgtccgtgctgctgatcttcaccgtgattacctgcctttcgcttatggtgacgccctctattgagaagggtctagatcaagagatgtccatgccgaaaaactcccatgtggtcaagtatttccgctacatggtcgacctgctagcgatgggagctccggtctactgggtcctcaagcccggactcaattactccgaaccgctgcaacagaatctcatatgcggcggagtcgagtgcaataacaactcactgtccgtccagctttacacgcaggcccagtacccggaaattacgtcattggcccgaccggcctcttcctggctggatgactatatcgattggctggccatcagcgattgctgcaagtacaacgtcaccaccggcggattttgttccagcaactccaaaagtgaagactgtctgccctgtgaacgaggatttactgagaatggcctaagacctgatgccgaaaccttcaacaagtacattccctattttctattcgatctgccagatgccgagtgtgccaaggctggtagagcttcatacgctgatgccgtgatctacaccatcgacgatgtgggaatgtccactgtacaggacagctacttcatgcaatattccacaacatcgaccacctcagaagaattctattcgcagctgcgcgaagtgcgaagaatttctggggagataaatgcgatgttcaaagagaataacgtggacgcggagatattcgcgtactgtgttttctacatctactacgagcagtacctgacgatctggggagatgcaatgttttcgctaggaatgtccttggtggccatattcttggtcactctattgatcactggtctggacatcacatcaacgttcatcgttctcttcatggtgatctgcatattgatcaatatgctgggcatgatgtgggcgtggagcattaatcttaatgccatatcgctggtgaatctggtggtttgcgtgggcattggagttgagtttgtggcgcatatagtgcggtcctttaaaagggcggaaggaactgcccaggagcgggcacgccactcccttaatgtaaccggaagtagtgtcctctccggcataactctcaccaaattcgcgggcatcgttgtcctgggcttctccaattcgcaaatcttccaggtgttctacttccggatgtatctgggcattgtccttattggagcagcccacggcttgatcctgttgcctgttctcctcagtctcctgggtccaccacaaaaattggccagaagctcaggagccgagcccaccgcatctatcaccatcacaaccaactga

SEQ ID NO: 2679 - protein, 1223 aa, DROSOPHILA
MIGAHWVNKGDTNPARPLNSPTSEAIFAKRCPMLYKEYKGESGEDELSLCCDAAQIETMESGLSQADGVFSRCPTCTRNMALTVCAMTCAKNHTLFLTAYNDTNDAGVDYVKYIDYRLTDDTVSKIYNSCIGIQHTQTGRPAMDLGCGSYNAKTCNYRRWYEFMGDVSGDYVPFQINYKWSEDAEEGSNEIYLDLSPLKCGESYEDSYACACIDCEESCPLTDAPTGPDELWKIAGLYGVTFILALIIACALSFFIFWGAFGKTSAPSVCMPTLFGEFFYHGFRIWGTFCAKHPVIVLALCSWAIAGLSFGIRYMTITTDPVELWAGEESQTRIEKDYFDQHFGPFYRTNQMFVKAVNQTYFTHETSNGVLNFGPAFEYNFLKEVFELQDSIMKLGMADNEGLDKICYAPVLMAGETPTVDRCAIQSVYGYFQHDMDRFENSYVDSNNYTINYLNQLEDCLRVPMMEDCFGTFGGPIEPGIAVGGMPKVAVGEDPDYMLATGLVLTFLGRNYNDESKLEPNMKWEKLFVDFLRDYKSDRLDIAYMAERSIQDAIVELSEGEVSTVVISYVVMFVYVAIALGHIRSCRGFLRESRIMLAIGGIVIVLASVVCSLGFWGYLDVTTTMLAIEVIPFLVLAVGVDNIFIMVHTYQRLDHSKFKTTHEAIGEAIGQVGPSILQTAGSEMACFAIGCISDMPAVKTFAMYAAIAILLDFLLQITAFVALMAIDEKRYLDGRLDMLCCVKSGGKKINDEDGDGVDRPKEVGLLETLFKNFYSPFLLSKPVKVSVLLIFTVITCLSLMVTPSIEKGLDQEMSMPKNSHVVKYFRYMVDLLAMGAPVYWVLKPGLNYSEPLQQNLICGGVECNNNSLSVQLYTQAQYPEITSLARPASSWLDDYIDWLAISDCCKYNVTTGGFCSSNSKSEDCLPCERGFTENGLRPDAETFNKYIPYFLFDLPDAECAKAGRASYADAVIYTIDDVGMSTVQDSYFMQYSTTSTTSEEFYSQLREVRRISGEINAMFKENNVDAEIFAYCVFYIYYEQYLTIWGDAMFSLGMSLVAIFLVTLLITGLDITSTFIVLFMVICILINMLGMMWAWSINLNAISLVNLVVCVGIGVEFVAHIVRSFKRAEGTAQERARHSLNVTGSSVLSGITLTKFAGIVVLGFSNSQIFQVFYFRMYLGIVLIGAAHGLILLPVLLSLLGPPQKLARSSGAEPTASITITTN

SEQ ID NO: 2680 - DNA, 6186 bp, DROSOPHILA
ttaattttataaaagccactcatataaatatttaacagcatatatgtacatgccacactgttcatttcttagcgtaatgaaatagtttaataagaaatatatgaatctatataggcgagatccgcataattcatcgtcataggataaattgttttttttttttctggaatctaatttcaaagattgtagtagtttcagcgcgaaacatcgatgtttttcacaaaaatcgtggatgtaacatcgaagttttccgatgttctctaaaataaaattaatattatcatttacacttgaaatataagaaaaaagatttaaatattattaaattcatttaatttaatatgtagaataaattaaatataaaacgtataataaaattacaatataaaatcaattagatttaaactggtataactggttatattagaaaattaaaaatcagtgagagctgttcaaacagttgcattttaaggatatctttttatatatgtacattttgtatttgattttgtatttcttcggcatacctttagcgttctaggtcttcttcttgttattcgaatagcgatgatcctaatagcatccatagtctacaataaatatcgatgtttcggaaaatttaaaacgtctattatattgactgtagcgttagccccttaaaatggttaaactgggatgtcaaatattcttccaccatcaaggacagaacgctttttaatacaaaattaagcaaaaatagcaatttctctgtcaatctgtcccgattagaaataactatgcgtctaggtgatgaaaatttaaaaaaaaagctatttattatctttggcttggaaaaaagaatttgagggttagtatattagttaaataaaacgagttttttaatttagactaacattaaattttgctcaatgagcacgttaaaaagcaaaagtaaagaacgtgtatttatggagggtgtgcggtataatttttcgaaattctatggccacactgattattggaactcaaaacaacgtgcatatttccaagtaaaattcttacgatttgtgctttaaaaataaaaatgaaattctctttcaaaaataatttattatctagaacttatttgtatgcattttacgtcagtgtggattatcctttcgaacattaagttcaaacagaaataaagctattattaatttaatatgtccttctacacgagtaagacggatgtgacttccattttaaagacgttttctggcgtaaaacgaaatcaggcaaatgccgtggccatcaacaaagttcgattttccacacccaaagagaaggggctcgcagaatcagtgcgcgttgccctagaagaacgaaatttccatctggtcaaggagttcacatacttcctccgggaagcagaactcagcgtaagttaaattaacataattgttggttattctttacgtttgatttctttttttaaggatgatgaggttgtaataatcataaaagatgctaaacgaattgttcataatttgactccagaatttgtaaccgttgtcgaggcgttactgtcccttaactggaagaaaagaagttcagagataatcgaagcttatactgaattttgtatcgaactaatggtgacccataatagatatttaccgattggagtctctaaactaattgtccactggattcctggagatatggatgaatccgattgggtccacggatgcccttcggagcacgtgcgaaatgagttgaaacccatccataaagtactggatcgcatcttaactgccgtgccaatggctttcgatattatcatagatgccatatccgccaaattcccctatttcaaaaagccgtaccatgtgacggcagggtatctgtataacgtgctttggttattagaatacaagcctattttcgaagaacttgtttttcaactagttttacaaaagtaagtactttactaatttattaatttatataaagcttgctgatttataccttacactcagtccttgttgtttttaagtcaaaatgatttaaactcttcagctcaaagaagatgggttcggaaaaatcgaatttttgaaatttaaaagctggaatcgtttgcccattttttgcccatgtttgcccaccaataagtttttttttttgcccacgtccaggttttaagatataaattttcgaaagagtttaaaaattttcaaaaatcaaaaattttacttttttcaaacattttttttaaatcgcaataacatcgtttgtccacgtttgcccattctttggaattttgaaaaaatgtatactttagaaaatataagtttacctcggtctaaacgtttttcgccacgattttttcgccgtggctctatagatggctccaggctctctcgaatttttgttagagagcgagagagctgagagcgctacagcgaatcacacataaagtgatagcagacaactgtatgtgtgcacacgtatgctcatgcattgtaaatttgacaaaatatgcccttcaccttcaaagttctttgactttaaatctatattatttttgatcaattagtaccatgcgaaaaattcttgttttgcattgccttaacgttattattatttgatagaatagaatagaaatagccaaatctatgtacatattatcacaaaaataaatttcaagaatatttgtcattagagtattcatcttgaggcgtgtgaaaaattaataaggcaatgattgttgagtgcttgtgtccgcacttcgtgcctcaagatatgaacaaagcaaagacactagaataattctagttatcatatttttatgaaatttatgaaattacagtagttataataatttctattgtacttcctattaataagtatatttattaagtcatttgacttaaaaggatgtaacattaacattaaaagtgtttaaaaaaaaatatttcgcttttaaaaaattgtcagatgagagacaaattagaattaaacataacaaattttaacaaacaaatttaaaaaactttaaaattataatagtcagggcgcgaatttttaaaattttttttattttatcatattgctaggaaattagcaaaaactaccctaatatgtacaatgtaaattcgtttcttcgatcagaattgatttcggaacgaaaatagtcttctagcacaacacgcacacatacgcgttctcgtctcttgtttttactcacacaagtaaccaaattatatttttagatttcttacgctctcagcgggagtgagcgaaaagagagtaattttggccgtcaccaaaaaagtggctgcatagtgccaaaccaatgtatggccgttacgcatcttgttattctagtgtctttggtcaaacgctttattctctgagtagaccgaggtaaacttgaatgtcttatattttctaaagtatacattttttcaaaattcgatagggtgggcaaacgatgttattgcgataaaaaattttttttaataaaagcgaaatttttgattttcgaacttttttaaaaatttatatctaaaaaaatggacgtgggcaaaaaaaaaaactaattggtgggcaatcatgggcaaacgattgaagcctttaaatatctaaaattcaatttttccgaatccaaaattttgcacggattgtaatttcctggaatttttcctagacctcaattacgaaataaatatgatgtaatcgaatttctttctgttatatctctgtgagcttccgaaacactaacgaattgaattacttcacatgaagtgatttttgtatctgattcgtgaatgttttatattcattattaacttttcaagaagcattgataatctgcggttgatgcccgacatatacgaagactaataataaataagaataaagcggagaaagtgaaaaatgtagaaatttaaaagaaatacgtttttcgtcacaaatgttgttagataaatttttgtttgtgcgctttgttggatcagaatgtaaacttattatagacttgactcattaataattgttttcaggtagaacctcagaatttaatttcttgagatgttaaacagagatcctacttttcgacttcggaaaatcctagcttatttactaaatttttacatttctattgtgaataacttcaatgaatatatattttaaaccaaaacaggaaccagaaaagtttgattagcaaaggaaaggattttctctgttgtttttatttaaaaatgctatggacagccatgatagaataatatgtgtgaaatcctttttcgtttttcaggcttttattattagatgttaatgctccaaaagatgaaattgaattagaaatgaatgatgaggaggaaaaggtggaagcggacaccttgtttgaaatcgacgatgtatgcgccgaaaatgtacccaaatctgaaaaatctgtgagtcatcctgttggcaaaaccttggatgtatgcctattcttgctttataagttttttgatggcaaatgtcgccttaatgaaaatagtagcgaagaacagcgaaggactgccaaccgattgtttaagatgttactttatttgttcgacgaggtgttattgcccagccacaacacgcatcatgtgcaattcatcctattttatgcaactagtctgcggtcggtatattccgaagcttttcttgattccttatggacgaaagtccaaaatccgaatgtatccgctgtaattcgacatgctgcggtgggatacatggctagctttttatctcgcgcacgatttttgccgcttaggtaagaatgtgtaaaataattgctaggcaggactactaaactaaaattaattttttttagcactgttactttctacctaaaagagttgacaaggtgggctcatacatacatagatgactccgatgcatataagcagaactgctctctgaaagccaatttggttttctattctgtttgccaagctgtgttttatttaattgcatttcgcgcaaaagatttgacggccagttcaaaaggtaagtttaaatattttttcgtttttaaccccttgtaggtttctgtcgacggtctcctgcacaccgacacggtaaacgatcatatggcgttgacaggcccattcgcatttctattcgcatttgaaattttccaagccaaaataaatagttgcagatcggattccaatggggtttattaggccctttatatttaaaatttaaaaatggtgaccaagcacccctttttttctttctttctggatttgatttgcatttgtgtttgtttgtgagatagtagttgtaagagaattggaggcgattagaaatataatgacagattggtcaagtttgcgagatgccgtttttgaggagaaagctgttggataaattggttgcgtttttaactacgatctttttgtttgtcataaaaattaaaacgtatttaatgatacggggacataatttccattctaggtgttggtggataagggagtgggtacttctgtcaaacgctttgaaaaagtccaatgatattatagagaggtggcactttggagatatataatataaaatatatattatattatattattatactatataatataaaaccaccacaaacgtaaagctatagctttattgctaaagggggcaatagagctaggaaacattggaataaggattggaaagtggtcgctactattaatattgtcgatcacttcccatttagttttaggggctaattcggcagagacaagcgaaagatctgtatgcgtgaacgtgttgtgagttttgggtaggtgatttgtcgtttaggagaatgtgatggtgtttccctaaaatgagtttgggaaagtacggtttggatgttgttaatgtggaattaatggttaagtgagatatatgtaggaagatattaaggtaaagttagattttgaattgatcgaaattgatgttgtgtgtgggagatagatttttgcacttcgaaagctgtgccacggaatgaattcgaacagaagctgcattaaattttaatgtttatggggatagggagagaagatgtgtgggacatgtgggtttcctaagggctacgatgtgtggtctaaacatcttaattagtatttggaattgggagtaactgtttctataaaatttaatgttccattgaatgatatttagcattaaaatagtttttatgct

SEQ ID NO: 2681 - DNA, 1465 bp, DROSOPHILA
gaactcaaaacaacgtgcatatttccaagtaaaattcttacgatttgtgctttaaaaataaaaatgaaattctctttcaaaaataatttattatctagaacttatttgtatgcattttacgtcagtgtggattatcctttcgaacattaagttcaaacagaaataaagctattattaatttaatatgtccttctacacgagtaagacggatgtgacttccattttaaagacgttttctggcgtaaaacgaaatcaggcaaatgccgtggccatcaacaaagttcgattttccacacccaaagagaaggggctcgcagaatcagtgcgcgttgccctagaagaacgaaatttccatctggtcaaggagttcacatacttcctccgggaagcagaactcagcgatgatgaggttgtaataatcataaaagatgctaaacgaattgttcataatttgactccagaatttgtaaccgttgtcgaggcgttactgtcccttaactggaagaaaagaagttcagagataatcgaagcttatactgaattttgtatcgaactaatggtgacccataatagatatttaccgattggagtctctaaactaattgtccactggattcctggagatatggatgaatccgattgggtccacggatgcccttcggagcacgtgcgaaatgagttgaaacccatccataaagtactggatcgcatcttaactgccgtgccaatggctttcgatattatcatagatgccatatccgccaaattcccctatttcaaaaagccgtaccatgtgacggcagggtatctgtataacgtgctttggttattagaatacaagcctattttcgaagaacttgtttttcaactagttttacaaaagcttttattattagatgttaatgctccaaaagatgaaattgaattagaaatgaatgatgaggaggaaaaggtggaagcggacaccttgtttgaaatcgacgatgtatgcgccgaaaatgtacccaaatctgaaaaatctgtgagtcatcctgttggcaaaaccttggatgtatgcctattcttgctttataagttttttgatggcaaatgtcgccttaatgaaaatagtagcgaagaacagcgaaggactgccaaccgattgtttaagatgttactttatttgttcgacgaggtgttattgcccagccacaacacgcatcatgtgcaattcatcctattttatgcaactagtctgcggtcggtatattccgaagcttttcttgattccttatggacgaaagtccaaaatccgaatgtatccgctgtaattcgacatgctgcggtttctgtcgacggtctcctgcacaccgacacggtaaacgatcatatggcgttgacaggcccattcgcatttctattcgcatttgaaattttccaagccaaaataaatagttgcagatcggattccaatggggtttattag

SEQ ID NO: 2682 - protein, 426 aa, DROSOPHILA
MSFYTSKTDVTSILKTFSGVKRNQANAVAINKVRFSTPKEKGLAESVRVALEERNFHLVKEFTYFLREAELSDDEVVIIIKDAKRIVHNLTPEFVTVVEALLSLNWKKRSSEIIEAYTEFCIELMVTHNRYLPIGVSKLIVHWIPGDMDESDWVHGCPSEHVRNELKPIHKVLDRILTAVPMAFDIIIDAISAKFPYFKKPYHVTAGYLYNVLWLLEYKPIFEELVFQLVLQKLLLLDVNAPKDEIELEMNDEEEKVEADTLFEIDDVCAENVPKSEKSVSHPVGKTLDVCLFLLYKFFDGKCRLNENSSEEQRRTANRLFKMLLYLFDEVLLPSHNTHHVQFILFYATSLRSVYSEAFLDSLWTKVQNPNVSAVIRHAAVSVDGLLHTDTVNDHMALTGPFAFLFAFEIFQAKINSCRSDSNGVY

SEQ ID NO: 2683 - DNA, 8477 bp, DROSOPHILA
agcgatggcaattcgtccagtgataagaaggacaagaaggagacgacggaggccacgcaaacttggaagccagatgtctttgtgcaggcgctcaaggaggtggtgcctcagctcaactggaaggacgtgtgcatgggtaatagctagataattgcttcgcaatcgccaatctataggaatatcattcttaatttttagaacttgatcatcccgagttcgtgctgaaggatcgcatcggtttggagcttttgctcaccatccttcggctggccactggctctaacatatttccacatccagaatgcatttaccgtcactgggcaaacacggaaggtcagctgtcgcttatcgcgacaatgctgaagaacccggatctcttttccttcgccgactttgtatttagccagccagcgttggatgtgcttaagacggctccggatgcggacaataaggagatctcgtcctggaagtcgcttcacctggtggaggtgctgctctccattgcggacaagggatactatacgcaggtccatgagctattcaagttcccagcgcagaactgtcccgatgtgctatttttggccttattgaacacaagtccgcctatgacgccactgcgtcaggatctgtttaaccaactgataccaacgttccttggcaaccatcccaactcgaacgtgatcttggccagcgcctggagctcgaacaacttccaacttcgttccaatatcatgaatgctatgtccgagtggtatctccgaggcaatgagttcgatcaggtgaaactgtcgcgcatcctggatcttgcccaggatttaaaagcgctatcagcgctgctcaacgcccgttcatttttattcattatcgacctggcttgccttgcctctcggcgcgagtacctgaagctggaaaagtggcttaccgataaaattcgcgaacatggagagccttttatgcaggctataatcaaggttctgcaccgccgctgcccgcaggttatcaacgcaaaagtgccagaggatcagctgcctcccaagcaggcgcagcttttgcccgagacagttaccaccatgatcaactgtctgcaaacgtgcatcaataactgcatgcagccggagatggtcgaagtcatcatgcaaatgaccgcgaacgtggcgattatggctaacaaggcgcgtgcccaacagcagcagcagccaggattggttccgccgcctccaccaacaattctgcgcggccatcgtggtatggatctgcctggaggcatagtccctccgccaccgcagcaaccgttctccggaaacctcaacgcgcagatgtttggaccaggaatggatccgctaacgaatatgtccaacaacttagccggcctcaacctcagcggcccgaacggagcatttaattttggaaacatgctaagtaagtggcattcataggcaatgagtgcataatctatcacagatgcctcttaatcctatctaacgaaattctacgtgcaatttcagcttctccatcgcgtctgatgactccgggagccaatccctatccgctgaacctcatgcagatgccgcaggctccgccaccacccaacgtaggaaacctaggccgcatgctgccagggggtccacaacagcagactccaacgccgactccaacggcccccaatccaaacaaccctgtgatggccgatctccagatacctgtgtcaaaggaagttgaagacgaggtcaactcatactttcagcgcatctacaaccaccagccgaatccaacgctgtccatcgatgaagtgctggacattttgcaaagatttaaagagtcaagtaaccggcgcgagcaggaagtctttttgtgcatgctgcgcaatctgttcgaggaatatcgctttttctgtcaatacccagagaaagagctacagattactgcgcagctatttggtggcattattgatcgtaacctggtgcccacttttgttgcactgggcctttctctgcgctgtgtcttggatgccctccgcaagcccgatggatctaagctttactatttcggtgtgacggcactggacagattcagaactcgattgcacacctacaacaaatactgcgagcatatccgctccattcctcacttctctgacttcccgccgcaccttattcagtatgtggaatacggaatgcacggccaggagccgccgccgcagaagttgattggactcagcaatacgattccttcggcgatatctagcggaccaggaacggaaccaatttacaggaatagctccatgttaggtaattatgattagtatacaaaacaagtcgattaatataattaagtaagaacattggatactaaggaaagcgctatattataaagaatcaatttccgcagagaataacgttgatttccactcattcctctgtaggtaatatgcccgctgccaccccgggatcgggaccgaaatcaaacgctgctgtatcgcatgccacgagaatgaagtccatcgccaatgccaccaatatcgacacacttttggtggccaaccaggaagagaaagtgactgtgccaccagagcctgtgcaggacaaaactgcctttattttcaacaacttgagccagctgaacataccgcagaagtgcgatgagataaaggagattatgaccaaggagtattggccgtggctagcgcaatatctggtcctcaaacgcgcatcaatggagttcaacttccacacactatattacaactttttggatgcccttaaaaacggcgagatcaaccgattcgtaaccaaagagaccctacgcaacatcaaggtactcttgcgctccgataagggagttattaatttctccgatcgaagtctgttgaagaacctcggacactggttgggcatgatgaccttaggtcgcaatcgccccatcctgcagttggatctggatcttaaatcccttttggctgaggcttaccacaagggccagcaggaactgctttttgtggttcctttcgtagccaagatccttgagtcatccgccaagtctcgcatcttccgatcgcccaatccatggacaatgggtatcatgtacgtgcttgctgagcttcaccaggagccagaccttaagctgaacctgaagtttgaaatcgaagtactctgtaaaacacttaatctggagttggccaagttgcgacaagtgatctacctgaaggatcccaatcgaactcaccggattgaagagcagatgtcgcaaccaaaaccgaaacaacttgagccagtggcttctgcgccagctctaccgcgtgaacagcaatccccggcacaacctccgccaccaccacaacagcagcaaccaccgcagcagcaggtacctccaccgccatcctctgcggacgtggacgctcaaaatgcggccgctatgatgatggcagcgggcggagctaatagtactcctggatcggtatcttcgcccaatctacccaccgattccagccaggtggcactaccgccaccagagccgcgctattcatacgtggacgtaaacgtgagcaacttccagcttattggtcagcagttggtactgccacccaatactccgttcctgcacgccaatcccggaatcaaacacatggtcgtcaacgccgtggagcgcacgataaccgactggttgcagcctattgtggaccgaagcatccgcattgcctgtgccaccaccgagcagatcatccgcaaggacttcgccctggatgctgacgagaaccgaatgcgcactgccgctcatcagatggtacgaaaccttgccgccggcatggccatgattaccggtaaggatgagatagcgcgtgctattagccagaatctgcacaaggccttgctgtcgggtctaaatgggatgcccagcatggctgagatccaagctgctgctatgcagttagccagcgaaaatgttgagctagtttgcgctttcattcagaaaacatctgctgaaaaggcagccgcagagatcgataggcgtctaagcaccgatttcgagaccagaaaaattgctcgtgaagagggcaaccgctttgtggacgcccagatcctcacctatcaacaggagcgtcttccagaagcagtgcgcatcaaggtgggcgcggctccagctacactttatgctgtgtactcggagttcgctagaagcatacctggcttccagcagatgagcgatcgcgatattgccctgtttgtgcccaagccgacggatttgtctcagccaaatgtgtttgctaatgatgatagcatggtatacggggaactggctagcaaaatggaggccttcatgaacacggcaatcggagtgccgacactccagatccaggctagcaagatgcacatgctactcaacgccctgatagcgacgcgtcgactgcgtgaccaagagtctgcctttaatctgctgacccgcgcggtcgagggtttgaccgaaggattggtcaatatgcatgaaaacatggagcaaatgaagatgtaccaaaacatccatctccgtatccttggcttgctgaacaatagtttcggtgctccaaacacagagcgagcggtaacaaagtgtttcttcgatatccgagaggaggtgcgatataacgtggaggcagctcgcgctttgattacgtcgcactttgtcaatctgaatcagtttgacggaatgctacgcgactgcatggacaacggaaacaattatgtggccatatcgttcggtatcgcactgctggagcgcctcatcatggacgatcgagtgattaatattgtttcggacaacgaattcatggcaactgttgagctgctaggtaggctcactcagcatcgccatcggtatccagaatgcattgtgaatgctattgatacgctctggagcggaaactttaactcgagcagcgactacagcccgttcaacggcaatgatcgttacttgtcgggagcctcccattacatccactccggcatgcatcacgtaagggtaaggacgataatatcatttgaattttttaactaacgaaaatggttttttttttagtcatgcgatacagatgatccgccgggcttacaagagaagacggagtttctgcttaaggattgggttgcactgtacacgcaacagaaccagcagtcaacgcgcgatgcacgcaacttcggtgcatttgttcagaagatgaacacatatggtatcctgaaaacggacgacttgatcacccgttttttccgccaggccacacacatttgcacggatgtggtgtacagaatgttcgccgagccgagtttaccaatcaaccaggccaaaaacaagatattccagtggatcgatgcgttcgtccatctgattgcaatgctcgtgcgacactcaggcgaagcaggtaatccaaccaccaagatcaacctgttaaacaaggtgctgggcattgtgctgggaacgctgattaaggaccatgagatgcgtggcgttagcttccagcaggttggctaccatcgcttcttcatgatgctgttcatggagctgtgcacggccgatgtgattctcgagtccctgatgcacagtattgtgtcggccttcgcctacacatatcacttgttgaatcccagcgtggctccgggattctgctttgcttggttggagctcatttcgcatcgcgtcttcctgggccgcatcctggtccaaattcccgggcaaaagggctggccactttacgctcagttgctgcaggacctttttaaatatcttgcgcccttcttacgcaacactgagctcggcaaaccagtccagcttttgtacaaggggacgctacgtgttctgctcgttctgcttcacgacttcccggagttcttgtgcgactatcattttgggttctgtgacaccatcccgcccaattgcgtccagatgcgtaacatcatcctgtcggcgtttccgcgcaacatgcgcttgcccgatcccttcacgcccaacctaaaagtggacatgctgtcggacagtagtaatgcgcctaaggtgctcagtagctacattatgaacatccagcccgcgaactttaagaaggatttggactcgtacctcaaggcccgggcgccagttacttttctatcggaattacgtggtcacttgcaggtgacaagcgagccaggaactcgttacaacatggcactgatgaatgctctggtcatgtatgtgggaactcaggcgattgctttgatcaggtgagttcgaaaggatgatctactctgcgaaatggtttcctaatcgtatttaacatttttagaaacaaaaactttgtgcccaacacctcgaacatagcacacagcgcccacatggatatcttccagaatcttgctgttgacttggatacggagggtcgctatctgttcttgaatgcgattgcgaaccagttgcgctatcccaacagccacacgcactacttcagctgtgcggtgctgcatctgtttgccgaggccaactcggaggcaattcaggagcagatcactcgcgtacttctggaacgattgatcgtgaaccgcccgcatccttggggactgttgatcacttttattgagctgatcaaaaatcccatctacaagttctgggaccatgactttgtgcactgtgcgccagagatcaccaagtgagttggccttattagatagatgaccattctgttaatcccattgattcactataaaatttccgaaaggcttattatacgtagtttgtagtagatttgcattgcacgcaaataacaaacccggctttatccatttctaacccaaatttttaactaacttacattttaccacaacttctgttttcagatatttcggtgaatgtttgattgtagttaagcggtttgagaattcaattggcattcagtgtgcatcgtagcaagaaatcaagttcaggtcccaaagtgaatcaaccagtcccattcctctcattttgcatgttacctttctttgtattcgtttgtaaactcctattttatacaatttagcattaatctgtgaaaatacaactttttagtaagcaaatcactactggggtgctttccacaaagcgaaacgacttcatattaaaccgcaacgtgttttccatattccgtaggctctttgaatcggtggcccgttcctgtctggccaagtcgaacgtcacccagcagttgaacatgcccgtcgtcgatggcgagggccaggaggtagccaccatcaactgagaaaacgccaccgtccgacgcttctgcctggaggtctgcgcgagacccagacgcaggcagtagctgcctgggcagcacaccaccaccaccacccacaacaccacacagtacagcgttcattgaattctactaaccattactgtgtttagttcttagcaaatcgttttaaggagacagtgaaatcagcaacagcacacacaaacattaacaaaacaaccgcaacaataagcatagggaagggaaacagcaggccaagccaattggtgtgctgtgccggaaaccgaaattcgacatgtatttaaacgaacggaagcgatattttaaatgcctcccccttcgtcggggaatgttacaaatttttaattgagttgtattataaatggtagatgaaggcgttaaagtgttgatgacagatactgtgtaaagaaatcaatcaaacagataaaaacagaaaagcgaaaaacaaaagaaaaaaaaaaacgaaaatcgaaaaagggaaaaatattttctacaaaaaaaatggcaaaatgtacaatgaaaatgcgaaaaaactaacaaatgcgaacggtcacatatgaaatttgtgtaaacatattgaaaagcgaaggaaccaggtagcagagaccgagcaaacctactctcaacgccgctgagagcgatatttatagacggtgagcatgaggatgaggagaggaggagaaggagaagccgagcagaatgttgaaaagatcctcaagtcaataataattcgagttgtcaaagtagcttacctcccagccaactcaatgatgtatcattttgcaaattcgtaacctctaagagtccctcagttagtctactcgtatacgttaactttttaaaatgtttccgcacaacaacaagagcagccactgcaacattaaccagaaccaaccaatgtttgatcttcttatacgcaatataagcgatacgttttgttttaacctacattattttatgaactgattattaactgaaatggaaatacattgaacacatctagcttgttaaacgtataatcgatcctccatgtaaagataaacgctgttagaatcagatagatgagtgaatatatagagagagagagagagagagagagagagagagctcggcgacgagtcgaagccattatctatgtagatcagatctttatataaatataaaaaatatgtatttcttaatataaatacgtaaacgtaaaacgagttcgattgatgcgcgtatgcgcggt

SEQ ID NO: 2684 - DNA, 5656 bp, DROSOPHILA
caacgcaaaagtgccagaggatcagctgcctcccaagcaggcgcagcttttgcccgagacagttaccaccatgatcaactgtctgcaaacgtgcatcaataactgcatgcagccggagatggtcgaagtcatcatgcaaatgaccgcgaacgtggcgattatggctaacaaggcgcgtgcccaacagcagcagcagccaggattggttccgccgcctccaccaacaattctgcgcggccatcgtggtatggatctgcctggaggcatagtccctccgccaccgcagcaaccgttctccggaaacctcaacgcgcagatgtttggaccaggaatggatccgctaacgaatatgtccaacaacttagccggcctcaacctcagcggcccgaacggagcatttaattttggaaacatgctaacttctccatcgcgtctgatgactccgggagccaatccctatccgctgaacctcatgcagatgccgcaggctccgccaccacccaacgtaggaaacctaggccgcatgctgccagggggtccacaacagcagactccaacgccgactccaacggcccccaatccaaacaaccctgtgatggccgatctccagatacctgtgtcaaaggaagttgaagacgaggtcaactcatactttcagcgcatctacaaccaccagccgaatccaacgctgtccatcgatgaagtgctggacattttgcaaagatttaaagagtcaagtaaccggcgcgagcaggaagtctttttgtgcatgctgcgcaatctgttcgaggaatatcgctttttctgtcaatacccagagaaagagctacagattactgcgcagctatttggtggcattattgatcgtaacctggtgcccacttttgttgcactgggcctttctctgcgctgtgtcttggatgccctccgcaagcccgatggatctaagctttactatttcggtgtgacggcactggacagattcagaactcgattgcacacctacaacaaatactgcgagcatatccgctccattcctcacttctctgacttcccgccgcaccttattcagtatgtggaatacggaatgcacggccaggagccgccgccgcagaagttgattggactcagcaatacgattccttcggcgatatctagcggaccaggaacggaaccaatttacaggaatagctccatgttaggtaatatgcccgctgccaccccgggatcgggaccgaaatcaaacgctgctgtatcgcatgccacgagaatgaagtccatcgccaatgccaccaatatcgacacacttttggtggccaaccaggaagagaaagtgactgtgccaccagagcctgtgcaggacaaaactgcctttattttcaacaacttgagccagctgaacataccgcagaagtgcgatgagataaaggagattatgaccaaggagtattggccgtggctagcgcaatatctggtcctcaaacgcgcatcaatggagttcaacttccacacactatattacaactttttggatgcccttaaaaacggcgagatcaaccgattcgtaaccaaagagaccctacgcaacatcaaggtactcttgcgctccgataagggagttattaatttctccgatcgaagtctgttgaagaacctcggacactggttgggcatgatgaccttaggtcgcaatcgccccatcctgcagttggatctggatcttaaatcccttttggctgaggcttaccacaagggccagcaggaactgctttttgtggttcctttcgtagccaagatccttgagtcatccgccaagtctcgcatcttccgatcgcccaatccatggacaatgggtatcatgtacgtgcttgctgagcttcaccaggagccagaccttaagctgaacctgaagtttgaaatcgaagtactctgtaaaacacttaatctggagttggccaagttgcgacaagtgatctacctgaaggatcccaatcgaactcaccggattgaagagcagatgtcgcaaccaaaaccgaaacaacttgagccagtggcttctgcgccagctctaccgcgtgaacagcaatccccggcacaacctccgccaccaccacaacagcagcaaccaccgcagcagcaggtacctccaccgccatcctctgcggacgtggacgctcaaaatgcggccgctatgatgatggcagcgggcggagctaatagtactcctggatcggtatcttcgcccaatctacccaccgattccagccaggtggcactaccgccaccagagccgcgctattcatacgtggacgtaaacgtgagcaacttccagcttattggtcagcagttggtactgccacccaatactccgttcctgcacgccaatcccggaatcaaacacatggtcgtcaacgccgtggagcgcacgataaccgactggttgcagcctattgtggaccgaagcatccgcattgcctgtgccaccaccgagcagatcatccgcaaggacttcgccctggatgctgacgagaaccgaatgcgcactgccgctcatcagatggtacgaaaccttgccgccggcatggccatgattaccggtaaggatgagatagcgcgtgctattagccagaatctgcacaaggccttgctgtcgggtctaaatgggatgcccagcatggctgagatccaagctgctgctatgcagttagccagcgaaaatgttgagctagtttgcgctttcattcagaaaacatctgctgaaaaggcagccgcagagatcgataggcgtctaagcaccgatttcgagaccagaaaaattgctcgtgaagagggcaaccgctttgtggacgcccagatcctcacctatcaacaggagcgtcttccagaagcagtgcgcatcaaggtgggcgcggctccagctacactttatgctgtgtactcggagttcgctagaagcatacctggcttccagcagatgagcgatcgcgatattgccctgtttgtgcccaagccgacggatttgtctcagccaaatgtgtttgctaatgatgatagcatggtatacggggaactggctagcaaaatggaggccttcatgaacacggcaatcggagtgccgacactccagatccaggctagcaagatgcacatgctactcaacgccctgatagcgacgcgtcgactgcgtgaccaagagtctgcctttaatctgctgacccgcgcggtcgagggtttgaccgaaggattggtcaatatgcatgaaaacatggagcaaatgaagatgtaccaaaacatccatctccgtatccttggcttgctgaacaatagtttcggtgctccaaacacagagcgagcggtaacaaagtgtttcttcgatatccgagaggaggtgcgatataacgtggaggcagctcgcgctttgattacgtcgcactttgtcaatctgaatcagtttgacggaatgctacgcgactgcatggacaacggaaacaattatgtggccatatcgttcggtatcgcactgctggagcgcctcatcatggacgatcgagtgattaatattgtttcggacaacgaattcatggcaactgttgagctgctaggtaggctcactcagcatcgccatcggtatccagaatgcattgtgaatgctattgatacgctctggagcggaaactttaactcgagcagcgactacagcccgttcaacggcaatgatcgttacttgtcgggagcctcccattacatccactccggcatgcatcactcatgcgatacagatgatccgccgggcttacaagagaagacggagtttctgcttaaggattgggttgcactgtacacgcaacagaaccagcagtcaacgcgcgatgcacgcaacttcggtgcatttgttcagaagatgaacacatatggtatcctgaaaacggacgacttgatcacccgttttttccgccaggccacacacatttgcacggatgtggtgtacagaatgttcgccgagccgagtttaccaatcaaccaggccaaaaacaagatattccagtggatcgatgcgttcgtccatctgattgcaatgctcgtgcgacactcaggcgaagcaggtaatccaaccaccaagatcaacctgttaaacaaggtgctgggcattgtgctgggaacgctgattaaggaccatgagatgcgtggcgttagcttccagcaggttggctaccatcgcttcttcatgatgctgttcatggagctgtgcacggccgatgtgattctcgagtccctgatgcacagtattgtgtcggccttcgcctacacatatcacttgttgaatcccagcgtggctccgggattctgctttgcttggttggagctcatttcgcatcgcgtcttcctgggccgcatcctggtccaaattcccgggcaaaagggctggccactttacgctcagttgctgcaggacctttttaaatatcttgcgcccttcttacgcaacactgagctcggcaaaccagtccagcttttgtacaaggggacgctacgtgttctgctcgttctgcttcacgacttcccggagttcttgtgcgactatcattttgggttctgtgacaccatcccgcccaattgcgtccagatgcgtaacatcatcctgtcggcgtttccgcgcaacatgcgcttgcccgatcccttcacgcccaacctaaaagtggacatgctgtcggacagtagtaatgcgcctaaggtgctcagtagctacattatgaacatccagcccgcgaactttaagaaggatttggactcgtacctcaaggcccgggcgccagttacttttctatcggaattacgtggtcacttgcaggtgacaagcgagccaggaactcgttacaacatggcactgatgaatgctctggtcatgtatgtgggaactcaggcgattgctttgatcagaaacaaaaactttgtgcccaacacctcgaacatagcacacagcgcccacatggatatcttccagaatcttgctgttgacttggatacggagggtcgctatctgttcttgaatgcgattgcgaaccagttgcgctatcccaacagccacacgcactacttcagctgtgcggtgctgcatctgtttgccgaggccaactcggaggcaattcaggagcagatcactcgcgtacttctggaacgattgatcgtgaaccgcccgcatccttggggactgttgatcacttttattgagctgatcaaaaatcccatctacaagttctgggaccatgactttgtgcactgtgcgccagagatcaccaagctctttgaatcggtggcccgttcctgtctggccaagtcgaacgtcacccagcagttgaacatgcccgtcgtcgatggcgagggccaggaggtagccaccatcaactgagaaaacgccaccgtccgacgcttctgcctggaggtctgcgcgagacccagacgcaggcagtagctgcctgggcagcacaccaccaccaccacccacaacaccacacagtacagcgttcattgaattctactaaccattactgtgtttagttcttagcaaatcgttttaaggagacagtgaaatcagcaacagcacacacaaacattaacaaaacaaccgcaacaataagcatagggaagggaaacagca

SEQ ID NO: 2685 - protein, 1766 aa, DROSOPHILA
MQPEMVEVIMQMTANVAIMANKARAQQQQQPGLVPPPPPTILRGHRGMDLPGGIVPPPPQQPFSGNLNAQMFGPGMDPLTNMSNNLAGLNLSGPNGAFNFGNMLTSPSRLMTPGANPYPLNLMQMPQAPPPPNVGNLGRMLPGGPQQQTPTPTPTAPNPNNPVMADLQIPVSKEVEDEVNSYFQRIYNHQPNPTLSIDEVLDILQRFKESSNRREQEVFLCMLRNLFEEYRFFCQYPEKELQITAQLFGGIIDRNLVPTFVALGLSLRCVLDALRKPDGSKLYYFGVTALDRFRTRLHTYNKYCEHIRSIPHFSDFPPHLIQYVEYGMHGQEPPPQKLIGLSNTIPSAISSGPGTEPIYRNSSMLGNMPAATPGSGPKSNAAVSHATRMKSIANATNIDTLLVANQEEKVTVPPEPVQDKTAFIFNNLSQLNIPQKCDEIKEIMTKEYWPWLAQYLVLKRASMEFNFHTLYYNFLDALKNGEINRFVTKETLRNIKVLLRSDKGVINFSDRSLLKNLGHWLGMMTLGRNRPILQLDLDLKSLLAEAYHKGQQELLFVVPFVAKILESSAKSRIFRSPNPWTMGIMYVLAELHQEPDLKLNLKFEIEVLCKTLNLELAKLRQVIYLKDPNRTHRIEEQMSQPKPKQLEPVASAPALPREQQSPAQPPPPPQQQQPPQQQVPPPPSSADVDAQNAAAMMMAAGGANSTPGSVSSPNLPTDSSQVALPPPEPRYSYVDVNVSNFQLIGQQLVLPPNTPFLHANPGIKHMVVNAVERTITDWLQPIVDRSIRIACATTEQIIRKDFALDADENRMRTAAHQMVRNLAAGMAMITGKDEIARAISQNLHKALLSGLNGMPSMAEIQAAAMQLASENVELVCAFIQKTSAEKAAAEIDRRLSTDFETRKIAREEGNRFVDAQILTYQQERLPEAVRIKVGAAPATLYAVYSEFARSIPGFQQMSDRDIALFVPKPTDLSQPNVFANDDSMVYGELASKMEAFMNTAIGVPTLQIQASKMHMLLNALIATRRLRDQESAFNLLTRAVEGLTEGLVNMHENMEQMKMYQNIHLRILGLLNNSFGAPNTERAVTKCFFDIREEVRYNVEAARALITSHFVNLNQFDGMLRDCMDNGNNYVAISFGIALLERLIMDDRVINIVSDNEFMATVELLGRLTQHRHRYPECIVNAIDTLWSGNFNSSSDYSPFNGNDRYLSGASHYIHSGMHHSCDTDDPPGLQEKTEFLLKDWVALYTQQNQQSTRDARNFGAFVQKMNTYGILKTDDLITRFFRQATHICTDVVYRMFAEPSLPINQAKNKIFQWIDAFVHLIAMLVRHSGEAGNPTTKINLLNKVLGIVLGTLIKDHEMRGVSFQQVGYHRFFMMLFMELCTADVILESLMHSIVSAFAYTYHLLNPSVAPGFCFAWLELISHRVFLGRILVQIPGQKGWPLYAQLLQDLFKYLAPFLRNTELGKPVQLLYKGTLRVLLVLLHDFPEFLCDYHFGFCDTIPPNCVQMRNIILSAFPRNMRLPDPFTPNLKVDMLSDSSNAPKVLSSYIMNIQPANFKKDLDSYLKARAPVTFLSELRGHLQVTSEPGTRYNMALMNALVMYVGTQAIALIRNKNFVPNTSNIAHSAHMDIFQNLAVDLDTEGRYLFLNAIANQLRYPNSHTHYFSCAVLHLFAEANSEAIQEQITRVLLERLIVNRPHPWGLLITFIELIKNPIYKFWDHDFVHCAPEITKLFESVARSCLAKSNVTQQLNMPVVDGEGQEVATIN

SEQ ID NO: 2686 - DNA, 3205 bp, DROSOPHILA
actaactgcctttcagagcatttctcaattttaaatgccatttccaataaaatcatggcacacaggatcaaagccaatggtataaattcatgtcagtgtgcttatgtggagtcttctctcgttgattgcagctaatatccctcatcggagatttcgatcgtgtagtccgggtatttggtggccaggatgcgtttggtctgcgcgtgatcagcttttccaaagcccttaaatagaaagacttgattagaactccagaaaatttttcaagtagttagatacatcagtccatccactgcccagcgacccctttactcaagggaatagacccacctgcgagtatccgtagaccttcaagtacttcttctcgggattgtgttcaatgcgaccgccgccaggacactcggcccgcagccccagttttttaaagacctcctcctcgcgctcgaagatgtcggctgtgggacagtaaccaagctaagtgggcacttgatgggtgatgaggatccgacttaccatgccatgtgcagtccgcaaatccgcggatcaccgcctttgaagcatctcctccatcgaagacattgatcatgacatacttgaagatgccctctggactgatgtgcaccagtggcacgccggcaagtgcttcctcggacattttgtgaatcagtcgtagtcctttggaaagcagttggaggcgattcattgtggaaaagtgtttgaaaacagaatttaatgtcttaccaaccggcaaattttccaaaaacgctgctttagtccagcaatgtgaccagatacttttattctcgttcaccttatgtatcgatactattaaaattataatattcagttatttctttagtacatttgggaaaacgttttttgtactactcagtatattttagtaataattaataaactcaaaaagaaaacgttgttatcagtgacagcaaatttatcgattacgccgacagcacgcagtcgatactatcggcactatcggcacagctctggcgttcacaacaaaatatacacaaattaaattgtttaagccgaattttcgattggattccacggcgactagatgagctccacgcgtccgttttgcttcgtttgcggcaaggagaagtccgtgggggtgttccagctgatagaaggtaacgttcgcttacgccgcactcgaaagtcctgatagccgactttttcacaggctgcattgtgccaggaacctttaagcccatcaaggatatactgaaatacttcgagaagatcataaaccagcggctggagctcctgcccaactcggccgcctgccgggactgcctggagtacctcttcaactacgacaggctggtgaggaatctcagccaagtgcagcgccagattgcggacgcactgctcggctgcaggcaggtggagggcaaggcggagaccaagcaacaggcggcaaagagggcccgcgtccaggtgccggccttcaagatcgtccaggccaccgccctcaaggagcccgaaaggcagccgggcgaggaggatgagtgcgaggaattcatgaaggaggagatgctggacgaggagttccagttcagcgagccggacgacagcatgccgtcgtcggaggaggagttcttcaccgagaccaccgagataccctgccatatctgcggcgagatgttttccagccaggaggtgctcgagcggcacatcaaggcggacacctgccagaagagcgagcaggccacctgcaacgtgtgtggcttgaaagtgaaggacgacgaggtactcgatctgcatatgaacttgcacgagggcaaaacagaacttgaatgccgctactgcgacaaaaagttctcgcacaagcggaacgtcctgcgccacatggaggtgcactgggacaagaagaagtaccagtgcgacaagtgcggcgaacgcttctcgctctcctggctgatgtacaaccatctgatgcgccacgacgccgaggagaacgccctgatctgcgaggtgtgccaccagcagttcaagaccaagcgcacctacaagcaccacttgcgcacccaccagacggaccggccgcgctacccctgccccgactgcgagaaatcgttcgtggacaagtacaccctgaaggtgcacaagcgggtccaccagccggtcgagaagccagagtcggcggaggccaaggaagccaccgtcacgttcttttagggtagtcctttgctagattaatctaagaagcccagctcatgggtgcattagcgcgcgtatgtatcataaaattaaatctaaacaattattgacggaaagtaccagttctttgccgttcttcgcccattttccaggaaccccagtaggtaaagtagcggatttcgcgaattttcgcgggtatggcaataaaacaggcagatgttttttaatccccaaaataggtcctttctacctgtgcgcttggcaaagtatataaaggtgttgcgtcgtccgccagaacttagttgaacatttctgtttcccggagcacatctgatagaacagcatggaacagctattggcccaattacacacttgcagtgagctgattgcagagggctacagcagcaccggcaacattggctggctgaacgagttctgcgccactttcctggacttcgccagcgatctgaaggctaggctgccggaggtggcgcccagtggcgcaaaccttgatgtggagaccatcttcctgtgcctcacccaggtggtaacctgcatcacccacctagagcggaccatcagcatggaggcaccgcatatgaccaggcagcacttcctcgaccgcttggactggtgcttgcggcgactgctcgtctccttgacgcaactggaaggcaacgtgaccccagtcaagaacctagaggatcactccttcgttgagctcatggacctggctctggaccacttggatgactacatggagaagctggcccagcagagaaacaactcgctgcacattctagaagagagcttcacggaagacacctaccagctggccagcatagttaatcacatcgttcgccacgccctggcctttgccaatgtggccattcattcggacaagaaggctttgacggctttgtgcgagaccttgctcgccgaatgtgccactttccacgaggaggcgggcgagcccaacagtggtcatcggaagctggaggccctctccctggaacgt

SEQ ID NO: 2687 - DNA, 1152 bp, DROSOPHILA
cacagctctggcgttcacaacaaaatatacacaaattaaattgtttaagccgaattttcgattggattccacggcgactagatgagctccacgcgtccgttttgcttcgtttgcggcaaggagaagtccgtgggggtgttccagctgatagaaggctgcattgtgccaggaacctttaagcccatcaaggatatactgaaatacttcgagaagatcataaaccagcggctggagctcctgcccaactcggccgcctgccgggactgcctggagtacctcttcaactacgacaggctggtgaggaatctcagccaagtgcagcgccagattgcggacgcactgctcggctgcaggcaggtggagggcaaggcggagaccaagcaacaggcggcaaagagggcccgcgtccaggtgccggccttcaagatcgtccaggccaccgccctcaaggagcccgaaaggcagccgggcgaggaggatgagtgcgaggaattcatgaaggaggagatgctggacgaggagttccagttcagcgagccggacgacagcatgccgtcgtcggaggaggagttcttcaccgagaccaccgagataccctgccatatctgcggcgagatgttttccagccaggaggtgctcgagcggcacatcaaggcggacacctgccagaagagcgagcaggccacctgcaacgtgtgtggcttgaaagtgaaggacgacgaggtactcgatctgcatatgaacttgcacgagggcaaaacagaacttgaatgccgctactgcgacaaaaagttctcgcacaagcggaacgtcctgcgccacatggaggtgcactgggacaagaagaagtaccagtgcgacaagtgcggcgaacgcttctcgctctcctggctgatgtacaaccatctgatgcgccacgacgccgaggagaacgccctgatctgcgaggtgtgccaccagcagttcaagaccaagcgcacctacaagcaccacttgcgcacccaccagacggaccggccgcgctacccctgccccgactgcgagaaatcgttcgtggacaagtacaccctgaaggtgcacaagcgggtccaccagccggtcgagaagccagagtcggcggaggccaaggaagccaccgtcacgttcttttag

SEQ ID NO: 2688 - protein, 356 aa, DROSOPHILA
MSSTRPFCFVCGKEKSVGVFQLIEGCIVPGTFKPIKDILKYFEKIINQRLELLPNSAACRDCLEYLFNYDRLVRNLSQVQRQIADALLGCRQVEGKAETKQQAAKRARVQVPAFKIVQATALKEPERQPGEEDECEEFMKEEMLDEEFQFSEPDDSMPSSEEEFFTETTEIPCHICGEMFSSQEVLERHIKADTCQKSEQATCNVCGLKVKDDEVLDLHMNLHEGKTELECRYCDKKFSHKRNVLRHMEVHWDKKKYQCDKCGERFSLSWLMYNHLMRHDAEENALICEVCHQQFKTKRTYKHHLRTHQTDRPRYPCPDCEKSFVDKYTLKVHKRVHQPVEKPESAEAKEATVTFF

SEQ ID NO: 2689 - DNA, 4484 bp, DROSOPHILA
ccgggaattcccacctgacaccatcaacaaattgtcgaaaatcgaaggttcaactcaactagtcttgtctttctactcccgaacttaaagccattcgtgttcactttcatgtgaatgtcctgccagtcctttggctttaacccaccaatatacacaagcaatttgtggttcccattgtttgcccttagctcgtgtaacatttcggaattgttgaattgcgtgatttcgcggtggcttctaattgaatttcaaaactgcaatcaatcgacttggacagcttaaacggagcaggaatgcactaatgccctaatgaaacctattgtggttttcttgcagaaggatcgattaattggttgataaaatcagggggatggcagaatgccatagctatattacggttactaaatcgtaataaaatagaattagaatataatgattaatttaaacatataatatacaactaagtataatcaaggggtttctttagaagattgatttcgttcagcagcctttgccaaatgaacgaacatgcagtacattcaaatatggcggttaataagcttttaatggggtgttccatgtcgaaaagctttctctttccaaaaatgaatcaatccaagaaacccacaccctttcatgttgctaccaccaacaatcacacgtgattgttcaaaaggcataattacatggtatgcaaatgggaggcgccaagtggaaaatgtagccacaagattaacccctttcgccacacgtgcgagtcttggaagaacatacgtcaactttttaattaagcagttgagcaggcatcaaatgaatggcgctttccgccatgtaataaccccttttatggctgcccttaatcacaacatgtgacatcccttcccagcaggatactgctccttcaaaggattaaagttcgaacgaatgtagcgagactcaggaaactttgcgcttaacgctgattaattacaggacaacggagagcgagttggcttaattggaagtttgcttagttttagattgtttaatgtttattcacgttctctagctcatgtaaaaaactcatattcccagatgaaccggcgaaccagtgctactctcgaacgagaacccgccgctctagacattcaggtagttgtcggggaattcgaaggtaacatcgcgaccagtcagcttcttgtagaccgaggtgaaggtgtcgacctggagagataaatagagaacgtattagtttacacgatcagaggaattaacttatttattgcagtgtacagcaccgcaacctccgctgcggcagaaaataccgcagcgaagatatcgtacggtaggctggattaatcttccgcttatataggaagtcccgaggccccaggaaactaaacggcgctcgagaggcaaataggcggcactcaaagtgcatcgtgtgtgttttcagatgagtaactctaaatgtaaggtgctgttgcaatccttaagtaatgatgctgtcctggcaaagtagacccaacattgtggagtgattcgttgcattactttgcgttctgtttgacgatcgctggacttgaacaacgtccagaaaataacacaagaacggtgatggaaaccaaagtattcaagggctaagtgttgattgacatgaatgtggcgcatatagtaatgcagtagccgttgagagtcggctcaacattgtggagtgattagcggcagttaatctacgttctgtttgacaatcgctgagcttaggtaatcgcttagcgaataacacaagaacggagttcacaattagcattctcgtggatattcaactgtagcaatcctttagtaatgatgcagtcctggtaaagtagacccaccattgtggagtgattcgttgcttcagtttgcgttctgtttgacgctcgctaggccatgaaaagatctagcgaataacacaagaacggtggtagaaaccaaggtatttaaaagattctacgagagtgtggcgagccgaaaagtaatgcagtagccctggaaagccggctcaacattgtggagtgatagccgcattaatttacgttctgtttgacaatcactggctttggatgtaacttccagcaaataacacaaaaacgatagaaagttctatgtacatttaaacatataatctttctatccatctgttatcccccttatttgacttttcattctactgtttaaatggtttcaagtatcgatttgagtgtgtaatgatgtggcgagccggaaagtaatgcagtaaccgtgaaaactcggctcaacattgtggagtgataagctgccattaatgtacgttctgtttgacaatcactggctttggaaggacagccagcgaaaaacacaagaacgatgtatcaaaagaccaactgtggccaatatttggagatgcaggaccgcaatggcttctaatgcctgcaataacgagtaattggccctgactgttctgcgtcccctggcgaagattgagctccatggcacggaaggcccaaatatcgagggtacgcgcctgctaacacacacgatgcactcttctttgaggtggaggatgcttatgcttactttgtgttcaatggtggtctgctggttcttgtccaggtgcaccttgaccagctgggagccgtccagcttgacgcggatgcgcttgcccacaatctcggcggggaagaccagatcctcaaggatggcgtcgtacacagcggtcagagtcctggagcgtggacgcttctgcttgagggggttgcgggccttgcgcgtgggcttgggcaggatcttgcgctccgcaatcacgacgacgtgcttgcccgagaacttcttctccagctcgcggaccaggatgatctggatcttctggaacaccttctgctgtggaatgggcacgtagatgatgacggcctgcgtgcagagtgggttacggattactattgaaggctccacatgtacgccatatactgtttaccttcttgctgccgaactcgatctcgcgggcacgggtgatgtgcagatcgcgcaggtagggcttcaggtcgctgttggcctcgagttccaccaacgcctgggcaatggacttctcgaagtcatcgggatccgagccgccgggcttgataatcttggagccgatagccatctgcaatgttcatcaccggtattttagctttcggttcaattacaaacacaaaattcgctgcggcagacgcttccccacaacgcagtacaatcacaaatcgccggcaatcggcgttatttcgccagcatttctctggattcacaagaaaatcgtaatttgccattatcattgcggccttttctcttattatttcgctgcactgcgttgtggcgaccgcgtattttggccattttcggcgacggaagaaaaaaagtaccacctttgtcgactattttgacaggaaaggaagtcgagccacgacgtagaggtggaaaacagagcgagttgttatcgatgagacacgcgcgaacgttgtgcgatactatcgatacagttgcaggagcaattactcgtcgaaaatacgagggatggctaaatatataaaatttaacattataacataacatccattcaagaaaatttgattatatttctttgaagtgtttcagcgttttaatgttttgcgtgtaaaaatcgatagttctcagcaaagattgtgtataacgaatttatgagttagcatcgataagtttgtatgccactatgggtttatgtttggaaaaactttattataaaatttttttttaataagttaagttgttagcctataaaattaaaaaaattgttgtatgaacaatataaaatgtttctttgaaaatatatatcgataggttcgtttagggttatctaccatgcttcagcggcgagtatcaccacttatgttgcgattaaagccccacagggggcgcaattgttaccacatgtaacgttttttaaaaaaaagtaattacacagattttggattttggaatggatttccataaattaggaatttaatgagattattaacaacataataaaaaatattagttattgccttaaatatatgtgtagataatatttacgcagacatatttaatcttttcaacggacatttttaagttgataatattgataatataatatatgtaaattccagtgccatttgccgtatgagttttaacctacagaattgtagaacttaattactatagaacactattgaatgaaaacttagtaacttgttgaggtttttagtaattccaagaaatatgctcttgaataaaaaacctttttaagtctctttcaatgcaaaaacacgagttctttttttttacatattgtaattaatatgtttaaggtctaattattattgtaaacgtttttcggtgggttgattgcctataaagccacttgtttttcagtctaaatcatcagtgtaaaattcggaaaacccagcgatctagttatgaaatactttgtggtc

SEQ ID NO: 2690 - DNA, 790 bp, DROSOPHILA
cgcgtgtctcatcgataacaactcgctctgttttccacctctacgtcgtggctcgacttcctttcctgtcaaaatagtcgacaaagatggctatcggctccaagattatcaagcccggcggctcggatcccgatgacttcgagaagtccattgcccaggcgttggtggaactcgaggccaacagcgacctgaagccctacctgcgcgatctgcacatcacccgtgcccgcgagatcgagttcggcagcaagaaggccgtcatcatctacgtgcccattccacagcagaaggtgttccagaagatccagatcatcctggtccgcgagctggagaagaagttctcgggcaagcacgtcgtcgtgattgcggagcgcaagatcctgcccaagcccacgcgcaaggcccgcaaccccctcaagcagaagcgtccacgctccaggactctgaccgctgtgtacgacgccatccttgaggatctggtcttccccgccgagattgtgggcaagcgcatccgcgtcaagctggacggctcccagctggtcaaggtgcacctggacaagaaccagcagaccaccattgaacacaaagtcgacaccttcacctcggtctacaagaagctgactggtcgcgatgttaccttcgaattccccgacaactacctgaatgtctagagcggcgggttctcgttcgagagtagcactggttcgccggttcatctgggaatatgagttttttacatgagctagagaacgtgaataaacattaaacaatctaaaactaagcaaacttc

SEQ ID NO: 2691 - protein, 194 aa, DROSOPHILA
MAIGSKIIKPGGSDPDDFEKSIAQALVELEANSDLKPYLRDLHITRAREIEFGSKKAVIIYVPIPQQKVFQKIQIILVRELEKKFSGKHVVVIAERKILPKPTRKARNPLKQKRPRSRTLTAVYDAILEDLVFPAEIVGKRIRVKLDGSQLVKVHLDKNQQTTIEHKVDTFTSVYKKLTGRDVTFEFPDNYLNV

SEQ ID NO: 2692 - DNA, 2952 bp, DROSOPHILA
ctttgttttcctgttgcttcgcaaacgaaaggaaaaatcaaataaacgcaaaaaaaagagccaaaacgaaaaacaaaaggagatggaaccttaatcgatactatcgcgtggaaggttgccgcttcgcaaatgatcgatctggcagcgccgtgtaaatcttcaagccaggcgttgccactgtttgcataaattcaaaagccgatttataattaaatttgaaaaaacctttcattcctttttctttgtgtagatttatattaatatataaaaaaacaaattatttaaaaataataattctggaaaacaaaaaagtgctctttatgatttattttaaagttattacaaaaaaattaaaaagttaccccaataatagaatcaagtgaaaactccaaagcaaattgtttaaatttaattgtaattgcttaattctactccacttcgttgccacctcctatttgctatttgacccacaaagacgaccaactaaatttagaaaagaaacaatttattcagcttaatccaatagtaaacagaaaataaagacgtcggcatttcatgccgctaattttgtactcgctcggaggtcaatcgaaataaaaaaaaaagaaaaacaaaaaaaaaaaccatgagttttagtctttttttttacgtttcgatcaggaaactaattacccatccttggatttcaaatcgatagagaaaaacttgtacaggtattcgaaattataaagataactaatcaatcgaatcgaatcacaaccaaagctcgaaattttctacataacttattcaaaattgttactaccaatgcgatgatggaaaatcttattttataaaatagaaattacagattgtgttcatcatagttacttgtggataactataaagattcaggccataagaactccccacttggatttgtatccatataaatgatagatccgatgatgatttgtggagattagccgttggagctgcgaaagcttaagaaatcttaggattaattgttattctcgatggcggccatccgttcgcgctccttgagcaaccgctcccgactgtcctgcggattgagcagcaccttgaccagatgctccaccgtcggccgctcggcggtgcagtaaaccttttggcccagcgattcgagggcacgcctagtgctcggcccgatggccaccagcttccatttgtccatcgatagctgacggctggtgaagtactgctgtgcacaattgacgcccgatggcgagaagaaggcaagaaattcaatcgactcgccataaatctccaatgccctctccacattggcgcccaattcgggatgacagcgcgtctcgtacacttcgcacgcatccacggagaagccattctcggccagcttggatagcagcgtatcggtggccagattaccgcatggcaatagtagcggcaatgcacgcgatccatcgaacgtatccactatatagtcgcccaatgcccgggcattgcccgtctgtttgccgtgggtgaatagctggtccaaggtgcttagcgccagattgtgggtcacctcgccgacggcatagttatgcaacatcttccaaccgccgggtagctcgccgagattgagggattcagccacggcctccacgcagcgcggcgatgtgaatatgatgccggcatatttatccggattctgaagcttggcgcgcagctcatcgagattcttgaagccgaaactcagcgtgggcacaaagacgggattgaaatcgtgcttctccagcgtttctgcgtacacatcgctgctttccgattccgatttgaatatgatcacagttcgctggcgactcgtcatcttgctgctggctcacgtttctcactttgatcggacgcaaactgtgtgctgaattttcctttgtcgagttttccgccagcgcttacttgccccgcccactgttgccgcctttgctgcgccttctattgcgaaaataaaaatatataaataagagtcgaattttgtgcaccagcagcctcgtgctgtctccctctaatcagctgttgtgccggctgtccgcagggctgccagatcgtcgagctaacggcattactgtttatatattttaaatttatgcttttgttttgaagttaaaggatttaatttgctatatttacttaatttttgtttttttatttctgctcattatatgccgtttttataatcagctgttttttggcgactacccaagggtggccacactgttgtgatttttaaaatatttcatttgattgttacaattttacaattgtacattcgcattattataaaccagctttggaaactgtaagattatcagtaagaatatcttctcacacatataaatacaacttaatcatgagtatgtaaatttaacttattcatgggtattttctcacattcgttatcagatatttttccaatgaatcaagagtttttacgtatttcgagcagaatacatcggaattctttagaactatttcagatttgatcgatgcgacaacgcagagtaaaataataataatttttcactaaaaaaatttattatttttaagtttttcttcagtgtgtgcttaaaatgatgaagctttcatattttgtgttattgatcgtcctggttttgcgaggatccttgggcaagccactgcataaaaaagaaacctgtctagccaatcagctttctatgattgatttaatgagtgaaatcaattccaaattggacagaatcttatcgatttcacacaaagaaacggatttatccagccagcaaatgaaattgcacagcaaaaaaaatgcccaacaggaagcgtttcgcaatagaacgcaatcccgttttcaaatatccagcaacaaaatcgaaagtctgttagaaatgtattccagtactacagtggagcctctgccacagaagtttgcgttaattggcaagcgatcattct

SEQ ID NO: 2693 - DNA, 952 bp, DROSOPHILA
cgcagcaaaggcggcaacagtgggcggggcaagtaagcgctggcggaaaactcgacaaaggaaaattcagcacacagtttgcgtccgatcaaagtgagaaacgtgagccagcagcaagatgacgagtcgccagcgaactgtgatcatattcaaatcggaatcggaaagcagcgatgtgtacgcagaaacgctggagaagcacgatttcaatcccgtctttgtgcccacgctgagtttcggcttcaagaatctcgatgagctgcgcgccaagcttcagaatccggataaatatgccggcatcatattcacatcgccgcgctgcgtggaggccgtggctgaatccctcaatctcggcgagctacccggcggttggaagatgttgcataactatgccgtcggcgaggtgacccacaatctggcgctaagcaccttggaccagctattcacccacggcaaacagacgggcaatgcccgggcattgggcgactatatagtggatacgttcgatggatcgcgtgcattgccgctactattgccatgcggtaatctggccaccgatacgctgctatccaagctggccgagaatggcttctccgtggatgcgtgcgaagtgtacgagacgcgctgtcatcccgaattgggcgccaatgtggagagggcattggagatttatggcgagtcgattgaatttcttgccttcttctcgccatcgggcgtcaattgtgcacagcagtacttcaccagccgtcagctatcgatggacaaatggaagctggtggccatcgggccgagcactaggcgtgccctcgaatcgctgggccaaaaggtttactgcaccgccgagcggccgacggtggagcatctggtcaaggtgctgctcaatccgcaggacagtcgggagcggttgctcaaggagcgcgaacggatggccgccatcgagaataacaattaa

SEQ ID NO: 2694 - protein, 277 aa, DROSOPHILA
MTSRQRTVIIFKSESESSDVYAETLEKHDFNPVFVPTLSFGFKNLDELRAKLQNPDKYAGIIFTSPRCVEAVAESLNLGELPGGWKMLHNYAVGEVTHNLALSTLDQLFTHGKQTGNARALGDYIVDTFDGSRALPLLLPCGNLATDTLLSKLAENGFSVDACEVYETRCHPELGANVERALEIYGESIEFLAFFSPSGVNCAQQYFTSRQLSMDKWKLVAIGPSTRRALESLGQKVYCTAERPTVEHLVKVLLNPQDSRERLLKERERMAAIENNN

SEQ ID NO: 2695 - DNA, 5776 bp, DROSOPHILA
tcgttttgcgcttttcctcctctttcccgagttttccggccaaacattgcaaaacatcatatttcttgtgcctgttttttatttccgaaacaaaagcccagccaagtggtctaaactagccaccccgtccgcccttttccacagaacttgtgtataatttattgctcatacgacccgtgtgcgtgtgggtattttcacttccttcttctcttccaagggggaaatgcagaaaatgtgtggaattgtgggaacgtcaaaagtgcgtcaatcaacaaaaacttctagggaatgaaatgccagtgctcctatttattttctagttcattttttccgttttttacttgctttgatttataaaagccagaaattgttctgcgaactgccgaagctcggagatggagaatctgctgttaacaagcagatttatgctttcagctgggatttatggtctctaaagatatttttaagaagtatgagagctcaagcgaaaaaggattaatctggcttaagctttcaaaaaaagtgtttaaaattgtaaagttctcatttatatttcataatttcgtacatcctcagcctaaacaatatttaacaaatacatacaatataagtaaggtctacgactatcttaacttacagctatcaaaactagaaatgagtgcttgcatttttcacattgtaatcattgactagtgaattatttgtagcattccagtgacaaaaatgtgtacaaattcatacgtctatctacaagatacacgatacaagttactagcaaacccgtttggcgttggtagcagcaagatgaatatgattgattggttcgatgtggaaactgagtaatggtaatgcatatgcagtggcaagaacgtcaagtatatgccacgaatttggccagaacgaaactaagattaactcttcgcagacacacacacacacactctcgcagacccgagcattcacaccttaaggatctagttgtacgtatatatatctgcaactacgactcctgactgattccgccactcaggctgacatcgatgatgggttgcgcgtcctcctccctgttaccctcccccaaacaggtggccatgggtccatgtcgcagcagggagtagctgtcccgatgatgaacgagaagcctgtgctgctgatgggctatgaaactactgccccgcctcaaggacctcctgcccatctcgaggatctccagcgtgggatcctgggcgaacataaagttctggtaggcccgcacgaagctgaagataatggcaaaggctccgcccaggatcatcaggtaggatccgatgggcacggcactcggggctatcactgtgcccaaataaatccagcgcttgatggcaggtgtcagctcagagatgccctataaagtactcagtttaatgggttttctgggtgtgttctggcatttgatatctcacctcttccagccacatgaccggaaagacaaagtctcgaaaatcacgcactggatagacgtccttggcacgtgtcactttaagattcagctgtatccgcactttaccctccagtggaactccaagtttctaagagagaacagacattaaattagaacagcgatgcggaaaaacacgaccttcgtataagatacaaattaaacaacgtaagcacatgctagggctcccatttttaaggtgacttttattcttaaagtatatattatatattattatattcactcaccggttgtattttgaagtacgtttcgtgcttctcacgctctggctttaggccttccacggaattgagaagatctggatgggattcaaagaagtgcggattggaaatgtaaacgggggcgccatattgacacggactgatgttctggagaccctgaatgggttcatattcgctggtatcgtagcacttgttctccggattgtgggcggaatctccgtaggaattattgggcagccggaacagatcggccgctatgccatccttttccaggctctccacatacttaagtgggataatcctgcacaaatccttatcgtatatatgaaccacttccgattttgtgagttcccgcggcggaaagaaggatccctccgatccagctatactggtgcacggcggctcactccagtgcggcaggtgatccagtccattcagctggtctatgtagccgaactggtccatgctgtccatgcccgtcttaacggaggacacctccgtgagggtgccattgcggcccaagagcagacccatcctctccatcggtctcatgtgcttcggataaaacctgtgggccaagctaaccagcgcgtcatcatagccaaaggccagctgctcggcggtgacgttgatgaagggcttgaattgagcagccgttaccaccacggatatggtcttggacaggagatatcccagcttagggctgagactggtgagggtctttagaaatgtatttcaaattagttatgctaatgtttttcattagaaaatatatatgtggttctcacgaatgaagccatcaagtactacatatacttaccagcaggggtatgttgggcgtggttatgggcgtgtccttatcaatactcagttcaggaacaaattgcagtatcttcttatgctgatatgacacggtgtagttattctcatgaaacttgacattcaccttctgcatgtcttccctgtaaaaagcggggaaagagaaatgaatgtcttatcattaatcggcacgtgctgcgaactcggattcgtggtccaaagtcaggggcggccaacaaaaagcgccaagcaattgaatgtcaagttcagtttcggccggggaaaagcaaaaagcaaaacgagtcgaaaccaacacataaaaagtggcagcgaatgacgggcactttgggcctcgattgtcattacggccacaatttgaacctatcatcaccagtcgagattcccaagccaatgaaactctaagcttgtgatgcagtgattgtatgattgatcactttgaaccgaaccctctcaggttatccttcatttaaacgggttcagtgcgggctgtccatacggaggcctattattaaacattgcattacatttgcacgagctctagatgttgtaatctcgatcagcggaaactcgccttcaagagctgtgagctcatggtttaattggccaactaattgcacggcggctcacggctgtgttggccagtttgattgggtgttaaaattcgaagagataattcaattgtttgcacatagccgtggctaatgcccacgcttagttcaatctgatatctgatcttgataagacccagttgcttaagtgattaataggatggctgatatgcaaagatataacaaagtagagtttttttttttcacacccataataaagaagctcaaactgtgacatttgaaaggccaaacaaacaaagtagaactttgtaactcttgcattagttttgaaaacttcccagctataattattctccagctaacagcgaaatgctgaattcgcaattcagtagtctaggagccaaggaaataaatcagatatcacttcctaagcccctaattatcccttctagaagttcaataagttaaccactggccgttagcgtagctaatatttttagccacttgaattgcttttagccacttgcgattctaattacaggtattaagacattgacttcccagcaagccatgaccaatcggagtgctgtgccaaagccggcgtggaaatttatctatgcttaaaggttttccagcctgaggtgtcagagaaggcgtaacgaatgtttcaattgccgagatttatggccaaaatacggcagctggttggcttacctgtacacaaaaggaccaacttcttgcaggtgcggcttttcccctcgaaggaatccatccggattggtgacattgtagatatatagcttggtcagtcggatgacgccaggcctttgccaataatgatagctcagtgtatcattccacagccttaagttctaaagtttttacttagttaatttcttcatttgcagcttggatttctgtagaacttacctttagtataaaataatccagccacggcatggaggacaaaataatgcctaagattaaagtaattatcccaataattatcacagctagtctatctggaaagatagaagaaatgaaaagttattattttgctgagtaagtagaaattaaagcatttgcagcttgacttagctaagtgctattattaaatacaatttggatagtcctagaaagtagagcaaaatgctcgaagttatataacccagttttgttgactgaataatgacataaattaccccctgaaatgcagcttttcatattcctttttaatgccgctttttcgtgcaatttcgtaaggtaaataaaataaaattatttgcgaatttcacggtgcaatttcacggatgtcacatgcaattacaatggtcaacactcaaactcgccatctcgtgggcagtcaatagcgatcttggccgacttatcgccaacagattcacgtagcatattcacgtatgacagctgccaaaatttacgaccctctgttatcactaattgaaacttaatctcggccgatgcaatgtaaattggcccatgcacttagtctccggacattggacgtccgcagcatcaatatcaacattaacatccacatccacatccacatcaccttgttggcattttgaggcggtgggcgtggccagcagcatctcagttgacgaatccaaattcgctaatgaatccgctgatgatgataaagatgatgggcatgcaatgccaacgggttctgagtattttcacgggtttttctgtacttgcggcgatcagtcaacgaactgatcgccacgccgatccgatcgagaaaaagcgttttcgctatcaggtttcgccaaaaagtgccgccgccccgaaaaagtgcaaggtgaagcgttttgaaacaacataaatttaaattttatttattatttataatcttataaaaaagctgcttcgattttgcaggtcactgagtcaaaagctgcgacgtcagcgataaggtcgaaaaaaaaagtgaaaagggaaggaacttccatggggaagatgagcccagaaatactctacacgaaaaaataagcggggataataaattataattatcactaagattaaacaagtatgaaaagaaaatgttattaaatttctctaactattttaaattgtcatgcatatcagattgattgcatggtcttaatataaataaagatttttaaaagtaagagtgcaataaaaattcactcggatgcagaaatttagtccgtgaatgtcataaatcagcttggaactcattaaatccatattttccatatgggtgcattacttgctgtcaaaacatagccggattatggaagtatgtgcattgaatcacattttggacggcaaagttcaggcggtttcttctcagctctgcttcgtgttccactgaccctgaagagctcgacgatcacaaactctgtcccagagaaagttacgcaaaaaaggagagtgaagtaaaaagacaaaaaaaaaaaaagcgacaacaagtgtcataaaacgaggcacataacatttcggagcccaaggtcaagggaagacagtgtctcaacggaaggctttattcggctcttcagttctccaaagccataatgttactgcaatcgaacggctattgcaaatcgggtttctcagcccgatgggaagatacatacatatagcaatatattcaggta

SEQ ID NO: 2696 - DNA, 1577 bp, DROSOPHILA
cggattcattagcgaatttggattcgtcaactgagatgctgctggccacgcccaccgcctcaaaatgccaacaaggtgatgtggatgtggatgtggatgttaatgttgatattgatgctgcggacgtccaatgtccggagactaagcctggcgtcatccgactgaccaagctatatatctacaatgtcaccaatccggatggattccttcgaggggaaaagccgcacctgcaagaagttggtccttttgtgtacagggaagacatgcagaaggtgaatgtcaagtttcatgagaataactacaccgtgtcatatcagcataagaagatactgcaatttgttcctgaactgagtattgataaggacacgcccataaccacgcccaacatacccctgctgaccatatccgtggtggtaacggctgctcaattcaagcccttcatcaacgtcaccgccgagcagctggcctttggctatgatgacgcgctggttagcttggcccacaggttttatccgaagcacatgagaccgatggagaggatgggtctgctcttgggccgcaatggcaccctcacggaggtgtcctccgttaagacgggcatggacagcatggaccagttcggctacatagaccagctgaatggactggatcacctgccgcactggagtgagccgccgtgcaccagtatagctggatcggagggatccttctttccgccgcgggaactcacaaaatcggaagtggttcatatatacgataaggatttgtgcaggattatcccacttaagtatgtggagagcctggaaaaggatggcatagcggccgatctgttccggctgcccaataattcctacggagattccgcccacaatccggagaacaagtgctacgataccagcgaatatgaacccattcagggtctccagaacatcagtccgtgtcaatatggcgcccccgtttacatttccaatccgcacttctttgaatcccatccagatcttctcaattccgtggaaggcctaaagccagagcgtgagaagcacgaaacgtacttcaaaatacaaccgaaacttggagttccactggagggtaaagtgcggatacagctgaatcttaaagtgacacgtgccaaggacgtctatccagtgcgtgattttcgagactttgtctttccggtcatgtggctggaagagggcatctctgagctgacacctgccatcaagcgctggatttatttgggcacagtgatagccccgagtgccgtgcccatcggatcctacctgatgatcctgggcggagcctttgccattatcttcagcttcgtgcgggcctaccagaactttatgttcgcccaggatcccacgctggagatcctcgagatgggcaggaggtccttgaggcggggcagtagtttcatagcccatcagcagcacaggcttctcgttcatcatcgggacagctactccctgctgcgacatggacccatggccacctgtttgggggagggtaacagggaggaggacgcgcaacccatcatcgatgtcagcctgagtggcggaatcagtcaggagtcgtag

SEQ ID NO: 2697 - protein, 513 aa, DROSOPHILA
MLLATPTASKCQQGDVDVDVDVNVDIDAADVQCPETKPGVIRLTKLYIYNVTNPDGFLRGEKPHLQEVGPFVYREDMQKVNVKFHENNYTVSYQHKKILQFVPELSIDKDTPITTPNIPLLTISVVVTAAQFKPFINVTAEQLAFGYDDALVSLAHRFYPKHMRPMERMGLLLGRNGTLTEVSSVKTGMDSMDQFGYIDQLNGLDHLPHWSEPPCTSIAGSEGSFFPPRELTKSEVVHIYDKDLCRIIPLKYVESLEKDGIAADLFRLPNNSYGDSAHNPENKCYDTSEYEPIQGLQNISPCQYGAPVYISNPHFFESHPDLLNSVEGLKPEREKHETYFKIQPKLGVPLEGKVRIQLNLKVTRAKDVYPVRDFRDFVFPVMWLEEGISELTPAIKRWIYLGTVIAPSAVPIGSYLMILGGAFAIIFSFVRAYQNFMFAQDPTLEILEMGRRSLRRGSSFIAHQQHRLLVHHRDSYSLLRHGPMATCLGEGNREEDAQPIIDVSLSGGISQES

SEQ ID NO: 2698 - DNA, 10644 bp, DROSOPHILA
cttggccaactgcatcacggcgtgccacatgaccggccaccagcgagatctgcttacgttcctgcagcacatccagccgggcatcgaagagtgcaaagccgcgatgaccactgttattattcaccggcgagcgtgtaatccgttgccactcctgcacatcggtgcgcgttctgtcgccggtgtccaccagatggtaactggttataccgtcgcagatcacacagaatcgttccgaaacgaaaactatggtgtagttgtagtcacccgaccgatgtagttccccatcgccctgatccctatagtccaccgtgaggacaacgcgctgggcacgtgcgcgtccagtctgtagatcgtagttgcactgcaccagctggtggcgcttgttaaagaagtagctgcagtggcgcatccatggatcggctaccaggtgattgtgtcgggcaaagagctccgtgtgcagcagcgagaactgattgctgctcggatccagcacgtaggcatcacatccaagttcctggcgaagaacaggcaccgaatcgaatgccaatttgtagccagaaaagtccgagcacaccaggttgcgatccactttcagttccaccaccggcatcttgctttactgcgccaatgctgagttggattatattggagatttcgaaaaaatagagatagatattccaaaacaaatcaaatcaaatcggtagtagaccggatagagatggcagatgaccgttcggccgtgactcgtatcgactttttatcgacaagtgggggatatgtacgataccttggcaattttcaaatctaataagattcctttttttagtttgaaatttaactaaacaattaaatagctaaaaagaaaacattagttagtcacatatttttttatcgaatcgaaagtttaagcaatgtatcgatatagcccacatcggtatctagctcatctcgatagcgcctgcctatcgacggacggccatcggtagttgcgtgccgtgggaaaaacataacgggagcggagcagctgttgcctgctaattgaaaaattagacacaagaacgcaaaattgtgagtttcgtgtggagtttggccaagtgaaaagcgttggcgggaggcgactactccaccacaacaaatccagtagtagctgcaatacgactcacccgactccacaaagttagtttagtgacacaattcggtacgtgcgatagggcgaggggcaactcaaaagttcaaaatctcaagtatatcaagtaattccgcatcgtcgtgttccgcccacccaaaataatgcacattgaggatgccaagtgacgagagagtagaagcgacgatgtccacggtgcgcctgcccattgtgggcatgacttgccagtcgtgtgtgcgcaatatcacagagcacattggccagaaatcgggaatccttggcgtgcgcgtcattctcgaggagaatgcgggctatttcgactacgatccccgacagacggatcccgcccggatagccagcgatatcgacgacatgggcttcgagtgcagctatccaggggatgcagcagatcctcccgaaactcccgccagcgcatggaccaacatacgggtggtgggcatgacctgccagtcgtgcgtgcgcaacatcgaaggcaatatcggcaccaagccgggcatccattccattgaggtgcaactggcggccaagaatgcccgcgttcagtacgatcccgcccagtatgatcccgcccagatagccgagctcatcgatgacatgggttttgaggctagtgtgcaggaacctcgatcgccatcccaatcgccgtcgcccgcccccgcctcatcacccaaaaagagggcaactcctactcctccacctccttcatatgctcaaaatggttcggcagtggccatacccgtcgaacaggagctactgaccaaatgctttctgcacatccgaggcatgacgtgcgccagctgtgtggccgccatcgagaagcactgcaagaagatctacggcctggacagcatcctggtagccctgctggccgccaaggcggaggtcaagttcaatgccaatgttgtgacggccgagaatatagcgaaatcaatcacggagctgggcttccccaccgaactcatcgatgagccggacaacggcgaggcggaggtggagttggagattatgggcatgacttgcgcctcctgcgtcaacaagatcgagagtcatgtgcttaaaataaggggcgtgaccaccgcctccgtcacactgctaacaaagaggggtgagtgttttttgtgtacttaagctaagtggctttctggaactagtttatcccgagagaatttcaaatcacgttctgggtcatgcattcgaatcgaattgcgagtctggaagcattccacaagtggcagtgccaattgttatgcaatatttataataataaacacctggaatggggccatcaaccgatatgcacctgttgcgctttattcttgcccaacgagcacaggtgttaaattcgatcatatatcttgtatatcttaagggatcgaataatgcaatgggagtaatgagctgtaacagaagcaaactattggcaatcgttaattgatgcaacttgtggcaataacaaatattaaataagccattcaagggaatttcgtagaatgcccttatttgttttgcatttcgcagaaagcgacagctgttcctttttattaacctactagcatcgagttcgagtagaatcggtgcaaatgttttttttttttttattgttcgcttttcacaatttccacaattgaaaactggcccagcaattgtttattgcaactgatatactcgatttactttatgcttttttttctggggagggtggcaggttcgttgataagaaagtgcgaggagcactatactcatatgcatgtatgtatgtatgtactttataaaccatacactactaactatgctttcagcaaacaatgccagtggcaactagattaaatagctggaattcaccacgctcgtgtgcgtgggcagtaaagctatctggaacacttggatgaggggaattcaatggcaagccgagagtcgggatatttaaaatattcaagatattcgctaaaaaacacataatataattattgttttgttgggcgctggcagctcgagttttatttgccagattatagcgtgttttttgcgagtgttcaggaagaacttatatatacatatttatgtatgcgattagctgacaaagaacaaatgaaatgatttgagctctttgttttcataaactttatactgccaatcgcatttaccaattagcatttaagccatgaaactgaaagtccgcctggccaaagaaaaatcaaaacaaaagtgaaagagctccaatacgccttgaaatacaagtacatacatataatgtatgtacatatatatgtatgaatgtataataatttatatacccgcgattggcgggcaaacgagcgaggaactaatctcgcttttgtctggaaaaaaagagggaaacctctctctttttcagctttgcagtctttctgctccgcatgcgtggccacgaactccacttccacttcgtacacagcgagaaatggggctaactatgatataagtattatatagaagagtgctatctacttcggcatatgatcagcatataaaatctactaatatttaaaagcacgaatcgtacaatgtttagcaagtttcttttattttatgttaagcacgcactttttcttcgagtgcatttctagtttcattcaccttcactttgatttagagctgtttttactttacttttgctttgccagctcaaaaatgttgatttgaaattagtgaactagtggcgaattatgcaataacttggctttgatccaccacattcacattgaattctggctgatttacgaatatcggtttgcatacccgtatttatgtatgtactagatgtacgtgcgccgttttgagaagctcaattgcaaattcaaaaatgaaaatgcataaatggggagcctcgtaattatgattgcaatggaactggttttcgattttttcgcattcgacatggagacatgcgcacggtggagaaaagcgagcgaaactgttgcgattaaatgacactgaaaataatttcagacattcaaaagtggtatgaaaacagcgagcccacatgaatatcaatcgctggcagctgtatgatggtatataaagtacaatatcgcttgtttttttaaagtttatttgtttattttgaatttacatatatacttattaagatacttaattgtattgtaatcattttcgaaaaacaattacgtaccagtcatgcttctgaaagagttcatagatgttttgggccagcgaagttggacttctgccatatggattggtccaattccgtgcggcttcttatctttcaatcaattagcacttaaacttcatttaactagcttaacttgttgtttgccaattgttacttggcttgtttgcagtttgtttgccgcaagtcggtagtcgaaattgggaatgtaaactgttgagcaaaacatatgttttcctccgattcttatcgtccggcgataagtgaacgacagagaacgaaccacaggcaatctcaattcaaattgaaaatgttctaaaattgtaacaacgaatcgcgggcgataagatgcaatgggcgggcaaataaaagaaagaaagaacaaaaaaactgaatcgagagccctagaaaatgtatatttcgacgactgcagtggaacttgcataactcataagggatagattaagatacccacatatattacttttgctactttacttttgattcgttgaaattcgaaaatgaagttcgaaaaagcaatttcttgtgtaaacacacgaaacgcatcaattatcaattgaaaagtgggctaagatcgatcggtagcactgataattagcgacaattgtcacattcggtgtgatcaacctaatccttcctcaattttgcacacgacccatcgtctggtgtccacttggtggccctctaattgaacgataaataatgatatcatgggttctgtcagctcccaagcgattccctttgcttcaatctatgctattaatttgaaggcatatctacagatgactcaaacaaaccgttgctctaatctaaacgtaaatttgcctagttacagtttacgcgatgacgaaacgaaacagaatgatcttttgttctattcccacttctgataagaacgttgaactaacaacgattgcaatgagtaggcaaaaagtatgcaggctcacaaatgttgatagactgaaatgttgtgcctgttaataaaataaaagtattactaagcgcagccgatggctaaaaccagttttcttggcctctgcgaacgagcataataattctataatttctttaaaattattcttggcttgaggaataactcattatagaactgtatgatgagtatggtatatggcgattgctcgcttatcaatgaatccaattgaagccagtgacaatttcccctcttcaaataaagatcggaaatgtgaaaaactaataagacgatgaatgggagaacctactgggggaataacatagccaacagatggcaataatgtcgagaaattccagttgcgggccaaagttgtgggcgacaacatgctctaatcatgtagagaaacggcagcgattcagtttacacattctacatagttaaaaagaagctatcttatctacaaattgtgctggcggggaaaggcaatgaacctacagctgcgatattttgtgaccaagattcccggagcctctgagccccacggatttttctataatccgactgaatgatgcgatagtttttggccacatgtctgctatatgggcaaataatactgccttaagttgtgaaatgaggcaaatgtatgtagctcacaaaccagaaactataagccattgcttatatcaaatctgtcgccatcgaaccggttgtatgctccaatttcaataccagaacaaccggcattatttccactcaacgacggtgtacaaacacttttcatttgacgccagggaaaaaggaaacccacaaaaattccctaggttcctctgtctatgtccaaggaaacatatggaaacactagcccttctcctatagagttttcgctggtgtcttgtcaaaacacaggagtagccatataaatgtgctaacaagctccagaaactgtgatgaaattgatatggcattcagatatgcgagtgcacattcagattcacttacacatactcatggaaatgaaatcgaatatacctgaaaagtagtaatatttcaattccctagatatacaaagctcatgcggcttcattatttttcttggcttgtacgcttggcatagcaaatatcgttattaaagatcagcagtatatagctttcacttcaatcaactgaatctttgataaatatcctatgtgaatattcactggccatttaaagtggctttctctatttttttttaacgactggttctgtaaaagttgcacatgaaacaagtccggtttttcagtgtaccaattgaaactaactaggctgaaatgaggaggaataataaatactacgtcactataattaacttattcgactgattttaatagatgatatttaagttctatcaacttataatcttaatcttaatttttacaggcaaattccggtacatcacggaggagacgggtccccggagcatctgcgaggcgatcgaggcgctgggattcgaggccaaactgatgaccggccgagacaagatggcccacaattatctggagcacaaggaggagatacggaagtggcgcaatgccttcctcgtctcgctaattttcggtggaccctgcatggtggccatgatatacttcatgctggagatgagcgacaagggacatgccaacatgtgctgcctcgtgcccggcctgtcgatggagaatctggtgatgttcctgctatcgacaccagtgcagttcttcggtggctttcacttctatgtgcaatcctatcgtgcgatcaaacacggcaccacgaacatggatgtactgatctcgatggtcacgaccatctcgtatgtgtactcagtggccgtggtgatcgccgccgtgctgctagagcagaatagctccccactgaccttcttcgatacgccgcccatgctgttgatcttcatatcgctgggtcgctggctggagcacatagccaagggaaagacctcggaggccttgtccaagctgctgtcgctcaaggcggccgatgccctgctggtcgagatatcaccggactttgatatcatcagcgagaaggtgatatctgtggattatgtacagcgtggcgatatcctaaaggtgataccgggagccaaagttccagtggacggcaaagttctgtacggtcactccagttgcgatgaatcactaatcaccggggagtctatgccggtggccaagcgaaagggatccgtcgtaatcggcggttccattaaccaaaacggtgtgctcctcgtagaggcaacgcacacgggtgagaatacgacgctcgcgcagattgtgcgattagtggaggaggcccagacgagtaaggcgcccatccagcaactggccgatcggattgccggctactttgtgcccttcgttgttgtagtgtccagtataacgctgattgcttggatcatcattggtttttccaatccaaacttggtgcccgtggccatggagcataagatgcacatggaccagaataccatcatcgttagttatgcatttaaatgtgccttgagcgtgctggccattgcgtgtccatgtgctttgggcttggccacgcccaccgctgtaatggtggccactggaacgggtgcgatcaatggcgtgctggtgaaaggagccactgccctagagaatgcccacaaggtgagcgagcgaataaccatgcaaaactttaacccacttatacgctttttacgcttcccaaatattttaggtaaagactgtggtcttcgacaagaccggcaccataacccatggcactccgatgaccagtaaggttaccctcttcgtcacagcccaggtctgcagcctggcgcgtgctctgacgatcgtgggagccgccgagcaaaacagcgagcatccgatcgcctccgccattgtgcacttcgccaaggatatgctgaacgtgggcgccacacctcaggccggcagctttggcaagagcagtcacttccaggccgtgcccggctgtggcatccgcgtcaccgtctccaattacgagcagactctgcgacaggcgtgcaacgccgatcggatcattaactacgagaacctgcatcgcactcatccacagggttcggtgccggtggacaatggagccagtatcgaacacttgctgccgcagcgcagcgtacgcaagtccatggagctgaacaatcagcagttgctatccgacttggtattggaaccggaggaagagctccttacggatcagaaaatcatcgattcacccgagattctggtgctgatcggcaatcgcgaatggatggaacgcaatgccatcgaagtgccgctggagattagcgattgtatgacgcatgaagaacgaaagggacacacagctgtgctatgcgccctcaacgggcagctggtgtgcatgtttgcggtgtccgacatggtcaagccagaggcccatcttgccgtctatacactaaagcgaatgggcatcgatgtggtgctgctcacgggggataacaagaacacggcagccagcattgcccgagaggtgagtgtccagcgtgctcatagcaatactgttcctaggctaatgaacttatgtatattcattaggttggcatccgaaccgtgtacgcggaggttttgccctcgcataaagtggccaaaatccagcggatacaggccaacggtatacgcgtggccatggtgggcgatggagtcaacgacagtccggcgctagcgcaggcagatgtgggaattacgattgcagcgggcacggatgttgccgccgaggcatcggacattgtcctgatgcgcaacgatctgctggatgtggtggcttgcctggacttgtcccgctgcacggtgcgtcgcattcggtacaacttcttctttgccagcatgtacaatctgctgggcataccgctggccagtggcttgttcgcaccgtacggcttcaccctgctgccatggatggcgtccgtggccatggccgccagctccgtgagcgtggtatgctcatcgctgctgctcaagatgtatcgcaagcccacggcgaagacgttgcgcacggcagagtacgaggcgcagctggcggcggaacgcgcaagtgggtccgaagacgagctggacaagctgtccctccatcgtggccttgacgatttgcccgaaaagggtaggatgccattcaagcggtccagcacatcactgatttcgcgcattttcatgcacgactacgggaacatcacttcgccggatgccaaatacggggagggactgctggatcccgaggagcagtatgatggccgcaccaagatcgtgaggagtcgcttccatgccaatgacagcaccgaactgcaaaagctgtgagctaaacgatggcaactagcaagctactagcaaccacaatcaaaccgaagaccttaaaacgacaaattttcagtgaaattgttagcggactataaattgaaccagtaagagagcgaattataaaaacctatgtacatatttgcaaattgttttgacaaaggttgagcactaggatactagggttatctttgatctacgtgcagtctaatatgagtttgtgtgactcacatgtgggaaaagatataggtatcttaagaaaatattctcggtatgtaaatatatatagcataatcacgaagtcattcactttcattttaagtatggttttttgaactactgaggtgcctttttatgttaaagccactacatacttgtcttttcttacaaacgttgtattggagattgtagaaaacaaagatgacatttcgttaccactgattctagagatcttttgttccaaaatcaatttgtgaccggttttccatttcttagtgccgcacccacaccgtcccccttttctatacaattgttattttcctatcttttttattttattaagaaacctacaacaacaaaagttcgatacgatagcttcttcttttccacttgattatattattattattattgtatacaaatcttttttttttttgttataatcgtaagtgcaatatttttattattaagttcaaatgaacaaaggcaaaggagtccacagaccaggagataaaacccagacattaatcatcattgaactattgttactcattgttaattcacattatcatatatatgcacatatgcaaaaggtaaaataaatcaaaagacgaaaatcgaacaaaaagaccatttgaccccatatcggcattaatccttaattgtgctattcgcggacgacgaacacttgtaagacaattgggcacaagcataaggcaaattgaaacgcaaaagaacgattaacattctttatgtgtaactttattgtttataaacaaaaagc

SEQ ID NO: 2699 - DNA, 3963 bp, DROSOPHILA
aaaaacataacgggagcggagcagctgttgcctgctaattgaaaaattagacacaagaacgcaaaattgtgagtttcgtgtggagtttggccaagtgaaaagcgttggcgggaggcgactactccaccacaacaaatccagtagtagctgcaatacgactcacccgactccacaaagttagtttagtgacacaattcggtacgtgcgatagggcgaggggcaactcaaaagttcaaaatctcaagtatatcaagtaattccgcatcgtcgtgttccgcccacccaaaataatgcacattgaggatgccaagtgacgagagagtagaagcgacgatgtccacggtgcgcctgcccattgtgggcatgacttgccagtcgtgtgtgcgcaatatcacagagcacattggccagaaatcgggaatccttggcgtgcgcgtcattctcgaggagaatgcgggctatttcgactacgatccccgacagacggatcccgcccggatagccagcgatatcgacgacatgggcttcgagtgcagctatccaggggatgcagcagatcctcccgaaactcccgccagcgcatggaccaacatacgggtggtgggcatgacctgccagtcgtgcgtgcgcaacatcgaaggcaatatcggcaccaagccgggcatccattccattgaggtgcaactggcggccaagaatgcccgcgttcagtacgatcccgcccagtatgatcccgcccagatagccgagctcatcgatgacatgggttttgaggctagtgtgcaggaacctcgatcgccatcccaatcgccgtcgcccgcccccgcctcatcacccaaaaagagggcaactcctactcctccacctccttcatatgctcaaaatggttcggcagtggccatacccgtcgaacaggagctactgaccaaatgctttctgcacatccgaggcatgacgtgcgccagctgtgtggccgccatcgagaagcactgcaagaagatctacggcctggacagcatcctggtagccctgctggccgccaaggcggaggtcaagttcaatgccaatgttgtgacggccgagaatatagcgaaatcaatcacggagctgggcttccccaccgaactcatcgatgagccggacaacggcgaggcggaggtggagttggagattatgggcatgacttgcgcctcctgcgtcaacaagatcgagagtcatgtgcttaaaataaggggcgtgaccaccgcctccgtcacactgctaacaaagaggggcaaattccggtacatcacggaggagacgggtccccggagcatctgcgaggcgatcgaggcgctgggattcgaggccaaactgatgaccggccgagacaagatggcccacaattatctggagcacaaggaggagatacggaagtggcgcaatgccttcctcgtctcgctaattttcggtggaccctgcatggtggccatgatatacttcatgctggagatgagcgacaagggacatgccaacatgtgctgcctcgtgcccggcctgtcgatggagaatctggtgatgttcctgctatcgacaccagtgcagttcttcggtggctttcacttctatgtgcaatcctatcgtgcgatcaaacacggcaccacgaacatggatgtactgatctcgatggtcacgaccatctcgtatgtgtactcagtggccgtggtgatcgccgccgtgctgctagagcagaatagctccccactgaccttcttcgatacgccgcccatgctgttgatcttcatatcgctgggtcgctggctggagcacatagccaagggaaagacctcggaggccttgtccaagctgctgtcgctcaaggcggccgatgccctgctggtcgagatatcaccggactttgatatcatcagcgagaaggtgatatctgtggattatgtacagcgtggcgatatcctaaaggtgataccgggagccaaagttccagtggacggcaaagttctgtacggtcactccagttgcgatgaatcactaatcaccggggagtctatgccggtggccaagcgaaagggatccgtcgtaatcggcggttccattaaccaaaacggtgtgctcctcgtagaggcaacgcacacgggtgagaatacgacgctcgcgcagattgtgcgattagtggaggaggcccagacgagtaaggcgcccatccagcaactggccgatcggattgccggctactttgtgcccttcgttgttgtagtgtccagtataacgctgattgcttggatcatcattggtttttccaatccaaacttggtgcccgtggccatggagcataagatgcacatggaccagaataccatcatcgttagttatgcatttaaatgtgccttgagcgtgctggccattgcgtgtccatgtgctttgggcttggccacgcccaccgctgtaatggtggccactggaacgggtgcgatcaatggcgtgctggtgaaaggagccactgccctagagaatgcccacaaggtaaagactgtggtcttcgacaagaccggcaccataacccatggcactccgatgaccagtaaggttaccctcttcgtcacagcccaggtctgcagcctggcgcgtgctctgacgatcgtgggagccgccgagcaaaacagcgagcatccgatcgcctccgccattgtgcacttcgccaaggatatgctgaacgtgggcgccacacctcaggccggcagctttggcaagagcagtcacttccaggccgtgcccggctgtggcatccgcgtcaccgtctccaattacgagcagactctgcgacaggcgtgcaacgccgatcggatcattaactacgagaacctgcatcgcactcatccacagggttcggtgccggtggacaatggagccagtatcgaacacttgctgccgcagcgcagcattctggtgctgatcggcaatcgcgaatggatggaacgcaatgccatcgaagtgccgctggagattagcgattgtatgacgcatgaagaacgaaagggacacacagctgtgctatgcgccctcaacgggcagctggtgtgcatgtttgcggtgtccgacatggtcaagccagaggcccatcttgccgtctatacactaaagcgaatgggcatcgatgtggtgctgctcacgggggataacaagaacacggcagccagcattgcccgagaggttggcatccgaaccgtgtacgcggaggttttgccctcgcataaagtggccaaaatccagcggatacaggccaacggtatacgcgtggccatggtgggcgatggagtcaacgacagtccggcgctagcgcaggcagatgtgggaattacgattgcagcgggcacggatgttgccgccgaggcatcggacattgtcctgatgcgcaacgatctgctggatgtggtggcttgcctggacttgtcccgctgcacggtgcgtcgcattcggtacaacttcttctttgccagcatgtacaatctgctgggcataccgctggccagtggcttgttcgcaccgtacggcttcaccctgctgccatggatggcgtccgtggccatggccgccagctccgtgagcgtggtatgctcatcgctgctgctcaagatgtatcgcaagcccacggcgaagacgttgcgcacggcagagtacgaggcgcagctggcggcggaacgcgcaagtgggtccgaagacgagctggacaagctgtccctccatcgtggccttgacgatttgcccgaaaagggtaggatgccattcaagcggtccagcacatcactgatttcgcgcattttcatgcacgactacgggaacatcacttcgccggatgccaaatacggggagggactgctggatcccgaggagcagtatgatggccgcaccaagatcgtgaggagtcgcttccatgccaatgacagcaccgaactgcaaaagctgtga

SEQ ID NO: 2700 - protein, 1209 aa, DROSOPHILA
MSTVRLPIVGMTCQSCVRNITEHIGQKSGILGVRVILEENAGYFDYDPRQTDPARIASDIDDMGFECSYPGDAADPPETPASAWTNIRVVGMTCQSCVRNIEGNIGTKPGIHSIEVQLAAKNARVQYDPAQYDPAQIAELIDDMGFEASVQEPRSPSQSPSPAPASSPKKRATPTPPPPSYAQNGSAVAIPVEQELLTKCFLHIRGMTCASCVAAIEKHCKKIYGLDSILVALLAAKAEVKFNANVVTAENIAKSITELGFPTELIDEPDNGEAEVELEIMGMTCASCVNKIESHVLKIRGVTTASVTLLTKRGKFRYITEETGPRSICEAIEALGFEAKLMTGRDKMAHNYLEHKEEIRKWRNAFLVSLIFGGPCMVAMIYFMLEMSDKGHANMCCLVPGLSMENLVMFLLSTPVQFFGGFHFYVQSYRAIKHGTTNMDVLISMVTTISYVYSVAVVIAAVLLEQNSSPLTFFDTPPMLLIFISLGRWLEHIAKGKTSEALSKLLSLKAADALLVEISPDFDIISEKVISVDYVQRGDILKVIPGAKVPVDGKVLYGHSSCDESLITGESMPVAKRKGSVVIGGSINQNGVLLVEATHTGENTTLAQIVRLVEEAQTSKAPIQQLADRIAGYFVPFVVVVSSITLIAWIIIGFSNPNLVPVAMEHKMHMDQNTIIVSYAFKCALSVLAIACPCALGLATPTAVMVATGTGAINGVLVKGATALENAHKVKTVVFDKTGTITHGTPMTSKVTLFVTAQVCSLARALTIVGAAEQNSEHPIASAIVHFAKDMLNVGATPQAGSFGKSSHFQAVPGCGIRVTVSNYEQTLRQACNADRIINYENLHRTHPQGSVPVDNGASIEHLLPQRSILVLIGNREWMERNAIEVPLEISDCMTHEERKGHTAVLCALNGQLVCMFAVSDMVKPEAHLAVYTLKRMGIDVVLLTGDNKNTAASIAREVGIRTVYAEVLPSHKVAKIQRIQANGIRVAMVGDGVNDSPALAQADVGITIAAGTDVAAEASDIVLMRNDLLDVVACLDLSRCTVRRIRYNFFFASMYNLLGIPLASGLFAPYGFTLLPWMASVAMAASSVSVVCSSLLLKMYRKPTAKTLRTAEYEAQLAAERASGSEDELDKLSLHRGLDDLPEKGRMPFKRSSTSLISRIFMHDYGNITSPDAKYGEGLLDPEEQYDGRTKIVRSRFHANDSTELQKL

SEQ ID NO: 2701 - DNA, 3947 bp, DROSOPHILA
ttttctatacagtgaaaatagcgtgtaccagacagttgataagaattctctggggatcaacgactcctcagttgccatttaatgcaagttccaccttacattcaagaaatttgataagttagctttcttttcgatactatatgatgatgtcattcaaatgtatagttttaatgtatggtgaaattccgctgatagataattccatacacgaatatcttatatcagtccgcaaataatagacgaaatttttaaaaaatgcaataagcagcgactagcttatgattcaagcccggttccattttcttttcggcgtttaagtggtggcttaagccagtgaatcattcactaatagaattaggcgccaattttagagaaccgctaccgttttcacctacatatttccattgttttgctggctatcagctaactcgagatagccttagacccaaaccaaaagaattgaaaacaagtggcgcgtgtgggatcttccggatcgatgccgattctgacgtatgttggacaccgactgcattcgtagagaacttttcggcggagcttcgaattcctccagtgattatcaaccaaattatcaatggaactccatgcgcgttgacaatgcccctgaagtgacctttgtactctgactgaatcagcacaaatgaacgatagctgcttggttgccagcccaatccattacacatcacatatttttatatgaaacctgtctgcctaggtcactgtagagaagacgtttagagctgagttgatttgctaacaaaaatagatatatatttaagctatttaaaaacagtgcgtataacttgaaaatctcaaaaatataaataagaatagggcttcatttctgactgtagagtaaaaatagcggctaattggataagatgaccatttaatactaggcaaagacactaagctaatagatacaggctggcaggcgagctgtgatttttgtttggttctcagcgaatgccgctgcttctgctcacttcggtttgatgttcgccgccagttcgtcggcggtcggcgtggatgtgtcggctgcggtgacaggttggggcaccggctggacttctggctggacctcgaccgtcttcgctgtgctcaggctgggctcgcgctcctcgtcggactcggtggattcgcggattagctgcaggggcgttatcagcttgccaccggccaccttgtacatatcacaggtctcgttcacgtagcggttgaacacgtccggcttgtcggcatatacgtggtggccggcgcccgtcacgatcttgatgtccaccatattgctgccgcgctgcgacttgatcttctcccccgacgacgagtcgatccacgaacgggagccgtagatgaacgtgattggtatgtcgctgcgcacgtccttgatgcggtgaatcatggggtgcttggcccatccaaaggattgcatcattgtgtggaaggcggactcaccgctgggattctgcgcattgcactggtgtatgtactgcggcagcaagttgatatcctcctcgatggtgctctggaactttcgcataatgtctggccgcgtcttttgcaccacccactggccaaagggtccggcggcgcggagagcccacaacggatttagcggggtcagtactctagctatggcccgcacccagagcggtattgttttgccgttggtcgaatccgagggcttctcggggaagccccagggatcggctagtatgaggtgtttcacacgctccggatgtgagagggcgtagctggaggcaatgaagccgcccatcgagtggcccaacagaatcatgtcgttgatgttcatctcgcgccgccactcctccaccgatttcacaaattgcttctcgcacaccagcgcatccttggcgaacagcggccgagagctgcgaccgaatccgaggatgtccatggcgtatactggtcggcccttggcaaaggcatcgaggttcatcacccacagggcaatgcctgcgcccaggccatgcaggagcaccagcggcacctccttggactcggtattcatgctgatggtccagatcttatccgcttcgcccaccgccggcccgatatccacgaagaagccgcggtagggcagcttcacgtacgacagtatcttcttctccacggcacgcagcatagttggtgagctggatgtccagttacacaaccatttccagagaaagaatctattgttccggggatcctgcaggtgagagatgaaagtgacgagtgaatttggggtgttgctggggtgagcgttgggagcgttgtgggttcgatgggcacctctagccgctggctatgtcatccatgccaggtggtccgacccgaaaattacttaaccagcggctgtcggttaattgcgcagttgctagcgaaatgtggctgggtaattgggtatatctttttgggattttcgtgatttcaccaggcagggccgactacgatggtaaactgaacctgggcctggggatctgctcgccctgcttacctctaggtccatggacgatttagattccgatcccagcgcaactgttggctgtggcaggttcgaaatagtgacgctggtggatgcggccgttggatccaccacgccgccgctcgccaatgctagcggttcgctcatctcgctcacgatccgatcgatctgatctctcactgctgatttctattgccacaaggttagggtgtgtgcggggggagtgtggtatcctaacaataatgttttgccaacatttgcgcgctacatacgtgcgtacccgtcgaaagtcgagagtttcatgaatactgacacgggagtgaattcggatttgtagcactagtactgccgagttgggatgactttgtacttctgctagtgttccgcggaaagtggcctggcttgctctgattcaagttccgtgtcgcaattacatgttatctattctaatggtgaaatacttgttgttgttgctgcaagtctactgggaagagcgactaacgcatacaggcgcacttagcaggcggagtgcggtcacaccatcagctgggccgatcagctggccgccgacagtgctggtcaacggttagcagggatggcgaaagggggttttgaaaataaaagcatttaaaatgtatatattacatttatcctgttgaaaacgggttgaaatatattttgtattgcccgataaacggtgaattattaatatttaaaccaagctctcatgagacagacttttaattcatatttttgttttattcttccaattggattaaggtatatgagaaattttttgaagccctgtgtgttttattttggattcgtgcttaagtctttttttgaaaacgtacttttgatagttttatgttcaaaccagatctcatagaatatagtggcaacggaaccgactcctaaaagtgcaattttcctccgcggcagaagaagaaacatgcatcaacacggcgtatacggtcactttaaccgggtcgtgctccaagagaattcctttctgcaaatggacggcataaacaagtacaacgagtttgtggcgctgcacaagccacagctggagtcctccggtattccgctgatattttggccggctctgttccgaaaactgaccacggaaaccttcgatgccggcgaggcactccagttgatgctgatcgactacgatgaggatgaacagcagaatccggccgaggacgatgacagtcccaaccctgtgttcgcactgggcgtagcccgggagcagggcataaaggccagtgatcctcaggccatctatttggtcgatcacgcctggacgttccggctaaacggtgctcggcagcagctggaggagtatccgcaactggcggagcgactttctgccatcactggcgttgaccttgagctgaaggatcgggtcgacaagatcctgcgccgtctgtggaag

SEQ ID NO: 2702 - DNA, 1659 bp, DROSOPHILA
ataacatgtaattgcgacacggaacttgaatcagagcaagccaggccactttccgcggaacactagcagaagtacaaagtcatcccaactcggcagtactagtgctacaaatccgaattcactcccgtgtcagtattcatgaaactctcgactttcgacgggtacgcacgtatgtagcgcgcaaatgttggcaaaacattattgttaggataccacactccccccgcacacaccctaaccttgtggcaatagaaatcagcagtgagagatcagatcgatcggatcgtgagcgagatgagcgaaccgctagcattggcgagcggcggcgtggtggatccaacggccgcatccaccagcgtcactatttcgaacctgccacagccaacagttgcgctgggatcggaatctaaatcgtccatggacctagaggatccccggaacaatagattctttctctggaaatggttgtgtaactggacatccagctcaccaactatgctgcgtgccgtggagaagaagatactgtcgtacgtgaagctgccctaccgcggcttcttcgtggatatcgggccggcggtgggcgaagcggataagatctggaccatcagcatgaataccgagtccaaggaggtgccgctggtgctcctgcatggcctgggcgcaggcattgccctgtgggtgatgaacctcgatgcctttgccaagggccgaccagtatacgccatggacatcctcggattcggtcgcagctctcggccgctgttcgccaaggatgcgctggtgtgcgagaagcaatttgtgaaatcggtggaggagtggcggcgcgagatgaacatcaacgacatgattctgttgggccactcgatgggcggcttcattgcctccagctacgccctctcacatccggagcgtgtgaaacacctcatactagccgatccctggggcttccccgagaagccctcggattcgaccaacggcaaaacaataccgctctgggtgcgggccatagctagagtactgaccccgctaaatccgttgtgggctctccgcgccgccggaccctttggccagtgggtggtgcaaaagacgcggccagacattatgcgaaagttccagagcaccatcgaggaggatatcaacttgctgccgcagtacatacaccagtgcaatgcgcagaatcccagcggtgagtccgccttccacacaatgatgcaatcctttggatgggccaagcaccccatgattcaccgcatcaaggacgtgcgcagcgacataccaatcacgttcatctacggctcccgttcgtggatcgactcgtcgtcgggggagaagatcaagtcgcagcgcggcagcaatatggtggacatcaagatcgtgacgggcgccggccaccacgtatatgccgacaagccggacgtgttcaaccgctacgtgaacgagacctgtgatatgtacaaggtggccggtggcaagctgataacgcccctgcagctaatccgcgaatccaccgagtccgacgaggagcgcgagcccagcctgagcacagcgaagacggtcgaggtccagccagaagtccagccggtgccccaacctgtcaccgcagccgacacatccacgccgaccgccgacgaactggcggcgaacatcaaaccgaagtga

SEQ ID NO: 2703 - protein, 454 aa, DROSOPHILA
MSEPLALASGGVVDPTAASTSVTISNLPQPTVALGSESKSSMDLEDPRNNRFFLWKWLCNWTSSSPTMLRAVEKKILSYVKLPYRGFFVDIGPAVGEADKIWTISMNTESKEVPLVLLHGLGAGIALWVMNLDAFAKGRPVYAMDILGFGRSSRPLFAKDALVCEKQFVKSVEEWRREMNINDMILLGHSMGGFIASSYALSHPERVKHLILADPWGFPEKPSDSTNGKTIPLWVRAIARVLTPLNPLWALRAAGPFGQWVVQKTRPDIMRKFQSTIEEDINLLPQYIHQCNAQNPSGESAFHTMMQSFGWAKHPMIHRIKDVRSDIPITFIYGSRSWIDSSSGEKIKSQRGSNMVDIKIVTGAGHHVYADKPDVFNRYVNETCDMYKVAGGKLITPLQLIRESTESDEEREPSLSTAKTVEVQPEVQPVPQPVTAADTSTPTADELAANIKPK

SEQ ID NO: 2704 - DNA, 3389 bp, DROSOPHILA
catcctgcagggatcatctggcggagttaatggaatcgccggcgtgacgacaccagctcccgattccgatgaggcgggctactaggatgtgtaaatagcaacgattcaaggccaacaaatggaagctgtaatttatcgttgaatccctattcgtttcttcccacatccatcagaatctttgttgaatttccaaccccctcgctcgaatcgtttttatttttttttgtttacaccctagttaagtttcatgtttgtaaatattcggcataaacaaatatatatatatagagaaattcacgacactacaaaagcgaataaaaccgaaaacagaaaaccaatataacacgcacctagtttcgatttggggccttggccttgtcaagtttttggattttggattttcgaattggattttggatccctctgctcactcacatggctcatctatatatatttatctctttgtttctctatatatttgccagaccaagagactacgtcgggcggggggaaaagatctgagcgatgccgccgaaatcatgagcgatgcctccctggaacttccctctgaactattgaacaaatctctagtgacggtcaccaatatctcaaagtcgttgtctcgcctgattttggtaagtaatatatattgtagatagaatatggctttatagtaaatagaagaaactagtaacgtttgtttaataagcaatgaatttggagatattgttatattatttatgatattctttaaaatggttataatatgttgttgtttttatatttatactacagaactccgctcgtcgctactcccgcttcgtgctcttctttaagccagttttcggagatgccctggtggtcaagggatctgaagatcccactacaaccaccacagtacgcaccaccacaaccaccgaagagactgacaagctcaacgaagtctaaatagaatttaatttttaattaatcttttgtattacatttgtttttttttatctcttaacttgttgggcgtttgtttaatatgcgactggtgtagtcaataaagttacttatttataaagcggcgcgtggacgaaccatcatgcgaactattttcagggaacctttgggtccatttaagaaaccgcgccatagaatgcccttgaaaccatcaacatcccgttctagaaggcgttgatataggccaaatgggttgctataggaaaataaatgttatactattcgataataattattgaaatgaataagaacgcacgtgagattgcaagagccgccataccaaaaagctcccgactgctgagccgcgcagttttgctcattttcatcattaaccctatcgtgggtactgaatttctttcccgtgtggtcacgcaatgcatcggcagcatcgccgtgataatcccccaagacattcagacgatactgttccgattcactgccgatgctaaagtgatcatatagggcatatctcagctcctgctttcgattctgcagctgaaccaaaagctcatagttgtcactgctcgtaatctgatgcaatttatccaatccgatgaagaactcggtggttagtggcccgaaaccgatcttgtaatccgcccactttcgattgaaatcctcactgccatcataacgattaactaccattgtccaaccaccgtttctgaccttctgatcgcaaaaaacaaagaacggttccacgttcgagcggggtctgattcgcaccacaccgtgctgctgtttcaggcagtttgccggagtgattggaacggccgctgcaccaccgttggccaggagttgcggctcaatgtctaggctgttgtgggagaagggactgtgaattatcacacatgaataacaacgactgccggcaaatacctacaatcgagatgccagtgcattgggcgaagcgagtcccaccaccggtgcacttcccgctcttcgcagatccaccaactgctcctggagactgcctatctgctccttgacactagctatttcgttgttcagcgattgcattcgagtggtaagaccacttaaagccgaaactggacagctgctggaactctataaaaatcatgtcaagacttactgtacgaatgtaacacgatgagctcgctttgttttttgttctacaagcatagactttgaactgtagaatatgatttggccgtcggtttttcccaactcaccgcatttcccaaggagggcggaaccaacagtcctccgcccagatccgtttgtgtggtggatagacaggccatggccatgaccaaggcatccagctgcagcatctgtgacattttggcactttcgattactggccgactagctaactggctgactgactaactaactaactaagccgcaaagtgtacatcaactactgatctgaggcgcaatgcaagtgtgaattgaaacaaaggtcactcgattgattacctgtacacgttgcgtgcattgcattgaaaaccgggtatgctaagcagatcagtaagtgttgggcagtgctatctcatccagtgattgcaagttcacaacacttaaaagtaacggatcaataatttaaaacttaaactctttattgcaacaatatatcagccattgatatgtttgacacaaaactattcaattaaagggattaaggcctatgtgactaaaccgtgatcttctcatcactgtgatcgcctaacgcggcgtgacttttgtggcatctccaatcagccaccgactagtaactaatccagcgaactaatgagccaacttgcttagtcagttgcccagtcgagcagttgcaactgcgttgcattcgctggcatcatttttagcctgaaatcggaacacgtacgtcggtgtaaatatatataattaaatcgcgatggcgctggaggcgctcgtcacggctttggcttgcctcagcaccaccacaaatgccacgagtaacttgccaggaaaacacttttccgtgataatgagaaactcggcggagccctttttgctggctgaaaatgtgagtatggccgctgtttcgagactccatttatttgagcatacccttcttgtttcaggataccgccagttgtccagtaagcactttggctggcttagcagcacggtgagtccctcttaaaggtccttacaccttgtttacataatagtattacattatttagtgtacaattcatgacagatgagctgcaaaatctcaaaacagagcttaatgagctacagggactcattgaggagtataaaaatcagggcaccggaatacccattgcaaccaggttgtaagttaataaaggtagaaaataatttattatatgtccataattgtaacatgaacttctataatttttagacttcgcccattgccagcaagtgtg

SEQ ID NO: 2705 - DNA, 1138 bp, DROSOPHILA
ttgatgtacactttgcggcttagttagttagttagtcagtcagccagttagctagtcggccagtaatcgaaagtgccaaaatgtcacagatgctgcagctggatgccttggtcatggccatggcctgtctatccaccacacaaacggatctgggcggaggactgttggttccgccctccttgggaaatgcgagttccagcagctgtccagtttcggctttaagtggtcttaccactcgaatgcaatcgctgaacaacgaaatagctagtgtcaaggagcagataggcagtctccaggagcagttggtggatctgcgaagagcgggaagtgcaccggtggtgggactcgcttcgcccaatgcactggcatctcgattcctagacattgagccgcaactcctggccaacggtggtgcagcggccgttccaatcactccggcaaactgcctgaaacagcagcacggtgtggtgcgaatcagaccccgctcgaacgtggaaccgttctttgttttttgcgatcagaaggtcagaaacggtggttggacaatggtagttaatcgttatgatggcagtgaggatttcaatcgaaagtgggcggattacaagatcggtttcgggccactaaccaccgagttcttcatcggattggataaattgcatcagattacgagcagtgacaactatgagcttttggttcagctgcagaatcgaaagcaggagctgagatatgccctatatgatcactttagcatcggcagtgaatcggaacagtatcgtctgaatgtcttgggggattatcacggcgatgctgccgatgcattgcgtgaccacacgggaaagaaattcagtacccacgatagggttaatgatgaaaatgagcaaaactgcgcggctcagcagtcgggagctttttggtatggcggctcttgcaatctcaccaacccatttggcctatatcaacgccttctagaacgggatgttgatggtttcaagggcattctatggcgcggtttcttaaatggacccaaaggttccctgaaaatagttcgcatgatggttcgtccacgcgccgctttataaataagtaactttattgactacaccagtcgcatattaaacaaacgcccaacaagttaaga

SEQ ID NO: 2706 - protein, 332 aa, DROSOPHILA
MSQMLQLDALVMAMACLSTTQTDLGGGLLVPPSLGNASSSSCPVSALSGLTTRMQSLNNEIASVKEQIGSLQEQLVDLRRAGSAPVVGLASPNALASRFLDIEPQLLANGGAAAVPITPANCLKQQHGVVRIRPRSNVEPFFVFCDQKVRNGGWTMVVNRYDGSEDFNRKWADYKIGFGPLTTEFFIGLDKLHQITSSDNYELLVQLQNRKQELRYALYDHFSIGSESEQYRLNVLGDYHGDAADALRDHTGKKFSTHDRVNDENEQNCAAQQSGAFWYGGSCNLTNPFGLYQRLLERDVDGFKGILWRGFLNGPKGSLKIVRMMVRPRAAL

SEQ ID NO: 2707 - DNA, 3426 bp, DROSOPHILA
taattatttttaggtataaacataaataatacaaggattgtaaagaaatatacgatgacgcaagtatgttagtccaaaactatgaaaaacgttactaattgagcactgtaaaataaactgtgcatatctagaacaatttatgatcaatgtttagagctaaaaaattcagttgcccccaagaagaaaacaggtggattttgtttattaagaagtatctttattatatatgcattaggtatagttatcatttaacgatgcatataaatattacacgtacgaatgtaagttgtaagcattaaatcgtaagagggtcaacagaacgaggattagacaagattcgaacgtgaggacttttggggggatctttgcattttacggcccgggctatgtgatcgtagttagtctatcgctacgttatatcatagagcgttctatatgcgcctgcttagggttcgaatttcaacttggtgttgttcttcttacagtgaaaacggagccgtggactcgaggtccttgcgtccggacagttaatctacggctattttatggttattatcggtattatcgcgttagcgtgggctggctccttcctgtgagatcattaaacgctagtcaaacacacatcagtcgtcttgtccatcgtatcgtatccatttcgccaccagcactaacagtagagttaacatagctattgaaaggtgtctccataaaatggcgctatctcatctcatgtacaaaatgtagccgaatctacactaaacttaggttacaacctaccgcgttacgtctgcgtgatcttaaacttcattgaaacatgaacgggatcgggaacgggttgcgggctatcgggaagcggttctcggttaggcccaggctcgtcgttaccgcctcgaagtattacatatacattgatagaaaatataagtcaactatatctaggttttgcacattcaagagtttgaaacaacaaacttaagctaatttgaaaatcttagttcgctgagcagcgaaagcgtctacttgttcagcagaaacatgagcaggctgcaagaggaagttgttaatataataaatatgcgatttcagcaggctgtttcgatgattactcaccggaagttaatgcctttgttggccagcatacggttgcattcgctggagccgctaccgccgactccatctggcaatggcaagacatagtactcgctttcggtactctgaaattgcaggacaagagtaaacttatgactagtcgacagttcttattattaatatttttattctcaccgtctcggtgaattcatgtttgtatatctgcgtggaaactttcatatccgagaacggacccttcagcgcaaagaaatgtatgctcatgggcgtgctggtcttggtcttgaggatcagctgataggtgatggtccgctcgttggactgatgcggatcgcgctggctgttgttgatgcgcgccttcaccacccactgttgattgaaggccgagaagcgggccgtctcataaaagagcttgtgcacgtactcgtctgtgcggtagggtttcatttggaggtctaaaaagatagaatgtaagtacatataactagaaagcgatcgagcgttagcataactctgcccgcatttgtgtacgagctcagctacaataaccattaatgattagatttaattccatagagcaattaagacagatctctgttccgtgctacacccaccattgaatatgatcttctcgtagctaagcaagtcaatcagggtgttaaacatcttcttctcctccttgatcctatcgtcgtgggcctccagggctgccattacctcgtagccagacttctggggatgcaagcagttgcgctcatgctcgttggctgcgaattagatggatgattagttagtacatccatgggatgcggcgaaggcactcactctcgtggtagggtccccgccactgacagccaatgcgatggtatttgcacttggtcgggcgctcctggcactcgtgttgttcatggcgttcgagagatttgtatgggaactccttgttgcagaactacagacgaaagcaagcaaattaatatcaaatgctggaattggtaaagtatagaacagcttacttgacactcgctgggcaattctgaggcggccttctccacggccaagttgcgcgacgcagtgctcttagaaatttccacgcggcaattggggcacgtggcaatctgatcgcgcaagctagggagagaatatatttgaaaaaaaaaggtcgcaaggaacagtaaacagaactcgttagttggagttggtggtggcatttgcaaggatcttagtttggtttctagagtgtgggttcataccgtccatccgccagcagatgcgtgaaacaggcggcgcacatcagatggcccatctggcactgcaaatggaaagagcagagagaaagggaaaggcgggttcagtaaattcacgactaagcaatcgagcggtagatggatagagattgagaactaaaacaaaagtggaatgaaaattaacctgcaattaaagaaaaaagaagaaaagttttctattagtcaaaatacggccttgttgcagagtgcttgtattgtgttttttatggctgtgggtggggtgtggtttttctgggtgggttcttcgaatgaatgaatctattttggagatgtctttgaggtgaggaaaatggcgaggcattgtgtggagtggagtggagttcttggcgggaggtgatgatctgaggtgaggtctgaatgtgtttagctttaggggctccgggttgtgtgtagtttcattttttggttgaaataaaaacgctattttgtagtttggttttattttgcattctcaagtttgcactctcctttgcaaatttattgaaatcagtttcacgtttcattttttggggtttcttttttcgtttgtttagtttaagatacatttcagggtttaactttaatgctactattatgaagtctgttctatgtacttagcatttacggttacaatcttgttccttgtttcttttttgttttttgttttttgcgtgtgcttacaaaggttacgaaatcgagattattcacttaactagtattaatcattaaaagatttatttaaaaaaggttgcagcaaaatcgaaatcataaacaattaatagttcttggttaaatttagcgtagttatcatatcatataaggtgtggttatttctcttttttgcgttcaaagccaattacaacgtagtggtgtgtgttttcaattggttttcggacatgagttggttggtcaagcaatttgatgaaaggtcgggaatagtggaccgataaaaaaaaaccagataaagtcgaaaaccccgcagtgaaatactcaaccccgccgctgctgtaagaagccttcataaaaatcgccgcat

SEQ ID NO: 2708 - DNA, 921 bp, DROSOPHILA
ccatttgcagtgccagatgggccatctgatgtgcgccgcctgtttcacgcatctgctggcggatggacgcgacctttttttttcaaatatattctctccctagcttgcgcgatcagattgccacgtgccccaattgccgcgtggaaatttctaagagcactgcgtcgcgcaacttggccgtggagaaggccgcctcagaattgcccagcgagtgtcaattctgcaacaaggagttcccatacaaatctctcgaacgccatgaacaacacgagtgccaggagcgcccgaccaagtgcaaataccatcgcattggctgtcagtggcggggaccctaccacgagaccaacgagcatgagcgcaactgcttgcatccccagaagtctggctacgaggtaatggcagccctggaggcccacgacgataggatcaaggaggagaagaagatgtttaacaccctgattgacttgcttagctacgagaagatcatattcaatgacctccaaatgaaaccctaccgcacagacgagtacgtgcacaagctcttttatgagacggcccgcttctcggccttcaatcaacagtgggtggtgaaggcgcgcatcaacaacagccagcgcgatccgcatcagtccaacgagcggaccatcacctatcagctgatcctcaagaccaagaccagcacgcccatgagcatacatttctttgcgctgaagggtccgttctcggatatgaaagtttccacgcagatatacaaacatgaattcaccgagacgagtaccgaaagcgagtactatgtcttgccattgccagatggagtcggcggtagcggctccagcgaatgcaaccgtatgctggccaacaaaggcattaacttccgcctgctcatgtttctgctgaacaagtagacgctttcgctgctca

SEQ ID NO: 2709 - protein, 280 aa, DROSOPHILA
MDATFFFQIYSLPSLRDQIATCPNCRVEISKSTASRNLAVEKAASELPSECQFCNKEFPYKSLERHEQHECQERPTKCKYHRIGCQWRGPYHETNEHERNCLHPQKSGYEVMAALEAHDDRIKEEKKMFNTLIDLLSYEKIIFNDLQMKPYRTDEYVHKLFYETARFSAFNQQWVVKARINNSQRDPHQSNERTITYQLILKTKTSTPMSIHFFALKGPFSDMKVSTQIYKHEFTETSTESEYYVLPLPDGVGGSGSSECNRMLANKGINFRLLMFLLNK

SEQ ID NO: 2710 - DNA, 5578 bp, DROSOPHILA
tcctttggctcacacaccacttcaagaatttcgaggattttgcagataggtcgcccggcaagttcatcaatcagtttccgttcgagtacgtgatcaccatcaaggatctccttagcattgtgggccgccgggcggccaaggagcaccatgatagccttacgcttgaaacgtttccggcatggctccccaccacctataatctgtccaccgaagtaaaggagttcgcggcttactaccaaacgagagcagccaagggcctcgacaaccactggattatcaagccctggaacttggctcgcggattggacacacatatcacggacaacatcaagcagatcgtacgtctaccggccactggaccgaagatagcgcagaagtacatcgagcgaccagttctctttagtcggcaggaggtggaaggcagcgttaagttcgatattcgctatgtaatcctgttgaaaagcgtcaaacccctgaaggcatatatacaccggaagttcttcctgcgtttcgcaaaccatcccttcacgctggatcacttcgatgactacgagaaacactacacggtgatgaactaccagacggaggcgcagctgcatcacgtcaagtgcgacgacttcctgacgctctggcaggaacagtatccggataacgattggtcggctctggagcagcagatctgtagcatgctgctcgaggtgcttcagtgcgccagtcaagcagatccaccctgcggcctggctccttgtgcccaatcacgagctctttacgcagccgacatcatgctgcggtggaaggacgataaggagaagttgatggagccccagttgctggaaatcaactggactccggactgcaaacgcgcatgcgactactatcccgacttcttcaacgacatcttccgtctgctcttcctagacgaagaaaacgacgatagcttccgggtactgacgccagacaattgacattaaccgagcaaataaacccagttatcccaaagtttaatgcctattcgtgtatttcatttcgtttagactatacaaaacttaaatagcttgccatttgtacaatatacaagtaggtgtgtatgcttctatgcgtgggtatctaagtcctaaaggcttaactaactaagatagcaagtcagttggtggtgtggcttatggttttatcatagcatggacaagttctagagttatgaatttagtgtaaagttcaaagagtgagcttaaagttaaggcgtttacaattctcaattgcaaatggcacttgatgaacaatgaataatggtaaatagtgaaatgacaactttacaggatgatatcccaagaacatacattagagtcgatgctaactttaacttaaggcaatttcaaaggcacccttttcaggctaggctcacggtggaacggaaacgataaagtcaatccaaacataaagtaaatatgttaaagtcttctatataactataagctcccaagggtcttgtacttggattagtttgcttcaacacgcaggatcttggcttagctttgaataatatacctacgaactaatagtgtgaaatgcagggtatgtcaatgaatgaatcttagactacctatgtggtacaactaaattaccgcttacagctaaggctcgactactaccactaaacgcagacctcgtcgaagtccaggcgtatcttctcgtcagcggaagccagcttatgtatagtctttttgatgcgcagcgctggcaagcgcacgtcggggttttggtgccagcactccttcatgagcttggacatgccagtcattaactaaaaaatgagaacaacaatgagatcaaagatctagagaatggcaatcgaaagcgacttaccgaatccgagctccagcgattgggaatggagggcctgtagttgtcgatgcagaccaccttgcgcatatcctcgaagctgggatccattggcaccacatcgtagaagggcaccttgtactcctctgctatgccgcaagaaatggtgcggcgacaaacctcccagaggacaagtccaaatgcgtaaatatctgtccggcgtagtgcttcgaagcattctaaatcaatgctacaatagacaaattgttaatgtaaaaatattcttttttgtactgccaataagcacacacctttcatcaagaacctctggggccatgtagcgcttggtgcccactttggggttgttgcccaggtccagttgtcctgtgacgtgcgaatgggtaacggccagtccaaaatcggctatcacgcaggagccgttcgaggtgaccagtatattctttgacttcaaatcgcggtgggccatagctggcttgccttgcttgccgaatatctctgtgtgcaagtgtaccagcccattagctatggacaggcaaatccataccatatcgttgtggcttagggcgttacggtttaggtgatcaaagagcgagcccagtggatagtagtgcgtcatcagccaaagttgggtgcacgagttccgcgacgtcatgtcagagccgatgaatcccagaatattttcatgtcgtagcaatatggtgctgaaaaacaaagaacgattatttatgattcatagagcaacaggtaggtagtcatgactggactagggcacttttcttctggggaaacagttaaaaatttctacagctacaaattacagagtcacaaataatctgttgctcacctatatatctctgtctcccgcttccaggactcctcgtcgcgactgaagaatatcttcacggcgatgctttcgccatgccagtgaccgcgccaaacctcgccgtatttgcctcgtccaatgcactcgatcagggtgacctgtttggctagcgtacgctgcactagcagcggcaatccgctgcccgagccggaggtcaccgagtgctgcagatactccctcagcgtactgtccccggcgctggtggcgcggagcagctcatcattgaccagatacgcttccgggtcctgtttggttcgcgaggcagccagacgcttgcgatggctacgacgaatgaagaagatggtcacggcgcccagcagagcgatgaccagaaaaggacccagaacggcgacgagcatcttgcttatgctactggtatccgcggttatcaccgtcacatcattgctgtcgaagggcagcagttccggaaagtctccctcattgcagtaatcaccggcacagcagaccacattcacgaacttccccgtattgcgtttactgggcccgttgatcttcaaggagttctggctgcagatcatgggcagttgatccggcgaggtgctgcagccgcgtgactcctgcacctgaccatcggcatcgcgtgtgcgcgacttccagcactgttgaagttcggaaattaagttacatttaagttttaatcaagtttaaggtggagtattcacctgaatcgcattctggcaggtgtgggtaaactcatagggatcccgacagggcggctcgcaggagtagcatttgtatctgataaaaaaaagagagagtttaataagattgaagaagaatcggttacgcaaacgggcagcttttaattgttaacatttgggtataaaagtataatatactataaaatatttaaaaaaaatggggttttttaagtaaaattatgaatattttcaaaattttaactaaaagttaaccagtttatgatgttttagttcatgagtcgtgtaggttttaccttctcttcatgcggcgcttactcttaatgtgtctcctaattaaggattagcagcatggcaattaggagggaaatgagattagcaatacaaagcctttgggcggaagcgggagctacaagctatgggctcaagacttaagatataatcacctgggatgcgtctgcaccgagttctgtggcacggccggtagctccttgccattgagatgggcggatgaggcggaggagagctccatgtctaagtccggtatgtcctcccgcagatgatcgctgatttcggctgaaacataacaaatgcacattaaaccatatgcacatagcatatacatatgtacacacatggacggcccaaccaacacaaacgccaccagcactaacacacacacacacatgcacacaggcgccccagcaagttctgtatacacacacagaacggtggtgtgcgtgggtaaatcattgagaaaatgcacttatgctgcaaacgcccacgacatccgtttatataatacattctgtgggatccatcaggtgcttctttcaccaatcagcattccgagggcacttttttcgccttggcctggccaaatacgcaacgcaattggccagaaccgcagcatatgaaaacaaacccaaaacactcagtgacttttcaaggcattatatgtggctctaaaaccccataaaatcgaaatttctcttgcgcactctcttcaccaagcacttggtaattgattaacactaattgatgcccacctctggcattattgtacagcagaaacgtcaatagaaaaactaaatatatattggactccattgctagaaatgttatttgtccgagcctatcggaacctatcgatatacttctagcgggcagtgtgaccagggcccacatctgcacataacatatttcacataaaataccgggtcttcaaatttcccaaatcccctgcgtaaaaataccaaagcacaacacgcacaccaacacgagcagccggtcagcggaaaagtttctagaacgtcaaactcgaactcccatcaaagagtctttggcaaaggagcccatttaacagacaattattttattcagtgccgttgtgttcacaaagcataattgtgttcaatttaggtaagtggagaagcaggagatcttcagtggaggagttttcgtgccattaagttgttttcctgagtgaaattaacggatttacctacccggtgtcatggaatataacaaaacatttgcttagttagggttttcatgtccactgcgaccggtttgtccagaaaatcaatgggtttcagctagtatcgatcaaacgacagagttttccccctcccacagcgcaaacatgtgtttttagtcacgtaactgttataattttcctcgttttccttgcaatggagaagatacacacgccgtagggaatcatcttactgaccccccaattaccacccccgccctcctgcacatatatgtatgtacataagtttgtaatatcagttggcagacgcaatacaaacattatctttgtatatacatacatatgtgtgtagagatgtggtcgtttattgtacaattagttgggttgcgccagaaatcgcataatgtgtgtgtgagcgcaggggctgcgggggcagaatcccgctaaacaaaaacaattggggcaagtggtttttttcgcgcttatcaaaagcccctcactgcgcagaggacgctctctctgtgggccgctcgactcgcaaagagcctccaatatttgccggcgtttcgggcgtagcgctcccattctcataaaaacgctcgtcgggaaagcatcgcaccaaaactcgaaaaaaaaaacagaaaacatttacgcgtt

SEQ ID NO: 2711 - DNA, 2409 bp, DROSOPHILA
atatcgataggttccgataggctcggacaaataacatttctagcaatggagtccaatatatatttagtttttctattgacgtttctgctgtacaataatgccagagccgaaatcagcgatcatctgcgggaggacataccggacttagacatggagctctcctccgcctcatccgcccatctcaatggcaaggagctaccggccgtgccacagaactcggtgcagacgcatcccagatacaaatgctactcctgcgagccgccctgtcgggatccctatgagtttacccacacctgccagaatgcgattcagtgctggaagtcgcgcacacgcgatgccgatggtcaggtgcaggagtcacgcggctgcagcacctcgccggatcaactgcccatgatctgcagccagaactccttgaagatcaacgggcccagtaaacgcaatacggggaagttcgtgaatgtggtctgctgtgccggtgattactgcaatgagggagactttccggaactgctgcccttcgacagcaatgatgtgacggtgataaccgcggataccagtagcataagcaagatgctcgtcgccgttctgggtccttttctggtcatcgctctgctgggcgccgtgaccatcttcttcattcgtcgtagccatcgcaagcgtctggctgcctcgcgaaccaaacaggacccggaagcgtatctggtcaatgatgagctgctccgcgccaccagcgccggggacagtacgctgagggagtatctgcagcactcggtgacctccggctcgggcagcggattgccgctgctagtgcagcgtacgctagccaaacaggtcaccctgatcgagtgcattggacgaggcaaatacggcgaggtttggcgcggtcactggcatggcgaaagcatcgccgtgaagatattcttcagtcgcgacgaggagtcctggaagcgggagacagagatatatagcaccatattgctacgacatgaaaatattctgggattcatcggctctgacatgacgtcgcggaactcgtgcacccaactttggctgatgacgcactactatccactgggctcgctctttgatcacctaaaccgtaacgccctaagccacaacgatatggtatggatttgcctgtccatagctaatgggctggtacacttgcacacagagatattcggcaagcaaggcaagccagctatggcccaccgcgatttgaagtcaaagaatatactggtcacctcgaacggctcctgcgtgatagccgattttggactggccgttacccattcgcacgtcacaggacaactggacctgggcaacaaccccaaagtgggcaccaagcgctacatggccccagaggttcttgatgaaagcattgatttagaatgcttcgaagcactacgccggacagatatttacgcatttggacttgtcctctgggaggtttgtcgccgcaccatttcttgcggcatagcagaggagtacaaggtgcccttctacgatgtggtgccaatggatcccagcttcgaggatatgcgcaaggtggtctgcatcgacaactacaggccctccattcccaatcgctggagctcggattcgttaatgactggcatgtccaagctcatgaaggagtgctggcaccaaaaccccgacgtgcgcttgccagcgctgcgcatcaaaaagactatacataagctggcttccgctgacgagaagatacgcctggacttcgacgaggtctgcgtttagtggtagtagtcgagccttagctgtaagcggtaatttagttgtaccacataggtagtctaagattcattcattgacataccctgcatttcacactattagttcgtaggtatattattcaaagctaagccaagatcctgcgtgttgaagcaaactaatccaagtacaagacccttgggagcttatagttatatagaagactttaacatatttactttatgtttggattgactttatcgtttccgttccaccgtgagcctagcctgaaaagggtgcctttgaaattgccttaagttaaagttagcatcgactctaatgtatgttcttgggatatcatcctgtaaagttgtcatttcactatttaccattattcattgttcatcaagtgccatttgcaattgagaattgtaaacgccttaactttaagctcactctttgaactttacactaaattcataactctagaacttgtccatgctatgataaaaccataagccacaccaccaactgacttgctatcttagttagttaagcctttaggacttagatacccacgcatagaagcatacacacctacttgtatattgtacaaatggcaagctatttaagttttgtatagtctaaacgaaatgaaatacacgaataggcattaaa

SEQ ID NO: 2712 - protein, 570 aa, DROSOPHILA
MESNIYLVFLLTFLLYNNARAEISDHLREDIPDLDMELSSASSAHLNGKELPAVPQNSVQTHPRYKCYSCEPPCRDPYEFTHTCQNAIQCWKSRTRDADGQVQESRGCSTSPDQLPMICSQNSLKINGPSKRNTGKFVNVVCCAGDYCNEGDFPELLPFDSNDVTVITADTSSISKMLVAVLGPFLVIALLGAVTIFFIRRSHRKRLAASRTKQDPEAYLVNDELLRATSAGDSTLREYLQHSVTSGSGSGLPLLVQRTLAKQVTLIECIGRGKYGEVWRGHWHGESIAVKIFFSRDEESWKRETEIYSTILLRHENILGFIGSDMTSRNSCTQLWLMTHYYPLGSLFDHLNRNALSHNDMVWICLSIANGLVHLHTEIFGKQGKPAMAHRDLKSKNILVTSNGSCVIADFGLAVTHSHVTGQLDLGNNPKVGTKRYMAPEVLDESIDLECFEALRRTDIYAFGLVLWEVCRRTISCGIAEEYKVPFYDVVPMDPSFEDMRKVVCIDNYRPSIPNRWSSDSLMTGMSKLMKECWHQNPDVRLPALRIKKTIHKLASADEKIRLDFDEVCV

SEQ ID NO: 2713 - DNA, 4756 bp, DROSOPHILA
aacgtcggcagagacgccagcagagccgttggacagcattgcggttgcagcaaaacgattcgatttcgatttcgcggctaacggtgcatttcgagggggcggcgtggtgggcggggccagggccagcataggtatatctttatatatatatatagctgcgccacacacacacacaaacacttagttaaatcgcaatttgtgtgtgcaaaataatgacaacccaaaaaaaaagccaaacaaaatcagcacttgcacaaaggcacacaaatatatatttctatattttttttagcacagttaacgcgcacctctgtaaacagtaataacaaaaaaaaaaacaagcagcaacagctaccgcaactgcgacgtcgacggaggcagcggctgcggcagaggcgtcggtgacctgcactttagttcccgaccagaaactcgcgtttataaataaatatatgcatgtgcatttaataaatccgttagcgcgcgctctgttgctcttgtcctgcgaattcggatctcggattttttcggatcggagcgatacagtcggaacaatcgtgtgtgtatatttggcagcgcttcgaatttctgttctgttctgttccgttttgttcgaacgcactggcgatgacacccggccgatagcgcgactgtccgataagcagcacgccaattgcgatatctagatagctgcctagatagtttttgtaaaggtaaaaatctaggaaaagtgccaaactataaagtatttaattcttaaatttccgaaaataaatagttaatgcattcagaatgaaaaatacttagtggtaataatataatgtagcatttagcttaaagtaaaattgtttcaatttgatatataaaaagttatgcttagatttagcacataaatgtttgcacaaaataataaaataaaaatgtttaaatttcgcatataattgcaagaactacatttttaatatcttgaacaacactgcttagcccatccgtcgactatcgatggcttatcgatatgcgcaaactagcagttcttccatccctatagagatgagcgaaattgcaattttctgttttaatattcgcagcagaaaaaacaacaaataaacagcaataaattggaatatatgggatatatagccgcgatttaacttgcttaaatcgtaagactgaaaaagcgtgtaaagcccgccgaggtgaagtcgccaaagcgaggaaactcgctcatctctattacaaatacgaaaatgaaactgcgtgcattctaaatggtaagttaaacgtccagaaaaaacggttagtgctgttcactaaacaaaatacacaaataaccggctataattaattgttttccaattgctgtgaggaaaagcaataaacattcctcggcatttgcagcaaaaacaacaatcaaaataagcacgcacactaatacgcaaatgtttttctctattttcgtttatttctctttttgtttgtaaaacaaagtgcataaaacgcaacaattacacgctttaatggttttgtacacttcgataaattgtgaaatacattttcatgcaaaaccaaaacacacccactttttacctgtgcgaatgtgtgtgtgcatgtggaaaatccttttacagtgcgcgaaatgaaaacaagtgcgaaaatctataaataagtgcaatgcttatgtttatagtttttattaccatgactcacatagaaaattactttgtctgcaaaaatagaacgcacaaatattgccggttcaaaaataccggttagcccggttaagaaaatgcaaaaaaaaaaaacaatgtttaagaaccacaaccactttggccacaaaaccctagcccacatttaatttcaattaaaattacgtaaaagaagaaaaaaaatgtctcattcaatgagtaaacccctagcggttatattttgttaactgagttatctaaaaaaaaaaaacaaattctaaaatagaaaaatgagtgtgtaaggtaatttccggcattcatatggaacactctagaggaactatgtatttaaaaatactttgccctagaaaatgtgttgagctgcttaaaagtttgaggtacacacaccttttacaatccatttaaatattcaaaaaacacgtcgtcacgtttgtgacatcaagttctagtaatatgtagaaataccttggaaatttaactagttgcattattattattattattattcaaatatatgtatctatttaattacaatatttaaatttctctaccatgccagccacatgggaaccatgaccaaggactacgactatctgctaaaggttctactggtgggcgacagcgatgtgggcaagcacgagattctctcaaacctggaggatccctccacggagagtcccttctgcagtgggaacggtaagtgctgggtatatcctttgaacgaccaccggatatgcaagccaatctaatagactgcacatctcatatccttcaaacggtagcctacaagacgaccaccatcctgctggagggcaagcgggtgaagctgcagctgtgggacacctccggccagggacgcttctgcacgatcattcgctcctattcgcgcggcgcccagggcatcatcctcgtctacgacatcaccaacaagtggagcttcgacggtatcgatcggtggctcaaggaggtcgacgaggtcagttggaaattaaaaatgggattaggaaaggcagcacattggagagatctttgttacgacatttttactagctgtaaattagtacttaaagtgtggctacttatatttttacaagatagattcacaattaatacgacaatgctgtaacgaagattagattatagattccaatgtgttttcctttcttggtttaccattaatgctttccattattaactccatatgtacgattaatttacagcacgccccaggaattccgaaggttcttgtcgggaatcgcctgcacttggccttcaagcgacaggtggcggccaaacaggccgagacctacgccagccgcaacaatatgtcctgcttcgagatatcgcctctctgcaacttcaacatccgcgagtccttttgcgaactggcgcggatggccctgcatcgcaacggcatggagcacatctggcgcagcaataagggtaaatataactaggttattcaatgggagaaggatagtgcctttcgagtttaacgaacagtaattcattatctagtttgtgtagaccaggttcaatttcattaatctcttctatttttagttaaattgtgaaaaagtcatgacaaggccttgaggtcaattttgattgagctccaattaaagcgttcattatgtcaagccaatcattaatctttttccgaccgttgaataacacttaatcgctataatgtgtgaacttttgttgattcacaaataactaaaacttatgaacttatgaacttatcagatgaactttagagaaaactcgaaatgcactctccccagcagaaagacatgtatattgttcgttaattcacttagtaacccactttgaatgccattgcagtgctgtcgcttcaggaattgtgctgcaggacaattgtgcgaaggacgagcgtgtatgcgatcgattcgctgccgctgccgccgtcggtgaagtcgacgctcaagtcatacgcgctgaccacgtcccagtgcttcaattcactgacccagagctccaagagcaagaaccgctgcaagacgccgacgagcagcagtcggaatagctgtgcgatcgcgtgatcgttgccttgtaggccgccgcccagccgcctacgccgccacgcccctaaccgacattaactttaattgagctctacttatgtactctaggctataacacacacacacacacacacacccataccatacccatacccattaccatacacacattcaacccagctctttggttatatgttttgttttattgacattgatatttgtggtcaacaatgtttactttttacacagtaaagcatgcaccttttttagtttttaaccacccccatcccaggcccattcccccaacttctctattttgcattaatctaatgttgttaatattattatgtttgtataattctaatatttaatgcatcaaacacatcaacatataagaaatgaaaaacaaaaacgaagaaataacatcaagtgaaaatcaacttttatatggataaaaagaattaaattttttttttgtttgtttaccattcggattaaaatattcttagatatgtattgtaattgaagcgaattcagcaagagaagcacacacaaaggcgaattgataaaaataattcataatgaactagaaaactgtgttttcatttatttgccatccctttctgattcctggccagctgattccatctctttccatttaggtttctaatttgtggtaatttaaagtgaaagttcgctgcatctataataggatcagtctataaaattatgcaacttttttttaagtttctcttgaaaagctgcgttttcatattcatttggcatttttctagatgttaattcgagtgtaatgttgagtagaaccaaaactaaagtggaagaaagttaagcgatttctttgagagatttcttatatatatatctcgaaaatttgaaacagtactgagatagggtttttctgaagttaaaaaatatttgaacaacgtttgttaggatttaaccaatgaaaattatgcacatctgccacaactcttatttaag

SEQ ID NO: 2714 - DNA, 1013 bp, DROSOPHILA
cgatggcttatcgatatgcgcaaactagcagttcttccatccctatagagatgagcgaaattgcaattttctgttttaatattcgcagcagaaaaaacaacaaataaacagcaataaattggaatatatgggatatatagccgcgatttaacttgcttaaatcgtaagactgaaaaagcgtgtaaagcccgccgaggtgaagtcgccaaagcgaggaaactcgctcatctctattacaaatacgaaaatgaaactgcgtgcattctaaatgccacatgggaaccatgaccaaggactacgactatctgctaaaggttctactggtgggcgacagcgatgtgggcaagcacgagattctctcaaacctggaggatccctccacggagagtcccttctgcagtgggaacgcctacaagacgaccaccatcctgctggagggcaagcgggtgaagctgcagctgtgggacacctccggccagggacgcttctgcacgatcattcgctcctattcgcgcggcgcccagggcatcatcctcgtctacgacatcaccaacaagtggagcttcgacggtatcgatcggtggctcaaggaggtcgacgagcacgccccaggaattccgaaggttcttgtcgggaatcgcctgcacttggccttcaagcgacaggtggcggccaaacaggccgagacctacgccagccgcaacaatatgtcctgcttcgagatatcgcctctctgcaacttcaacatccgcgagtccttttgcgaactggcgcggatggccctgcatcgcaacggcatggagcacatctggcgcagcaataagggaattgtgctgcaggacaattgtgcgaaggacgagcgtgtatgcgatcgattcgctgccgctgccgccgtcggtgaagtcgacgctcaagtcatacgcgctgaccacgtcccagtgcttcaattcactgacccagagctccaagagcaagaaccgctgcaagacgccgacgagcagcagtcggaatag

SEQ ID NO: 2715 - protein, 242 aa, DROSOPHILA
MTKDYDYLLKVLLVGDSDVGKHEILSNLEDPSTESPFCSGNAYKTTTILLEGKRVKLQLWDTSGQGRFCTIIRSYSRGAQGIILVYDITNKWSFDGIDRWLKEVDEHAPGIPKVLVGNRLHLAFKRQVAAKQAETYASRNNMSCFEISPLCNFNIRESFCELARMALHRNGMEHIWRSNKGIVLQDNCAKDERVCDRFAAAAAVGEVDAQVIRADHVPVLQFTDPELQEQEPLQDADEQQSE

SEQ ID NO: 2716 - DNA, 3588 bp, DROSOPHILA
atgtgttatattacatcaaatacatacataggtttttctaaaattctataaaaaaaatcccgtaagattggcgttagttataaactttctgagaaataaccattcgggcgaacttcggtttagaactggaatatatacacacatatgtatatataggtatgtatatgtaaacacacatagacaatacaaaattatttaaaacaacaaatgtttaacgcgttcaagctgttctaccggatggaaacgacattattttataggcaaccagaaatcaataggaacgctgtgctcgattgcacaaactcttagataccctgcacgcaagcagtaagatcatattctaaatatatttaatatctttcaactacgctctatgcaatgtctgttattttcccaagcaattttgtaatattataattttataaattaattcaatttaaataccgtgtatgtacatacaatgtacacatacatatattaaaataaaagggtaccattcggtcggcattatcgtaggggttcgtaccacgaggttggtgcgaaattttatcaataagcagtcaaacaaacttacgtgcagccacagaagaacacacaaaaataaatgaaaacagtacaacgctgcattacacacatgccagctcaggtatgaatgtctacatacgcgtacataccatggacgtagtcttgattacatttgtaataattacaactgattacacgcccaaaccaaatacattgactaaacgatcaatcgtttaatagcgactagttaaagccacatttccatggtgaaccccttctgcataactgactacgcccttggtacatacgctgttcgttgagttggcgaagccgactacgaatgaacgaaacaaaaacgatgaaaaacagaacagacggcgatgaaatcgaaacgaaaaccgtatgtatgagggtatgtgtgcggtgagggacgggagagaacaacgcgcctgttgcaaaatttcagtgctgcactctcattcgtgacgaaaggatgtacgcccggttgtagtcgaatgaatccgtgtacatcatcgcccccacagatgccacgtggctctggatccgtggaaaactgcaacctggaatctgacggcctgcaactgctcgagatggctggaaaggaggactacgaggagctgcgcgaccttctgcagtcgtgggatgtcgccgatctgcttcctcacctgcaaggtatgtacatgcaaacatacgtacatacatgcgtactgtacatgcatgcgtaaatatgtacgtatgtatgtctgttcttatgtaccatatgtaaacaaagcgaagcatagacgctgataaagagcgagcaaaaagaggacgcgactttaaccctgtgcttgtcgccggcggttggttttaaactttggtttcgttgagttgggatctgcatacttcgcttccgttaaaacttggaactgctagaaattgtgtttaagggttaacacttttgttgtttaaagattgcaatatcacggcaatttactactactactgtttatgcactcatagttttaaagttaactgtctaaaagtctcttaaatttcttgatagtaaacgttattattcttcggaccaaaattgttattctttgccacactgtgttgcagatgaagccattaacgtggacgagctgcagatgatcaaacgtcatcatctgtccgagttgctgcgaaactttcgctttggaacccgcattcgcttcgagcatcacttggagcgctggcgccgctggctgaacgtaccgctccaaggcgcccagggccaggggtcgagccactgctccggctgtcgctgtccggagattctgggccaatcgcaatgtcaggagcaatcgccgttgcacatggaacagccgtcagagcaggaagaattgcacaagcctgaagatctggtcaagacaataccagcagaatcgctggtggccctcagtgatcccagggaaatgtcagttccctttccattgcctttggtccatccgcctgcgcagataaccgacgacataatgatggtcaaacaggagctgatgccgatgcagcaaactaggaagcctgaagctgtattggcggctgggtcttcaggaggaacctcaggcaacaaggaggatgcaactgccactcctgaccaagaagttagcattttgggcattctgcgatcctcgggtatgaaagcccagagcttgctggagcgtattggccagaacgatccgctggacgccgtgcagcgccttttgctcatccaactagtgtgcagctactacgaggagaaccagatgcacctgaccctgcagaggagtcacttgctggaacgcgagatactgcagcttttcccgcaggaacagctcagctattaccgcaccgagcgaaggggtaagatctacgtgagattcaccaacatgaagcgaagcaagaggctcagttcgtcgcgccaggaactcaaacgacgccgttccgagctgataagatcgattcccacggttcaaggacacgatgctagtgctagtgtgaacttcgccggcgaccaaatctccagtcccgatcgctccgattgatctggcttgttatgcagttggcagctcaatccaaagcctaaatgcaatgcttaacttaagttcaactagctactcgatgtgtaatttcttgactttatatctatgaatcgaccatttatagggtattttgcgggtcgacgcgatccgccgactgacgaaactaaatcgaaactcaattttggttacatggcctgtttttcttgtcttgaaggagggttctgttccgttcagctgtagctggaaaaaagtgattacatcagcggcgaaaatagctgagcgacggcgtgttaacaatcggcaaacacggcaagcgcggccagcgatttgctgactaactgctaagtacgtccaaaatgtgttttgcactgcgcaaaaatgtggctggtttttggacaatatatttgatgcatcacatgtactgctgatgaaatggtggttattaatcaaatcgaaaatactttatgtctagaaaggtagcgatttaatgctaagggctataaaactaagaactaaggagaaaatgtcttaaatgtttcttactcaagcaattagaatcctgatagcctgcgggccaagatattgcacacatttgttagagatacgtttcagtattagctggtttcttctttttcattttctgtttgctgaagatacacgaatggcaatggggcgtttcgctcgaaactaattaattaagttgctcgcttagtgctgcgctttcagtgtttttgttttttagtcagactttctggtcttttcgactctccagtttcgccgcacatgttcgctgctaattgcctttatcagtgtcgcgccggagagcaaacaaaactatctgcaggtcccaccagatagcgtgtaattgccttttggggctccgtttaacattttagccaccacctacatgggggtggcgattttttgcattctcgccttctacattttcagcattgttcgattccgccagccagcgcattccaatagatctctcggtaacccc

SEQ ID NO: 2717 - DNA, 1159 bp, DROSOPHILA
ctcattcgtgacgaaaggatgtacgcccggttgtagtcgaatgaatccgtgtacatcatcgcccccacagatgccacgtggctctggatccgtggaaaactgcaacctggaatctgacggcctgcaactgctcgagatggctggaaaggaggactacgaggagctgcgcgaccttctgcagtcgtgggatgtcgccgatctgcttcctcacctgcaagatgaagccattaacgtggacgagctgcagatgatcaaacgtcatcatctgtccgagttgctgcgaaactttcgctttggaacccgcattcgcttcgagcatcacttggagcgctggcgccgctggctgaacgtaccgctccaaggcgcccagggccaggggtcgagccactgctccggctgtcgctgtccggagattctgggccaatcgcaatgtcaggagcaatcgccgttgcacatggaacagccgtcagagcaggaagaattgcacaagcctgaagatctggtcaagacaataccagcagaatcgctggtggccctcagtgatcccagggaaatgtcagttccctttccattgcctttggtccatccgcctgcgcagataaccgacgacataatgatggtcaaacaggagctgatgccgatgcagcaaactaggaagcctgaagctgtattggcggctgggtcttcaggaggaacctcaggcaacaaggaggatgcaactgccactcctgaccaagaagttagcattttgggcattctgcgatcctcgggtatgaaagcccagagcttgctggagcgtattggccagaacgatccgctggacgccgtgcagcgccttttgctcatccaactagtgtgcagctactacgaggagaaccagatgcacctgaccctgcagaggagtcacttgctggaacgcgagatactgcagcttttcccgcaggaacagctcagctattaccgcaccgagcgaaggggtaagatctacgtgagattcaccaacatgaagcgaagcaagaggctcagttcgtcgcgccaggaactcaaacgacgccgttccgagctgataagatcgattcccacggttcaaggacacgatgctagtgctagtgtgaacttcgccggcgaccaaatctccagtcccgatcgctccgattga

SEQ ID NO: 2718 - protein, 372 aa, DROSOPHILA
MNPCTSSPPQMPRGSGSVENCNLESDGLQLLEMAGKEDYEELRDLLQSWDVADLLPHLQDEAINVDELQMIKRHHLSELLRNFRFGTRIRFEHHLERWRRWLNVPLQGAQGQGSSHCSGCRCPEILGQSQCQEQSPLHMEQPSEQEELHKPEDLVKTIPAESLVALSDPREMSVPFPLPLVHPPAQITDDIMMVKQELMPMQQTRKPEAVLAAGSSGGTSGNKEDATATPDQEVSILGILRSSGMKAQSLLERIGQNDPLDAVQRLLLIQLVCSYYEENQMHLTLQRSHLLEREILQLFPQEQLSYYRTERRGKIYVRFTNMKRSKRLSSSRQELKRRRSELIRSIPTVQGHDASASVNFAGDQISSPDRSD

SEQ ID NO: 2719 - DNA, 3387 bp, DROSOPHILA
cggaccgtctgaaatcggcggacttttagggacttgtgtcggcggattgcgaaattgaaagcgggaaaaccagacttaccgacaaattttgatgcccaagcaacaacacgcatgtggtgctagaggtggaagaaaaagaataatcgatgcttatcgatagcgtcgaagtttgcagaaattttgcaaattaataccccacaagtatcttaaatatcttgaatgtcaatatatattttttctatactttttttagattgaaagtcttctaattactttcagtttcataaacaaattagctgaacattaaagttggcaaaacatatttaaatgcattaatgtacattgcagttggcatcatttatttaaatgcaacagctgaagctcgcttctcatttaccatgttaaacttgcatatactttgttgtaacgtgattagaatttaacggatatatatcatgaaatataaagaaataagacgcgcgccatttatcgatagtcttgtgtgcaccgcgtgccagaccgatagatttgtttaaataccaagtaagtttattatgtctccctttgtgcaatttaaaatgttttcatttaaatatctatatttttaaaatattttccatatatatatattataagtaatattaagctattaatatttttagagcaaacacgctataaataagtgtgcccaaatataagttttagtatacatcggcattcttatcaataatcgtcaaactgacgttttctcgcttcaccattatcgattctcatcgatgtttttccagctctatctagttggcatctcgttagttgcgatagttggcatgttacgtgtgttttcggcttcgtcgcttcattctcgtctcgttctcgtttccttcctcctttattccgattcctcgttttgcgtgtattgcgcggtacaacgcatacgaacaaatttatccgaagcgaaataccgcgtgcagcaacaaaagaaaaacacactcaacaacaacaacacacacgcatgcacacacgcatgcagtcattatcgcaacaccaataacaacaggaagaacaacaacaacaaaaacatttctaacgcgctgaaaattgcggagtccagccttttatatttgctgcatttgctatctaacttgccgcacaattgttctgttccgttgacagcatcaaaaacgcattgttaaaaagaaattaatatataaattttaaacaaaacacaaaaaaaaaccaagaaaagaacgaaaaacgcgtgggtgcgcggtctgttgattttttttttgtggttaacaacaacaacaagaaccatcggagggacgaacatcaagaacaaccaccgttagcagtaagcaggagaatcaaaatggtgggcttgcgtcaacgtttgtaccacgttctggctggatccgtgctctccgtttggggacgcgtggagcacatactgaatacacgttccaatagcaagatgcaagtgatacgcatgaagaccaccgagggggagaagattgtgggcaccttaatacccaagtcctgcttcgagccattggtggccgatttgcgcagtgattcggagaagcaggaggagtttaactactaattttgtaaagattaccagtaccagtaccagatttcgttatttttttttcaattttgagaccgctttttcccacgtatcttccaaaccgaggccaagcaaaatttgaatccacagctaactaagcatgtgcagcaggcttcaacctattatataaatatatacatactataaatatatatacacactattataattacataccgtatgtgtaaaagtgcatgaattatggctcctggacaaaagaaaatgcttaagaaacgaacctttttttttcttatttttaaatagacttaatcgtgtacaaccataaacccatccatcagactttggctcgttatagttcatagaaacaccacactcacatactgacacacgcgcaacgtacagatgatatgatgacatatagagaacgaaatgtaaacgcttataaatggacttttctcaatgatttaatgattaatttatttttattattattattattattattattattattacgattattattattactatatatataaatacgtttttaattgtttttaatgtaacaattttaaggctgcagcgcggcgcagcaaaccccccaagataaggcattttttttaatcaaacaaactttgtaattaggtatttacgtgtaatgtaagtttaaccaacagacattgagaggcatctgaatataagttaagaaaatcgcgttaaatattcgctgaaaaatcatgtgaattgtgcacgcgtacgtacagttaataaatataaatgtgcggattgaatgaaagttttggtcttattaatcaaactatttatggtttaattaccctttctttaatgatgcgaatgcaaaggtaagatacagaatataataacttttttaaaacgggaatttacgaaaaatttaagaaacctagaatacttgatagcaaatcgattgggattcaaaacacaaactcaacgaggtatgacattccatatttggattattattttcaatgttttgattaaaaaaccgattattttttttacaaaaaatcagggaaaccatttttccgaaaattgaaatatttaagatcggttttttgggtataacttgactaaaaatggcctcacagcaaaaagaattaccattttatactccctattaccaatactaacctccctatcacttttgaacggattttgttaaataattttttggccaaattttcgcattttttgtaaggggtaacatcatcaaaatttgcgaaaaattgaaaagtcctagaatacccaaacttaaatgcaattcgattgggatttaaaaaacaaacgcaacgaggtatgccattccatatttggattattattttcaatgttttgattaaaataccgattatttttttagcaattgcgaaaaattgaaaagtcctagaatacccaaacttaaatgcaattcgattgggatttaaaaaacaaactcaacgaggtatgccattccatatttggattattattttcaatgttttgattaaaataccgattatttttttacaaaaaatcagggaaaccatttttccaaaaattgaaatatttaagatcggttttttgggtataacttggctaaaaatggtcacagagcaaaaagaattgccattttatactccctattaccaatactagccatccctatcacttttgaacggattttgtaaaatgttttttggccaaattttcgtattttcgcatcatcaaaatttgcgaaaaaatttaaaaaacctagaaaacccaagtgtttgaacttg

SEQ ID NO: 2720 - DNA, 5797 bp, DROSOPHILA
caacacacacgcatgcacacacgcatgcagtcattatcgcaacaccaataacaacaggaagaacaacaacaacaaaaacatttctaacgcgctgaaaattgcggagtccagccttttatatttgctgcatttgctatctaacttgccgcacaattgttctgttccgttgacagcatcaaaaacgcattgttaaaaagaaattaatatataaattttaaacaaaacacaaaaaaaaaccaagaaaagaacgaaaaacgcgtgggtgcgcggtctgttgattttttttttgtggttaacaacaacaacaagaaccatcggagggacgaacatcaagaacaaccaccgttagcagtaagcaggagaatcaaaatgacatcgaaaaaacgaaaaacactgttggatgccgatgacgacaatgacaattttgatgaagacgattcgggctccgatttcgacgatgacgaggatccagatcaaatagaagtgcccggtggaggtcgcgatttgaacacagccgttacgtacgcccaaaatatccgtagcggagtgggcgtggcgcccaaaggcggtatacccatacccataagtggggcgaaaattgttgttggcaataataaaatcaagccaatatcgttgttgcgcattaacaacaataacaacaatatagtcaccagtgttaacaatagaaacaacaacaatatcatcagcaccaacggcagcagcaataacaacaacaatagcatcaacaacaacagccagataataaaaacaacaacagtaacaacaacaccaaccactgtgggtgctacgccaacagttggaggcgtggcactgggcggaaagctaacagtgataccgatagcagggagaaacgtagccctagataataatttaagcaatatgccaaagaaactgaataacatggtaacggtgagttatgcaggcggagcttcccaaattcgcgccttaaaggtagccggaaatattggcggagtcgggaataatcagaagccgccaccaatagccacaactcccggaagcggaggaccggctggcggagcacctggtagcggagtgaaggggaacaactcaatgatggaggccgtacagaaactgatagcaatgaatccggaatacctaaccagtggcataccgaataccgtattccagatgtttatgcaatcaatgcaacgtccacaggcaactccgtcgccgaatcagccaatgaatcccggcgcaatggtgaccagtgcagctgcagcggctgcccacgcctcagcggttgcctatgtccagcaggaggaggatgaggtcgactacgaggagatgggcgtagccgagacatatgccgactactggcctgcgaaattgaaacttggaaagaaacatccggatgccgttgtggagacagcatcgcttagctccgttgagccctgtgatgtctactacaagctgtctctgccactcgaaacaatcaatagcggccatttgagcgccctgcaattggagtccattacgtacgcatcccaggcgcacgatcatctgcttccggacggcagtcgggctggattccttatcggagacggcgctggtgtgggcaagggtcgcacaatcgccggcatcatttacgagaactatttgaagggtcgcaagaaggcgctatggatatccgtgtccaacgatctcaagtacgatgccgagcgggatctcagcgatattggggcaacgcgtatcgaggtccatgccctcaacaagtttaaatacgccaaaatcagctccgatgtgaataacaattgcaagcgtggcgtaatcttcagcacatattccgctttgataggcgagtccaataacaagacgggcaagtaccgatcccgcttccgtcagcttctgcaatggtgtggtgaggatttcgagggcctcatcatcttcgacgagtgtcacaaggcgaaaaatctgtgtcccgtgggttctggcaaaccaacgaagacgggccagaccgttctggagctgcagcagaaattgcccaaggcccgagtggtctatgcatccgcaacgggtgcctctgagcccaagaatatggcttatatggttcgtctgggtctctggggtcagggaacggcctttggcaactttaacgactttatcaccgccgtggagagacgcggtgtgggcgccatggagatcgtagccatggacatgaagctgcgtggcatgtacatcgctcgccagctaagtttcaagggcgtgagcttcaaaatcgaggaggttccactctccaaggagtttcgcaagatctacgatcagtccgttgagctctgggtggaggccatgcaaaagttcaccgaggcggccgaactgatcgatgccgagagccgaatgaagaagacgatgtggggtcagttctggtcctcgcatcagcgctttttcaagtacctttgcattgctgccaaggtcaaccatgcggtgctggtcgcccgcgagtctataaaatacggaaagtgtgtcgtcatcggtctgcagtcgaccggcgaggctcgaactctagatcagttggaacgcgacgatggcgaactcaccgactttgtatctacggctaaaggtgtctttcagtcgtttgtggagcgccactttccggcacccgatcgtaatcgcatcaaccgcatcctgggtctctacgatgagacaccttccttgtcatccgttgccgattccacgtctagcttgagtaacaatagtaatatcaccacagcggctggcaaaaggaagggaagtaataacaatgataaccgatccacaaagatcaaaaagaagaagcgcagtggatcttgggaatgtagcgacagcgaggatgagaatacggatatgaaacgcaatcgaaaacgggatggaggcaactccaacagcgatagcgacgaggcaaatagtgatgacgaccttaagagtgatatagatgatgaagatgaggatcatgatgtggacagcgaccagagaagcgtggctagcgatgctagttccgattttaatcccttcttcagcggcagcgatagcgatattgacccctgggtgaatgctcgcagcaagaagtcaaagaaggcccagaagaaaagcaagaaaaaggtgaagaaggagaagaccaaaaaggaaatcaccacctcatcagcaaccgatcccagtggcagtacggcaatgtccgccactgttgttgctgctctgaatgcggtcaagaatcggaaatcccagctctccacacaggacaagattcaggatcttctgcaaaagaaacaagagctgaaaggcactgtcacgccggtgggtgtgaatggtgttaaactaaactatggtcctccgcccaaagatgcaattgaacgcgcttgcacgatgaaagaggagctgctgcgcaagatcgagcgactgggggcccgactgccaccaaatacgctggaccaattgatcgacgaactgggtggtcccgataacgtggccgaaatgactggtcgaaggggtcgcgttgtacaaactgatgatggtagcattcaatacgagtccagaaccgaatcggatgtcccactggaaacgcttaacattacggagaagcagcgcttcatggacggcgagaaggatgtggcaatcatttcggaagcggcgtccagtggtatttcgcttcagagtgatcggcgggtcttcaatcagcgccgacgtgtccacataacattggagttgccctggtccgccgacagagccatccagcagtttgggcgtacccaccgatccaatcaggttaatgcgcccgagtacatcttcctcatctcagatttggctggtgaaagacgtttcgcttctaccgttgccaagcgtttggaatcgctaggagcgctcacccacggcgatcgcagggctacggagactcgggatctctcccagtttaacatagacaacaaatatggtcgacaagccctggaaactgtgatgcgtaccataatgggctacgagtcaccgctggtgccgccgcctacggactacagtggcgagttctttaaggacatcgctggagccttggtcggtgtgggcattatcgtgaatagcgaaagtcatccgggtgtgctaagtctcgacaaggactacaacaacatatcaaagtttctcaaccgtattctcggctgtccagtggatctgcagaatcgtttatttaagtattttacggacaccatgacagcaatcattcagcaggcaaagcgcggcggtcgcttcgatttgggcattttggatcttggagctgccggtgagaatgtcacccgcgtccgacttattcggttcgtgcgcaaacatgccaccggagtggcacccacagagatgcacacggttcgagtggaaagaggcatgatatggcaagaagccattgacaaatatgccgatctgttcaacgagaacgagggcttctatctgtcccaccagctacgcaaccagaagcgaaccgccattatggtggtgattctagagtcacgcaacagcagctcgacgagcagtaccaccgatttggacagcggtagcaagaaaaagaaaactcacagcaaaaaggagatcatgtgtcagatataccgaccaaacactggtcttcaggttcgccacgaatcgctttttgagcttgagaagaagtatcgcaaggtggccagcgaggaggctgagccgcactggacggaacagtatgatgcctcggttaacacctgttcgcacgcatactggaacggcaactgtagaaatgttagcctggggaacgactgtgaggtgggcttgcgtcaacgtttgtaccacgttctggctggatccgtgctctccgtttggggacgcgtggagcacatactgaatacacgttccaatagcaagatgcaagtgatacgcatgaagaccaccgagggggagaagattgtgggcaccttaatacccaagtcctgcttcgagccattggtggccgatttgcgcagtgattcggagaagcaggaggagtttaactactaattttgtaaagattaccagtaccagtaccagatttcgttatttttttttcaattttgagaccgctttttcccacgtatcttccaaaccgaggccaagcaaaatttgaatccacagctaactaagcatgtgcagcaggcttcaacctattatataaatatatacatactataaatatatatacacactattataattacataccgtatgtgtaaaagtgcatgaattatggctcctggacaaaagaaaatgcttaagaaacgaacctttttttttcttatttttaaatagacttaatcgtgtacaaccataaacccatccatcagactttggctcgttatagttcatagaaacaccacactcacatactgacacacgcgcaacgtacagatgatatgatgacatatagagaacgaaatgtaaacgcttataaatggacttttctcaatgatttaatgattaatttatttttattattattattattattattattattattacgattattattattactatatatataaatacgtttttaattgtttttaatgtaacaattttaaggctgcagcgcggcgcagcaaaccccccaagataaggcattttttttaatcaaacaaactttgtaattaggtatttacgtgtaatgtaagtttaaccaacagacattgagaggcatctgaatataagttaagaaaatcgcgttaaatattcgctgaaaaatcatgtgaattgtgcacgcgtacgtacagttaataaatataaatgtgcggattgaatgaaa

SEQ ID NO: 2721 - protein, 1547 aa, DROSOPHILA
MTSKKRKTLLDADDDNDNFDEDDSGSDFDDDEDPDQIEVPGGGRDLNTAVTYAQNIRSGVGVAPKGGIPIPISGAKIVVGNNKIKPISLLRINNNNNNIVTSVNNRNNNNIISTNGSSNNNNNSINNNSQIIKTTTVTTTPTTVGATPTVGGVALGGKLTVIPIAGRNVALDNNLSNMPKKLNNMVTVSYAGGASQIRALKVAGNIGGVGNNQKPPPIATTPGSGGPAGGAPGSGVKGNNSMMEAVQKLIAMNPEYLTSGIPNTVFQMFMQSMQRPQATPSPNQPMNPGAMVTSAAAAAAHASAVAYVQQEEDEVDYEEMGVAETYADYWPAKLKLGKKHPDAVVETASLSSVEPCDVYYKLSLPLETINSGHLSALQLESITYASQAHDHLLPDGSRAGFLIGDGAGVGKGRTIAGIIYENYLKGRKKALWISVSNDLKYDAERDLSDIGATRIEVHALNKFKYAKISSDVNNNCKRGVIFSTYSALIGESNNKTGKYRSRFRQLLQWCGEDFEGLIIFDECHKAKNLCPVGSGKPTKTGQTVLELQQKLPKARVVYASATGASEPKNMAYMVRLGLWGQGTAFGNFNDFITAVERRGVGAMEIVAMDMKLRGMYIARQLSFKGVSFKIEEVPLSKEFRKIYDQSVELWVEAMQKFTEAAELIDAESRMKKTMWGQFWSSHQRFFKYLCIAAKVNHAVLVARESIKYGKCVVIGLQSTGEARTLDQLERDDGELTDFVSTAKGVFQSFVERHFPAPDRNRINRILGLYDETPSLSSVADSTSSLSNNSNITTAAGKRKGSNNNDNRSTKIKKKKRSGSWECSDSEDENTDMKRNRKRDGGNSNSDSDEANSDDDLKSDIDDEDEDHDVDSDQRSVASDASSDFNPFFSGSDSDIDPWVNARSKKSKKAQKKSKKKVKKEKTKKEITTSSATDPSGSTAMSATVVAALNAVKNRKSQLSTQDKIQDLLQKKQELKGTVTPVGVNGVKLNYGPPPKDAIERACTMKEELLRKIERLGARLPPNTLDQLIDELGGPDNVAEMTGRRGRVVQTDDGSIQYESRTESDVPLETLNITEKQRFMDGEKDVAIISEAASSGISLQSDRRVFNQRRRVHITLELPWSADRAIQQFGRTHRSNQVNAPEYIFLISDLAGERRFASTVAKRLESLGALTHGDRRATETRDLSQFNIDNKYGRQALETVMRTIMGYESPLVPPPTDYSGEFFKDIAGALVGVGIIVNSESHPGVLSLDKDYNNISKFLNRILGCPVDLQNRLFKYFTDTMTAIIQQAKRGGRFDLGILDLGAAGENVTRVRLIRFVRKHATGVAPTEMHTVRVERGMIWQEAIDKYADLFNENEGFYLSHQLRNQKRTAIMVVILESRNSSSTSSTTDLDSGSKKKKTHSKKEIMCQIYRPNTGLQVRHESLFELEKKYRKVASEEAEPHWTEQYDASVNTCSHAYWNGNCRNVSLGNDCEVGLRQRLYHVLAGSVLSVWGRVEHILNTRSNSKMQVIRMKTTEGEKIVGTLIPKSCFEPLVADLRSDSEKQEEFNY

SEQ ID NO: 2722 - DNA, 7806 bp, DROSOPHILA
cagtgttgcaacctgctgttccccgccaactcacaaatacaaattcggcctcgctgtctcgccaatactgcttccaatatgttgtattcgttctacttggcgtcaccaatacttctccagatatatatgtaactcattcttctgcagtaataatttccaaaatacttaccattttcttaaatgataagtaagagacttagagagacttgagaaataagtcaataagtttctcagttgtttctcgaaaaaaggctcacgctctttagaaaaggaatcccataacccattcctttcttatattgttatcttgaactggcttggttcttttgcctaattttacaaattcgaattttaccaagaggctgtcggcttttaaagaaaaatgtatgaatttggtaaaaatataattacataaagattaaacaaaattggccaattgaattggcgtagatagttctttagatcgaggcgtacagacaaacatggccagatagactcagctattggtcctaccagttgaatacttctcaactactcttttactcaacgagtaacaagtataagccagttaggaagacttccaaaatgtatttgtattaattggtgttaataacacatagtaacgatttattttaaacaacttttgtgtgtgcacattcatactctaaatgtaagaacaatctagcatgtaagtgcgaattaattttagcctacgacaatacacaatacgtgacaagtacttgtttggataaggtactgtagtaaagaaacaagttaggatttaagcataagcagtagttcaaatgcttatgtctcagttgttcgtaacacgcttagaactagaacaaaaacttctgttagcatttaaaatgcaaaaatctataattcaaaagaaaatcgatctatctataataacaagcgataaaatccggattcttccagatattgcacgataacacgatcgtccaacgtttaggtgctcaaagtggagttgtttctttcacacagatgacgtcacattttggccgctatcgatcgtcaggctagatgcacgcatacttagagatgccaatgataagttgctgtggtaaatgactttgggagataggagagcgctgttttcggtatctagagctggattcttaacgtagcaaaacgcagccgaaggtaaaaggatgtcggagtttatccctaggaggccgtcgaccgacaaagaattcgtattgaaggtggaagcagctgtgacgcacctgtcggtgctttcactttcaaccggaacgctgccgcagaaatgtgtgcgtgagctgatcagcttgttgcaggcggggcatgatcgcggggcatttttctcccgccgtcgcaagatttcataggcgcatctggaagagaccacatacataggaaaaattgaaataaaaaaaaatcaatatctttttaaaatgatcttttctttatttacaatctaaaggatggacaaacgaccagctaaaaaggagcggtctgttactaataaaggctgcaataattttacaaaaatttgggttctgtgaattcgaatttcgagcggacatacggatttggctagaaatcctggtcagaaataagttaaccaagtacggtcaaacgcttcccagtatacatagctgtcacctagtttttaacgaatgttggtacgtagttcagtatcggccagctaataaaaatgatatcagaccttcacgaattgggatgcctctggacgcgagacagactttgggaatatgcgattgcacgatttaaaaaaaaaaagctgcgtatcttatctgcatctctcaagaatgatcatactttgtagggacagaaacgctcccctttacagacttgataccgaaaatagtgttcatcaaacgtttttttttaaaagcttaccttgcatgaagaatgtgtgcacagggtagagcttccaagttttctggacgaagtccaagcaactccccacacgctccgcaatttaagcctaacgcagcatccgtctgattagctagtctaaaatgagtgttgtattgatcttcgtctcctagtgcccggtagatcaatgccagtcggcaacgaattttgcgaaccagaaactaaacaaccagcacaatcacaacatttggttatcaatgaataacagagcaggcaagtatgaaacataaatttcaaataaaaatatgtcaaaatgtatagctctcggaaattgtaagtgccgagatcccaatgttctacagtaaatggggtttacagtaaaggtgtaggctaaattcgttaatgagtaagtagccgctagacagaattggttccaggctatagagtatttatattcttgatcaagcggttttgatccctatgatctttgatgtcgccaagggggatggaatctatatgtcttcaatttcaaattccaaatcgcgaaaacttcttcttctttttagttttgctttaagtgctaatgaggtgtcatattccaaaagtataattacccacaaatgttttcacaacaagaaacataattttacagtaaaactttgtccatcaaatcagataattaaacaaaacagaggaggctttttatatatatttgctgtacatataacattactcaaaactcaaaatagcggcagaaggggtctgagctccgaaaatacaaagtggactaggtgggcagagttggcccagactggaaaatatagggtaaatagactgcgtttttatgaaatgtattttcggtgtctctcatatataaggctttttacaaacggtgtatggtgtaataaaatgatcctgatcaaaaatatactgtttagggcatatcgaatattttgggtatttgcattaccttggctccaattgagctggcaacttccagaagtcttgtgttaaattctagtggtctgcagttgcagatcttgttctgtagacggagtgtttccaagcaacgagctgctccatccatagcctccatttgggccatacgatcccctaagcttgccgatgtacccatagcttgttcatattgccggaatgcacgctaaaaaaatggttttattatagttttatcattaaaaatatacataatatgtaagttataatacaaaaatggaatataatataaagtgattcggatctgcgaattaactagatattcaaactaatattcacctagcgtgggctataaaaagtttattaaatggtccgatttctgtggcagttttagtcgttttctgagcttggcaacatatggaaacaaacttgcgctgactccatgtctctggaatcttcatgtccattctcagcattctagttttaatagttcctgagatcgacgtgttcatagggacaggcgtagccggttggatggttttggcggtttgtggacgttagagtgggcgtggcaaaaagttgtttatcaaatcaacagaaatttacctctatttaaacgagtttaatgtttaatggaatgtggtaatctaaaacagtggcattatttagttaaaaggtttaatcatattgatgcaaaggaaagatttctgtaaaagtttaagaattgctttgacacagaagttgacatggagtacgacattggtagcgttaaatgcaaatcggttttcgccttgaacttgactaactcgtgaccaaccactgttcacacgaaacccttctccacttcagtcctccagttatagaattattatatgatgaagaaaaaattgtttccagtcagaagtaaaatcgtagtcatattgcttaacaaccataatgggttctaatttggtattcatgcctgtccctccgactatcctatcctatttcaagcagcagattccctgtctagctgaactagaacacttcccagcggtggataacataacataacttctcgcacaaaattcaagttacgtttttaaagcattcgttagcacaatttttgtataaggccatgtggactataaaaactttacattcaacgctgcctttactgtgcaatacttacatccatgtccattttatttcggtatatgtcgcccatgacgcgaatacttctcgtgtaagtcgcctggtctccagaaataagggaaagcttcgtggcctcctgaaacgaaataattatgcggcgtgaacacaacttgaaatcagttgatggacaggctcgacgataccttacaataatcttgtgcatctccaagctcaccctgctttcggagagaaaccgccattcgcaatagagctgctctatggtggcatgagtttaggtcaccgagttgcagggatcgtgataagtcgtaggctttagaagcgtatgttgcacttttatcgttatcctgaaggcgtccgaaaagctcagaaagcgcgacatacacttgtaactccagtgatggatctccaatagctgtagcaattttgtaggcaccctgcaaaccctccaaagccctagagaacccacccatttctaggtatacacgtgcaaccgtcaaatggacaagtccacttctgcatttagtgccgcactcattgtaaagtgagtgcctggcataactcagtgatcgctctaagcctcccaagctggcgtgtgccctgctgagatttaagtacgtctcggctctcatatttggcgaatcaagctcctctgaaattctaagaaaatcgaagtactcagctagtgggagtggatggtgaaatttcaaaaatcttatcttaaagtatataaatatttagtcatgatctcttgactaagtaataataaatcccaaaacttacccgagctgctgatgactgaattctattgcctcacgaaattttccccagtccatatgtgcctgatacaaatatcctagtagctgaaagcagtcctctctttggcacgtccctttcagtgcactacgccaagtacgtacggcctccgtttgattgttttgttcatatagccgtcgtcctcgctcgatctggaggagaatatatctgtattggtgatattgacatgtgtatatataagtttcacaccttccgtttagctatgtactgtcttaggctttgctggcaggacaaaaagcaactgataacagaacctgatcgtaatagcgcctggctagcccataccgaacgggatcctacatctggactagatccatatcccgccaaccgcgaaaaactctcatctaagtgacacaagtctgtaaaatatgtaacaattgttaaaacattgaaaacattcttttgaagctttaacagaagtccgaatcactgctttttttaattttttaaaaaagtattggtttgattatggagaaaattcatattatttacacaaagcctagttcaatatataaattaattaattaataaatataatataaataaccaattcaaaacttttgagtgatgcctcaatttgacatggtcgtaagtggttctttctaaagacactagaatagcatagttattattaagacactagaatagcatagttattatagtgtcttctttctgcccatgagttatagggcggtataattaatcaatagtgaactcatctaaagggagtgcgattgagaagttaaacatttttttgtttatcgaaattgtaaaaccatgtctgtatgataaaaaaaaaatgaaaaaacacacttcaaaagtgcggatgaggcagttttggacggcttgtggtcttgcaagccaaaatggttttgtgtaccgacataaattggccaaatatataataaaacaaaaaggaataaaaatattttttaaaagtgtggtcggggcaataacaattataggcattagagtggatactatgtcaaatgataataaaataaatatatagacccaaccacaaaggtctatcatgtatagcgcaatgagtttgagatttaaacaacattattaaatacttttagagaagtaacattcaaaccgcttgaattttccaataggtaacgagatccatcaggtgatgtaagtaaacgtgttgcagacagattctggcttggtgggatgctatgtatatatatagatataaatttataaccgttaaataatagctttaaaaggcaaaatgcactaaaatacctaaggagatccttggagttaatgctctcccatgacatggcaggctgcttttcttttcaatctttttggagcgtactgagagtaaaatatgacaatacaacactttaataataggttagattatataggagtacaaattaagtgctgtgaattggctttgaaggtccaatcagatcgagctagcttaagttgcacaagacttctcaccaccaacgcccgtgaaagttaaaattgccattttcttgtttaatcttgtgtgaacagcattttatattacagaatacttacgcattcttacatttataaagagtcagaaagaaaaatgctgttcacagttaataagataataataatgataataataatttaaaaagtagtgatggaaaacatgtaagtaaaaactgaaactatacttaaaggtaactaaagtccagcttcgacatcaacaacagtaccgtaactcagcaataaatccctattcctcttaggagttatatgtatgtgtgaccttgctccaatatttgcttctttcactgtcacaaatatttgtggaatagagtctgtaacgtcttacaaaaaacaaataacatgcacatttgtactgtatttaccctaaaatagtcgttaatgatatttactaaaattccgaatgcagtattacaactctacatctccgctgaatccgcaagaacatatatttctttaaactacgcgtccgacaatgttacaagtcctgttggagtagaggttcttgcacattttgtccgcatttgttggaggatgcgcggtgaaaaatatattagttcagtggaaccagtttcaagcagttcactctgtcacaccacctcttaagaaagaccacggtagcaactaaaatcaaaaaaggaaaataagaaacactgaactcacctgaaaacacacaacgaaattagtatttcttttataaatactcaattaataaggagaaaatttgcgattatataaagtatatacatatatatagacaagtcgacctggccatgtccgtctgtccgtgtcatagtcgagatctggtctcgcacattttagtgaaaccagagctgtctcaaaacgcacactctaacgacgacaaacctcaaaaatatgtttaaaatgatcatttatttttgttgccaatttgccattttttacggtagggggcaagattttattagccaatagaggttatgggccattagtttttggtaagttctcctaccttcgtatgcctcagctatgtaagtcgtctgtcaaggcgtacgccaaaatacgttacatcgttattctgtgccagttgcgttttattgtgtatcagcggagtttataaagagtaaacggtatatgtttacaatttttctcgttttggcggcagtatgattaccacctttccaataccacgaagtgcgttgttgccataatttaacaactgggcaaattgaacttttttggacctaaatggtttccctccattgaaaaaaatttctataaagtagaagaatcaatcagtagaataatcgtttgtatctattagaccgtcaggccagcacaaaaaaatcgccaaaaatcttttttaaattttaaagctggaattgcttaataaaatttcgaaaagttgaaaatcaaaaagtttacttgtttaaaatcaattttttaaagcgcaataccatcgtttgcccaccttttttttttgaaaatttgaaa

SEQ ID NO: 2723 - DNA, 1735 bp, DROSOPHILA
tcggacgcgtagtttaaagaaatatatgttcttgcggattcagcggagatgtagagttgtaatactgcattcggaattttatacgctccaaaaagattgaaaagaaaagcagcctgccatgtcatgggagagcattaactccaaggatctccttagcatcccaccaagccagaatctgtctgcaacacgtttacttacatcacctgatggatctcgttacctattggaaaattcaagcgacttgtgtcacttagatgagagtttttcgcggttggcgggatatggatctagtccagatgtaggatcccgttcggtatgggctagccaggcgctattacgatcaggttctgttatcagttgctttttgtcctgccagcaaagcctaagacagtacatagctaaacggaagatcgagcgaggacgacggctatatgaacaaaacaatcaaacggaggccgtacgtacttggcgtagtgcactgaaagggacgtgccaaagagaggactgctttcagctactaggatatttgtatcaggcacatatggactggggaaaatttcgtgaggcaatagaattcagtcatcagcagctcggggctttggagggtttgcagggtgcctacaaaattgctacagctattggagatccatcactggagttacaagtgtatgtcgcgctttctgagcttttcggacgccttcaggataacgataaaagtgcaacatacgcttctaaagcctacgacttatcacgatccctgcaactcggtgacctaaactcatgccaccatagagcagctctattgcgaatggcggtttctctccgaaagcagggtgagcttggagatgcacaagattattgtaaggaggccacgaagctttcccttatttctggagaccaggcgacttacacgagaagtattcgcgtcatgggcgacatataccgaaataaaatggacatggatcgtgcattccggcaatatgaacaagctatgggtacatcggcaagcttaggggatcgtatggcccaaatggaggctatggatggagcagctcgttgcttggaaacactccgtctacagaacaagatctgcaactgcagaccactagaatttaacacaagacttctggaagttgccagctcaattggagccaagtttctggttcgcaaaattcgttgccgactggcattgatctaccgggcactaggagacgaagatcaatacaacactcattttagactagctaatcagacggatgctgcgttaggcttaaattgcggagcgtgtggggagttgcttggacttcgtccagaaaacttggaagctctaccctgtgcacacattcttcatgcaagatgcgcctatgaaatcttgcgacggcgggagaaaaatgccccgcgatcatgccccgcctgcaacaagctgatcagctcacgcacacatttctgcggcagcgttccggttgaaagtgaaagcaccgacaggtgcgtcacagctgcttccaccttcaatacgaattctttgtcggtcgacggcctcctagggataaactccgacatccttttaccttcggctgcgttttgctacgttaagaatccagctctagataccgaaaacagcgctctcctatctcccaaagtcatttaccacagcaacttatcattggcatctctaagtatgcgtgcatctagcctgacgatcgatagcggccaaaatgtgacgtcatctgtgtga

SEQ ID NO: 2724 - protein, 538 aa, DROSOPHILA
MSWESINSKDLLSIPPSQNLSATRLLTSPDGSRYLLENSSDLCHLDESFSRLAGYGSSPDVGSRSVWASQALLRSGSVISCFLSCQQSLRQYIAKRKIERGRRLYEQNNQTEAVRTWRSALKGTCQREDCFQLLGYLYQAHMDWGKFREAIEFSHQQLGALEGLQGAYKIATAIGDPSLELQVYVALSELFGRLQDNDKSATYASKAYDLSRSLQLGDLNSCHHRAALLRMAVSLRKQGELGDAQDYCKEATKLSLISGDQATYTRSIRVMGDIYRNKMDMDRAFRQYEQAMGTSASLGDRMAQMEAMDGAARCLETLRLQNKICNCRPLEFNTRLLEVASSIGAKFLVRKIRCRLALIYRALGDEDQYNTHFRLANQTDAALGLNCGACGELLGLRPENLEALPCAHILHARCAYEILRRREKNAPRSCPACNKLISSRTHFCGSVPVESESTDRCVTAASTFNTNSLSVDGLLGINSDILLPSAAFCYVKNPALDTENSALLSPKVIYHSNLSLASLSMRASSLTIDSGQNVTSSV

SEQ ID NO: 2725 - DNA, 10999 bp, DROSOPHILA
aatatatttaatataattattttgtatttatacataaaaatagtttctgtagcacaaatcattcagttaattttttccgtttttatgtattgttaattatatatattttgctttttgtggttgcttctgacgacacacggcatagagcgagaggcaaagagttgaatgcggtaggaagagcagtggagaggatatgaaaaattgtggaaaattgtgaaatattatggaaattatatctccagacgagaagagcatacatacatttggtggaatacatatggcaaaaggaaagctacttctcgtttcgaatcatatatgtaagtaaatcatagtaaaatagagtaatcttcgcctggcgatatgcgatccagccttggcctaacttggtctcctcgatcaggacacatgcatgcgtacccgctcgtggtgcacgctcgtttaaaatggcttaaataaaaactggctttaaaataaagacggactgcggttgctcttctggggcggataacgatagagttctacattaaaatcgaagggattgaggcataaaattaattacaatgggcttcgttggttggttggttggttggatcgtttggaataggtttggattgtgcttggatttgaaacaaaagcaaacttaaaatgtgcacacgacaattgaggagcgcctcaaagtctcctggtataaatactaatgtaaacgtctcgcctaccgaatcgacacaagtgtgagtgggtgtgtgtaaataattaatataattaaaaagtacatacaggctagtagcaagccatactcatcatcgcagggatcttgaatcgtgttcgaatctctcgtttgtctgccatttgttaattacattttacagctcattaaataatttattatacaaatgtgtgtgtggacccgcgaacgaaaaaaaaacctacttcactttatacttatccttagtgttatcattatcgttaccattatcattatcattatcctctctctctctatctctctctctctctctctctgtcatctcgccaaggccctttaaacacatgcagagcggagctagctgcgctgggaggagcacaacaagatgcctcgcagacaatttccctccttcaaatagaaaacatttttcctaagcttatccattaagtggcgaatgtctcaactcttgttcaacgttatgtttctcattcctagttttcgttttgtttagttttcccttggttttttttttttgttaaatttcttatcgaaagtgtttgagtataaagcagaaggctcgtaaaaagaatcactagtggctatggaacccatcaaatgagtaccttaaaagttttgaattggttatgaagaacaatctctgggcattgatcacgttccgtggaacaacttaacaacttagaagctagccccttgcgaaactgataaaaaagcccgtacaccaactaccggaccattgaatgatcgagcactgctgttcccaatgatgatccctttcgcggctatccagctatcctgcgactctcaacgagtctctacgagtctctacccttcacttgatgcttaaataacgttctcatgttgttgtggttctcttgttgctgttctgctgtggtgtgtgtgttgctgctcctggttgactacggctcaacactcactctgcgacatgtcaatctcttttttcacactgcgcgataatcgatcaagctcggcggccgcatctgtgcgcacggccagcttttcgggcgtcattactgcatccgtaccgttggcagtgcgacccggacccgccggattacccgctccgccgggacctccggtacccggactgcccgactttttgtgcagcagcgagttaaagaagttggctagaacgccttcggcgccgggcgttgctggcgtcagcttgggatcaatctgaaaatgggtccacgaatgagctaattatgtacttttgatgtgcattaggcgtacgtacctttttgggcgaactctgtccggtggtgccgggcgttcggggtccgctcttattgctgcctacgccctgcgatcgcagtggtgactcaccgcgcacctggtcgccctgctttaggatctcctgctggcgtgccaggaatgcctgctcatcctccgtctgcacttccgcctcgcgattggaaaccgcctggaagaggggtaaaatatgtaagttatgcttcatagcattttagcaaatgaatgaatgaagtaacgtacctttctagttggtggcgatttgataatgtctgtgtagggattctcggccttgactccatgcatattctcgtataaaatactaatcttcttcaggctatcccagccagccggactgttgggatacaaagataagtaaattgcttattatggcaaactagtgcaaaacagagtaaagggacacccacatgagtaccgcatccttctcaacgactagcgctggcgtacggaatggtagaccataaattcgatgcgtcagatacttgtagaggacatcacagttcttgtcttccttgacgctcgtgtagaagagcgaagtgccatgccgcaggcagaagttacgtatccactgctggatgaagtcaaagtgctcgtcacgatactcgtactccttctctagcgtggtcatgtagtccgtctgtaatggcaaatccaaagattaaagatcacaatagttttcaatatttccatgccgcactcacctttgtgaccacaacaacgatgtcgaggcccagatttgtaattagtgcatcctccgtcagcggcagcaggtcatcctcgtcgatcgagttgttgcgcatcgtccgcttgacgggggagcctggatccagatcgtcgcccacctcacagtagctctgccacgtggtggtcagtcgctggcgggccgcctccttctctttggcgtccagctgcaggctatcgatgtgctggccgaggaccttgatccaatggtttagctgctccagccagccccacggctgcgtcatcgaaacggtgaggatgacgagtgtgtgtgcatagttcgtttcgttgagcgcatagtgtagcaggtttgtgtgtcctggatcaccgtccaggacccaaacgcctaaacgcgtcatgtctgcaatagaagcaacataagatcaattactagttgcaaaacatgaacagatatcaaatcactcaccgtctctgtactcatccttgacatcaatgtaggcatactccaggccggaacccttcttcggatcctcgacgccctgcagtttggcaatgagtgtcgtctttccggtggcattgtcgcctaatactagtacagatttgtttgatggaagttttgtgctgccctgtgtttgtacttcattcaatatcgccgacctgtaagaaataaattcgaaatttatcaatgcaacttgcttagtttgttcaaatttaatgagtgggttgttcagcaaagtaatcccccgaaaaacatagtttgacctattgaaaaaagctatgttcctagtctttcatatctccagacttctgggcattgcccgaagtacactcattttcatagcttttccgctgacacacgtaatcgtatccaggtcagagctccgtcactcattcgcatttcccttttcgcaacattccggccatcaagttaattggcggaccaccaaatggagcccccccagcaccattattatatgctcagccacgcctctcaaatttatacccccccaaaagccattcgtgctcgattttagtgtttcgaaactgcgtcaatatttgatatatagttttgcatgcgattttcgaaacgttgctagacaatgtctggcaattcaattagaccaattaaataatttttcaattgttgtggatgttatggttaggaatactgctgctccagcacaatgtccggtcctgtcccatccaggacatgcaaatcgaccacagaatgtgctgctgttccgcgcacgttgccgccgtatctcccgctttctccacaagactacgacgactatgactatactatggggaatatcgattgcccaaccgagcagcacttttcgagttcgtggcgattgttttgttttggtcggttcctttattgaaagcggcgctttctcatttacgtacgaatatggcacagtggttcgggatttattatttcacatacatatataaagacataaagagtgtgtttagttcactctattcttgttgatacatggaatgccttttaaatatatactttttcattaaataaattccatcaaatcttattagtttctaccatttcctatctaaattttcgattattttcgagaaccaatcaaaacccacagccttccatgcaattacccttatcctttcccattgcgttgacccactttgggacaaaagaccacctgcgtgccactgtacaggcagtggtaagtgaacgctttaacgttctccatttggtggtggctatttggtggactccttcgctggggcagaggtgttggctggggtggagtgctagcccgttggcatggtgcacgcgaaaaagccaaacgaaacgtaaaatttccaggcaaacctcctcgctgcctgcgaggagtccatcgagaactgttcgtcgcgctggtcgagagttgcacagttttcctaatattaacatattggagtattacgatccaggatgagtttgctattgaggcgacgttcgcgcagcgagacacgtcctcaggcgaatccggcggagatggccaagcagccggcggactcggacaaatcggacaggcagcagcagctggcgaagcaccaccagatgcgccaccaccagccgcatgccagtgaacaaagtctaaacaaactgggcctggtttccagtggcaccagtggaatgggcagacgcaagacatccgcggaactcataagtgaggccaagatgttcctcggcgaatcggtgaacgccgttccactcttggccaccggtggtgctcgtttggtcagcactcgacgacccattacgccccgtgaatccggacgagttttgtacggcaaagttgccctggctgggcggccaccaagtgccttttcgtaggttacccattgctggattccatggcacagtcattcatccgtttccattcttcttctggcctcacatagcatgcgttatctgcaaaacgagaaaccatcgacgccccgccagttgccggctctatcgggttccgtatccgccacacccatgcccacccggaatggagctctgctctgtcaatccagcactgaaacactgatcgaactgctcaagcagcacagtggtttgaaggattgtagcgacgagacagtgcagcacattaatgcggtcagttagtatttcatcattttgttcaatagagcaagtggttcgactattaattgtattgctcacagatcctccaggagctttatacacgcgtgagaaagcaggagcgcaactacaagcgtggcttcatcctaggaggactctacggtttggtggaatgcacttcaccacgcgtccttttggccgtggctcgcgtggttttggctgtgagtcatcatccatttagacattccactctggatttccccatgttatttgattactttcaaatcgctttagcttcgggtgacgggcagtaatctcacgggtgcctgcaagctgatcttcaaggtggccaggcacgagcagcatgacgccctttttcacgaacacgacgtgctggagctgctcatcgatggtttgggacacgcttcgccactggatgagccagaggcttgcatttatgcctatggttgcatacgcttcctgaccgccagcagtgcccaggagcgcgatgatgccctcaaccgcaattggattggtttggagacctccggcgaaagtcaatcgctccccattcctgctctaatgcctcccgctctatcggccatatcgacttcgctgtgtcccaggaaattgacgggtcagcaaacgttggtgtcccgcctggctcgccatggcgccgtggagctgatgatcctgcacctgcagatgttgaatgaggcgggagccaccaaacgcttacagggtccaccgctacacactctctatcaactgtcggcggccatgagggctctggcagatgtttcccagcaacagcagcgtctgcagctccaactgcaattggcatgtccacatctcattcgagcggccgaggtatccatgggcgaactggaggtccaagccaatgtggtgcgcacactcaggtgggtttccatctcatccttttagcgaatgatttaactgagttgtgattattacaatttttagtgtgctctcggaggactctgattgctgtgaaacgctgcacaactatgctgccagaattggcctgctcctgggtccctcgtgtgccggaggtgggcagtggagtgaacgtctcttggcggttctaagtcgtttgggctacatgctgggcaatatactggccaaacacgaatccgcgcgcatacaggtggggtttttaactactttaagtcacagtttgaagtggaataagctcaatttactattccattttagtactttcacaacgatgtggccatggagtatcttctaaatgtcctggaacagctgaacgaacgctcacccagcagtgtggcccatttggatgctcaaatcaagttaatacgagtggtggccaatatgagtgtaaatccggaggtgggcgcaggcttgggcaatgtccgttctttgggcgccgtgctgctgcagcttttaagcaagaccagcgaggagttgaccaagaagaaggtgagtttgtggtgcataatcctagccagaaactaatagctttgcttgcttatctatggtttagtcgccggaacagcaggagcttctgcatgccaccttgggagccctgcacaatctgtgcttctaccaggacaaacaggcagctgtgcagccgttggccgagggatctctgcagagtctgatcgacgatctgtccgcctcgttggccaaggtgttgggcaactgtcagacgtcggtgaccaaagtggagctggcccgtgtgttaggtaaccttacgaggaacgagcaggcgcgtcgttgtttctgtgccgccggtggattgccactgatggttcagcaactgacgaagcaggcagctggccaggattatgagctgcgcacctgtgccattggtgtcctggtgaacctcttgggcgatggcgaacagcgaggtccctttctgcaactgcgcggtgccgagctgctgtcgctactgctgcgtggatccctggagcaggaggattggtttctggccaacattgtttgccaggccctctggaatcttctcatcgacggccattgtgcggcaaatctctgccagagtagtaatatactcgatgaagtaagtgatctgctggccgattatctcgatgaggatcgattatcacccggcgatgacgataacgataacgacgaggatgatccggaacgggaagctgaggatttggatgcatcggatacggatccggaagcgcacgatgccttgtgggaggatttcgcactggtcgccactgatttgctagaacgcatccaaaacaacttcgataggcagcagcaatcgctaccccaaaatgccgataacgaagatgataacgatgtatttatcgaggaaatgtagtatcagttcgtttaatagtttttagtgtttctatgtggtttgcatcattattcgataaatatcttaaaacaaattattaaagccaataaaaaatgtttcgaaatgacatgccctttgtagcatcattaacaagtaaaacattgatgtttataggatttcgaagcgagaactaattatatgctccaaaacataaacaatgatgattatctcaagttcttagtgtttcgagacactatgctacaaacttgggctttttaatggaaacctaatgtattcgaaatggatcgaaatacaatgctactaccgatatttttaagacagtagttagttttaattagaagtacggtttaatttgaaacctaaatatcaaatgatttctaaagaaatctcgatttccatcgattttttggacaactgctattccgtattttactggtaaattatgttaactagtgttgtttaagccaaacgacatattcaggtgatgacaacatcgtttgcactcactcacacacgcacacaccagctgaaaccaatacacgcacatcttagagccgagtttggattccaattggaatcggtcttattggcggacggcccattaagctgggttttatttataggtatgagtgtagaaaaactgataaagcgaaaaaaatggtaaacgctgccctcgatttgttgctttttcttgttgttcagtgaatttatgaatcatccccgcacattgttgctcttttcgccctctctcccctatcattttcctctctgtttttctttgtgagcctctttatttcgcctaccgctgtctttgtcgtttttttataatactatttattcgcgcattttgtttaataattaataatcgctaaaaagcttgcaaatctcttttttgcaacatttgaggttaagtagaggaatattggtagaaaaagaaatgacaacatgccaatgaaatcagctggtttgcggctccaaaaaatagaataaaaaaaatgggagttgccggctatcggaaagcaaattacaaagtgtaagacgaaaaattgagtagtattagttaccaacgggcacaagttgaagatagtaatagtagtagtagtggtggcaaaaagcaactagcgaacgtcattttaaaagaaagttatcaacaaattgaagagaagtatggagcgccctctccgaactttgtttttgtttatcttctcagattctctcgtttgagattaaattttattgcactttgcatattgggtagttatttgtcgatatcatattgtaatgtacagagttacatgctctgaaagttaagtattattacaataatggttcaaatttcatatttttccacctcgaactacctacctacttatttgttctatagtttctgtttttttggtaactgatcttatatcttgagttatcttggtgcttgcattttgggggattacgcatatgtcaattggggttgtgttccctttttgggaggtttacttgctgaagtagtcgctactactgcaattgcactcaccataggttctccttttccgcggccgcatcctttttcttcatggtaaaggatgatgtcagcgcattcgtttgcgtcccactgttcatcgccatgttgttgttggtgctgcagctgcggtgctcctattggaacgctctccactcctggctgggtccaattgggaaacgggatgtgctggcgctgcaacagagagtgctaaagagagagagggagagtggaagagagggaagatgagaaacagttggcaaacaaaaacaaacacatgcgcgacagagcgagacggctgccaggtgtcggctgcatatgatttagcagtctatttaaataattttactgcaaggctgcgcacttgtattatttttgtttaattctctatgcatttgtcaccacgctctctctcccacccactctcacttccaattctgttgctttagttacgacgcacagctgctgacaaattcgcaaaatttcctcttctactcaatctatctctctcgctcactctattttctttctttcctcctttctgattgcccactttttttattccgtttcctacgtacgcagtttctcacgctcttcgctctcctctccagtgaaaactcgcgccctggattttcacgcacgtcctctccgctggacagcctttcgatcgtttcaattagacaaggcaaacttaaataatataatgtatatttatgtggagaagagccgcgttcgtgtgcgtttccactggagttttttcagcgccgttgcgtcgtcgaatctgactgcctctcctcttcactgctcttcttcttcacttctgctttgctttgcttttcctttcgcaccaattattcgtgtaaaaatactgcaaaaaataccgataccaaatggtgacccgggtatggtcacacttggcactagcaggtgcgggaaataccgttcccacaacaatcacttttgtaactattctgtatttctttttgtacttttctcccggcgtttatttatttatatggctggtaaaatgatagcaagagggaacgctttagtggaggtactgactatcagatacccgttaaattacttcgaataacgagtaactaataattaaaaagtaaatattccaataacgatttgacgctgctcatagatgtcgctttaatctcattgtgaactttgatcgcatttccagcagatggcgctgtggcaaagctactatttctggtatctactaaaattctagcatttacttatgcaagcatgcaatagtatcgatactatcgataaattaatctagctagcattattttggaatatatttttgaaataattaatcgttgataaaattgtaatttttgtatatatgtatatacatatatttatattaaataacgtatttatttatttttgcagagctttttaccttttggattcgctggaattccagcgcctggtaacactaattcacgattaaacttccttgacttaacatttacatatatttactattattcattattatcattattgactagttagtaggcgaaataagaagacgggaccatgcaatttacgagccttttactggctgtgatttttctcataagtctggtttcaatcgatggtgagttcgtgttctcgttgaagtcttttgtttaagttgcatatgtgttgtgtgtgtgtgagagagatataattcgattttcacatggggaaaacggcgaaatcaaattaaaaactaactttttccgttgtattgttatttgcttaattgttccatttgcatattatttaaaattttca

SEQ ID NO: 2726 - DNA, 2446 bp, DROSOPHILA
agcagtgaagaggagaggcagtcagattcgacgacgcaacggcgctgaaaaaactccagtggaaacgcacacgaacgcggctcttctccacataaatatacattatattatttaagtttgccttgtctaattgaaacgatcgaaaggctgtccagcggagaggacgtgcgtgaaaatccagggcgcgagttttcactggagaggagagcgaagagcgtgagaaactgccactctctgttgcagcgccagcacatcccgtttcccaattggacccagccaggagtggagagcgttccaataggagcaccgcagctgcagcaccaacaacaacatggcgatgaacagtgggacgcaaacgaatgcgctgacatcatcctttaccatgaagaaaaaggatgcggccgcggaaaaggagaacctatggtcggcgatattgaatgaagtacaaacacagggcagcacaaaacttccatcaaacaaatctgtactagtattaggcgacaatgccaccggaaagacgacactcattgccaaactgcagggcgtcgaggatccgaagaagggttccggcctggagtatgcctacattgatgtcaaggatgagtacagagacgacatgacgcgtttaggcgtttgggtcctggacggtgatccaggacacacaaacctgctacactatgcgctcaacgaaacgaactatgcacacacactcgtcatcctcaccgtttcgatgacgcagccgtggggctggctggagcagctaaaccattggatcaaggtcctcggccagcacatcgatagcctgcagctggacgccaaagagaaggaggcggcccgccagcgactgaccaccacgtggcagagctactgtgaggtgggcgacgatctggatccaggctcccccgtcaagcggacgatgcgcaacaactcgatcgacgaggatgacctgctgccgctgacggaggatgcactaattacaaatctgggcctcgacatcgttgttgtggtcacaaagacggactacatgaccacgctagagaaggagtacgagtatcgtgacgagcactttgacttcatccagcagtggatacgtaacttctgcctgcggcatggcacttcgctcttctacacgagcgtcaaggaagacaagaactgtgatgtcctctacaagtatctgacgcatcgaatttatggtctaccattccgtacgccagcgctagtcgttgagaaggatgcggtactcattccggctggctgggatagcctgaagaagattagtattttatacgagaatatgcatggagtcaaggccgagaatccctacacagacattatcaaatcgccaccaactagaaaggcggtttccaatcgcgaggcggaagtgcagacggaggatgagcaggcattcctggcacgccagcaggagatcctaaagcagggcgaccaggtgcgcggtgagtcaccactgcgatcgcagggcgtaggcagcaataagagcggaccccgaacgcccggcaccaccggacagagttcgcccaaaaagccagcaacgcccggcgccgaaggcgttctagccaacttctttaactcgctgctgcacaaaaagtcgggcagtccgggtaccggaggtcccggcggagcgggtaatccggcgggtccgggtcgcactgccaacggtacggatgcagtaatgacgcccgaaaagctggccgtgcgcacagatgcggccgccgagcttgatcgattatcgcgcagtgtgaaaaaagagattgacatgtcgcagagtgagtgttgagccgtagtcaaccaggagcagcaacacacacaccacagcagaacagcaacaagagaaccacaacaacatgagaacgttatttaagcatcaagtgaagggtagagactcgtagagactcgttgagagtcgcaggatagctggatagccgcgaaagggatcatcattgggaacagcagtgctcgatcattcaatggtccggtagttggtgtacgggcttttttatcagtttcgcaaggggctagcttctaagttgttaagttgttccacggaacgtgatcaatgcccagagattgttcttcataaccaattcaaaacttttaaggtactcatttgatgggttccatagccactagtgattctttttacgagccttctgctttatactcaaacactttcgataagaaatttaacaaaaaaaaaaaaccaagggaaaactaaacaaaacgaaaactaggaatgagaaacataacgttgaacaagagttgagacattcgccacttaatggataagcttaggaaaaatgttttctatttgaaggagggaaattgtctgcgaggcatcttgttgtgctcctcccagcgcagctagctccgctctgcatgtgtttaaagggccttggcgagatgacagagagagagagagagagagata

SEQ ID NO: 2727 - protein, 487 aa, DROSOPHILA
MAMNSGTQTNALTSSFTMKKKDAAAEKENLWSAILNEVQTQGSTKLPSNKSVLVLGDNATGKTTLIAKLQGVEDPKKGSGLEYAYIDVKDEYRDDMTRLGVWVLDGDPGHTNLLHYALNETNYAHTLVILTVSMTQPWGWLEQLNHWIKVLGQHIDSLQLDAKEKEAARQRLTTTWQSYCEVGDDLDPGSPVKRTMRNNSIDEDDLLPLTEDALITNLGLDIVVVVTKTDYMTTLEKEYEYRDEHFDFIQQWIRNFCLRHGTSLFYTSVKEDKNCDVLYKYLTHRIYGLPFRTPALVVEKDAVLIPAGWDSLKKISILYENMHGVKAENPYTDIIKSPPTRKAVSNREAEVQTEDEQAFLARQQEILKQGDQVRGESPLRSQGVGSNKSGPRTPGTTGQSSPKKPATPGAEGVLANFFNSLLHKKSGSPGTGGPGGAGNPAGPGRTANGTDAVMTPEKLAVRTDAAAELDRLSRSVKKEIDMSQSEC

SEQ ID NO: 2728 - DNA, 4636 bp, DROSOPHILA
atcatataatctttgtaaataacttagatattcagattcgtttaaattgataccgattagattaagttgtctaagaagtacgctggtcaattaaataatttcgtttaacaaatttaataaaaaaaggaaacataaatgtacacacttttcgagaaaatattttatgtataagaaatccctattcaataatttaaggtattttagaaaatatatcaatattcaatatttaaatacgagtaaaaaaatcaaaatataatttaaaaaagataatagtattctgctacaactatgcttagggaaaacatagtttttggttgtacctgaacatgcgcgattggaaatatgagccatatgccaccttagggtttttaaaccagttactcgaaaaccatataacagacagaaggaaacgttttcgagcaaatcaggatcaatagcctagtcgaactgtctgtgtccgtctgtccgtatgaaggcctcgatctcaggaactataaaaaatagaatgttgcgattaagaatgcaacttctagagacagaagcagagcaagtttgccacgccctaaaaccgcccaaaactgccacgcccacacttgtgcattttttttatacttttagttttgtaaatttctattgatttgtcacttgtcttgccaatctctataggtacaccaaaaacactttgccatgccccacactttcgaacaattcgaaacaattttttctccgaatccgatctggttatgggaaagggagcaaagcctatcctgggaatgcacggcgggcggagtataatcaagcaagatgtaagggatgttgcatgtgaatacgcctgtacacaggtacacacaacgcaacacccagaaaatcttgtgtttgtaagacgtgcatgagtccactgcagatgtgtgggtgtgtgtgggggtatgagactaatgttcatattgctgctgttaagtaagcatttgctgtgggtattttagtcgaatttgaagcaatgtccgaacaggttccgtatcgatgtgtacaagaatgttaatgagagtgcgaccgagacgaaaatatatacacattttcgaggaactgtgatcatttatttactttaccgaaagaaattttttgtttctttaaattaagtgccgtaaacgaaatcccgaaaataagatcaatgcaatcaacaaactcgtgcagatttaacctaataagtaatggtgtggatgtgaacatttttacagagattctgagcctacatacatatgtagatacttgccaacgttcattagtatgtatatacatatgtaggcatgcgaatgtgtaattttgaagaagagtacatactggaagattgatcgactggaagaacgataatcatttttataattgacattagcaaaggaaccctaatggccatgcggagaaaacatgataatagacattaatccaaacttaacgccaaaaaaggaaacagctgtgtggtgcgactcttttcaacataaatgtaaagttagtaaccgtacaataaaaatatttccatcgcttttgaacaagtccaactggatcgttagtattttgtggcatatttgtgttcaccataccataactataagaaactctaaagcacgagaacctccttgcaaacatccgcctattactgataatgctgaggctaagctcaccctagtttgtagtaggtcactaaagctttacaaaatatggtttatattgattttattgatgtcaactcagcatcaagtcagtggccatggcatattccgccaaacgtcaagttcaaaagcagtattttcatactatcagcctaaagaaaatattacatttaccaatttgcagcttcaaaatttagaaaatgaagctaagagactagaaacaaatcaacatccaataatccgagccaaatcaactccgaaaatgggtcttaaaaatgtatttgaaagctttagcaaacaaagcagagactcaatctacaatgccagttcaaataaatatagtctgattaatgtaagccagtcaaaaaactttcctcaattattcaataaaaaattgtcagttcagtggataaacaccgtaccaattcaaagtaggcaaacgagggaaactagggatatcggcctagaaactaagaggcatagtaagccatcaaaaagagtagatgaaaccagactaaagcacctcgttttgaagggccttggaattaaaaaactaccagatatgagaaaggtaagatttaaattacagctattgtcacgtcctgtaaaagaaagctgtgcagtgttatgccaaaccgtatacagaagggtccacctaaaggatattatttatttacaggtcaatataagccaagctgaatattccagcaaatatatagaatacttaagtcgcctaagaagtaaccaggagaagggcaacagctattttaacaacttcatgggagcttcctttacaagagacctacattttctaagcattaccacaaacggattcaatgatataagcaacaaacgattgcgccatagaaggtcgcttaaaaaaattaacagattaaaccaaaacccaaaaaagcatcaaaattatggagacctactacgtggcgaacaggatacaatgaatattcttttacactttccattgacaaatgcacaagatgcaaattttcaccatgataaaatcgacgaggccaatgttaggcttatgcttctctatagttcatcgttggcaacaaatttccgacgagggccaggatctaggaaaaataagatcagtcaaatttccgggaatgataacatcgaaaggcactgtaattttggtgatgtcaatttgaaccaatctaacaaaaatagtagccagcaattaactttaaaagtatatcaacttctttcagcgaatagacgaagaaagataacgtctcgtaaaattgaatttggaaatgttggcttccaagaaactcgaacacagtggatagaatttgacgtgaccaaagctgttcgtagttggttgaacaaaagccatgaaaacttggggatagaaattcaatgtgataaatgtaaaagtataggggctcgtatattgagtgatttcagcccgtcaacaccaccacgctcgaccgcctcaagcgacgaacacttaaacctcatgccagttcttaatataattggacacggaacgctgaattcccaacagcacggcgacgcggatattcaccaaatcatgctgaccaataatagaagcgatcaatacgtgcatcaccgttcaaaccatgatagcacctggagaaaagataagtggaccaacaactgttacaaattgcaccaacgatgttgtagaaatcaattggatgttgcctttaagagcattaagggattcgaattcattttacagccgaaggtattcgatgcagggtactgccacggaagatgtccaccacgtcacaatcccgcccaccaccacgccctactgcaaagtctgatatggcaagaagatcacaaaagagccccccgtccatgctgtactccttcaaagcttgagatgcttgaaatattgcatgttgacgaaaaccacagcgacaaactcaaaatttcgacatggagtgatatgcaggttgtagaatgtgcctgttcgtaaaaaaaactttctctaacgaattattcttacatacatattctattattcgtttttaagttttgtttctcatttggttcaaattttgtgaatttttaaacatgtaacaatgctgaataaatagaaatattttttgttcgtatagcggcatttacaaattgtgtgttttattaccgctattgcactaatgacttttggcgaattccttgagggaagataaagacgtttagatgtagaaggcagtcagtcctatgcaaaaaccagtgatgcgcaggaatcactaaaagctgcatgattgcagtcctgataatatgagaaagaggtctcgaaaagcgtggttagaatgatttggtttttgctaatcgtaaaaacaaaatgactactttaacaaatcgaaaagaaatctcagtacatcaggcgcacattgattttcctgtcgaagtttggggagcgcataggaaaagtactagtttttttcacgtgaatataaaaaaatgtggctaggtacattgcatcaaacggctttttatagtgttcaacaaaaatccaatagtttgtattttttgaaaatataaggaaattgattatatacaatccaaagacgaaagaaaaaattgtctgcactgatgcacttgtttgtttgattattaattattaagaatatgtatataaatgttctaacatagatatgaacgttatttatttaaattgattgaattaacaatttgatgtaaaattaaaatacaaaaacaaaataaaaaaaactacatctaaatatatttttgaaaataaacttacattatttttaacattcttatccttatatagacgaagttataaattaagacgcaagacaaaggtatgtatgttcgtatgtaacaggcaaatggaaacgtttccgaccacataaattatatatattcctgatcaggatcaatagcccagtcgatctagccatggttcgtctgtccgtcagtccgaatgaacgtcgaggtcttaggaa

SEQ ID NO: 2729 - DNA, 2528 bp, DROSOPHILA
tccgaacaggttccgtatcgatgtgtacaagaatgttaatgagagtgcgaccgagacgaaaatatatacacattttcgaggaactgtgatcatttatttactttaccgaaagaaattttttgtttctttaaattaagtgccgtaaacgaaatcccgaaaataagatcaatgcaatcaacaaactcgtgcagatttaacctaataagtaatggtgtggatgtgaacatttttacagagattctgagcctacatacatatgtagatacttgccaacgttcattagtatgtatatacatatgtaggcatgcgaatgtgtaattttgaagaagagtacatactggaagattgatcgactggaagaacgataatcatttttataattgacattagcaaaggaaccctaatggccatgcggagaaaacatgataatagacattaatccaaacttaacgccaaaaaaggaaacagctgtgtggtgcgactcttttcaacataaatgtaaagttagtaaccgtacaataaaaatatttccatcgcttttgaacaagtccaactggatcgttagtattttgtggcatatttgtgttcaccataccataactataagaaactctaaagcacgagaacctccttgcaaacatccgcctattactgataatgctgaggctaagctcaccctagtttgtagtaggtcactaaagctttacaaaatatggtttatattgattttattgatgtcaactcagcatcaagtcagtggccatggcatattccgccaaacgtcaagttcaaaagcagtattttcatactatcagcctaaagaaaatattacatttaccaatttgcagcttcaaaatttagaaaatgaagctaagagactagaaacaaatcaacatccaataatccgagccaaatcaactccgaaaatgggtcttaaaaatgtatttgaaagctttagcaaacaaagcagagactcaatctacaatgccagttcaaataaatatagtctgattaatgtaagccagtcaaaaaactttcctcaattattcaataaaaaattgtcagttcagtggataaacaccgtaccaattcaaagtaggcaaacgagggaaactagggatatcggcctagaaactaagaggcatagtaagccatcaaaaagagtagatgaaaccagactaaagcacctcgttttgaagggccttggaattaaaaaactaccagatatgagaaaggtcaatataagccaagctgaatattccagcaaatatatagaatacttaagtcgcctaagaagtaaccaggagaagggcaacagctattttaacaacttcatgggagcttcctttacaagagacctacattttctaagcattaccacaaacggattcaatgatataagcaacaaacgattgcgccatagaaggtcgcttaaaaaaattaacagattaaaccaaaacccaaaaaagcatcaaaattatggagacctactacgtggcgaacaggatacaatgaatattcttttacactttccattgacaaatgcacaagatgcaaattttcaccatgataaaatcgacgaggccaatgttaggcttatgcttctctatagttcatcgttggcaacaaatttccgacgagggccaggatctaggaaaaataagatcagtcaaatttccgggaatgataacatcgaaaggcactgtaattttggtgatgtcaatttgaaccaatctaacaaaaatagtagccagcaattaactttaaaagtatatcaacttctttcagcgaatagacgaagaaagataacgtctcgtaaaattgaatttggaaatgttggcttccaagaaactcgaacacagtggatagaatttgacgtgaccaaagctgttcgtagttggttgaacaaaagccatgaaaacttggggatagaaattcaatgtgataaatgtaaaagtataggggctcgtatattgagtgatttcagcccgtcaacaccaccacgctcgaccgcctcaagcgacgaacacttaaacctcatgccagttcttaatataattggacacggaacgctgaattcccaacagcacggcgacgcggatattcaccaaatcatgctgaccaataatagaagcgatcaatacgtgcatcaccgttcaaaccatgatagcacctggagaaaagataagtggaccaacaactgttacaaattgcaccaacgatgttgtagaaatcaattggatgttgcctttaagagcattaagggattcgaattcattttacagccgaaggtattcgatgcagggtactgccacggaagatgtccaccacgtcacaatcccgcccaccaccacgccctactgcaaagtctgatatggcaagaagatcacaaaagagccccccgtccatgctgtactccttcaaagcttgagatgcttgaaatattgcatgttgacgaaaaccacagcgacaaactcaaaatttcgacatggagtgatatgcaggttgtagaatgtgcctgttcgtaa

SEQ ID NO: 2730 - protein, 701 aa, DROSOPHILA
MIIDINPNLTPKKETAVWCDSFQHKCKVSNRTIKIFPSLLNKSNWIVSILWHICVHHTITIRNSKAREPPCKHPPITDNAEAKLTLVCSRSLKLYKIWFILILLMSTQHQVSGHGIFRQTSSSKAVFSYYQPKENITFTNLQLQNLENEAKRLETNQHPIIRAKSTPKMGLKNVFESFSKQSRDSIYNASSNKYSLINVSQSKNFPQLFNKKLSVQWINTVPIQSRQTRETRDIGLETKRHSKPSKRVDETRLKHLVLKGLGIKKLPDMRKVNISQAEYSSKYIEYLSRLRSNQEKGNSYFNNFMGASFTRDLHFLSITTNGFNDISNKRLRHRRSLKKINRLNQNPKKHQNYGDLLRGEQDTMNILLHFPLTNAQDANFHHDKIDEANVRLMLLYSSSLATNFRRGPGSRKNKISQISGNDNIERHCNFGDVNLNQSNKNSSQQLTLKVYQLLSANRRRKITSRKIEFGNVGFQETRTQWIEFDVTKAVRSWLNKSHENLGIEIQCDKCKSIGARILSDFSPSTPPRSTASSDEHLNLMPVLNIIGHGTLNSQQHGDADIHQIMLTNNRSDQYVHHRSNHDSTWRKDKWTNNCYKLHQRCCRNQLDVAFKSIKGFEFILQPKVFDAGYCHGRCPPRHNPAHHHALLQSLIWQEDHKRAPRPCCTPSKLEMLEILHVDENHSDKLKISTWSDMQVVECACS

SEQ ID NO: 2731 - DNA, 3749 bp, DROSOPHILA
caatgtcaatgccattgactagtgggatcttaactacacttaaagactagctacctatatttgaaaatcaattataagcaacagtaatcatattttaatattctctaccaaagaatatataatataatataatataatataatataatataatataatataatataatatataatcttagagcaatgcttgtttatttttctctctggtttccggaattagagcaattcgtttacataataccatcaatcatggtacaatcttgaatgattgatgaagccagcgactactgcacaaaatccccaaatagagagagagactcgatttcgcagttgattgattagatcactaagctgacagacaagcaagctcatctaattgcattcgtcacaacgcaaaatgacatagtagatggcaatttgtggcgatttgaaattgcaagtggtttttcgccgatcttttcgaaaaagagaaatggtttgcttggaattttcttcttgcacgaaccgttgctgaataaatatttgcacccaaatatgcgaataaaaagcagctcaaacaaaaattcgacaatggcctcttttgttgaattaagtgttccgattgtcttgcgacttgactttgctacgttcagggttgtcagattgttggcagttactttcgctatcgctgatccccccaactggcttgacctgtgcacctttactttcgaacacgttccttgatcgactacgaaatgcagctccttagttattctgacataagagcagttcgctggttaattcgataatgacaccaactaagttctgttccagcgacacgcaaacccacataagatcaattgcaaaatggggaataataaatgtatgcatagtatatacataggggcgcaatggaagcacgctacggaggagatccccaatctccgccgatctccttgtgccaccagatgcgcgtatccgattcaatttcatccactcagtttcgcttacaacgtcgtcatgtttggatcgcttctactggggattgccaccttgctgggcgcgatctatgcctttctggtctcgaactttggccactggcggcgtcgcggagtcacagaacccagagccctgccgctcttcggttcctttcccaacatgatttggccacgccagcacttcaccatggacatgcgcgatatctatatgtgggtatacgcatattcgagtgtggtgttatggtcgtatattgtatatattctttgcaggcattacaggaatacccatagctatgtgggctgctacctgttgcgtgcacccaagctgctcgtcctggaaccacgccttgtgtacgagatctatgtgagcgcgttcagtcatttcgagaacaacgatgcctccaagatggtggacatcgccaaggatcgtttggtcgccctcaatccattcgtgctcgagggcgaagagtggcgccaccagcgggcggtcttctccactctgctgaccaacggtcgcatccgcaccacccatgccatcatgcagcgtgtctgtctggatctctgtcagttcattgcgataaagtcggctggaggcaaggatctggactgcattgatgtgagtatcacatgaaacttcttccaaaaggatgcactagctcgacattcttgtccagctgggtcttcgcttcacgggtgaatcgctgtttgactgcgtcctgggcatccaagcgcgcaccttcaccgacaatccactgccggttgtgcggcaaaaccacgagatgtccgccgagaatcgcggattggccattgccggcgccgtccatggcctcttcccgaatcttccgcgctggctgcgtcccaaggtctttccccgttcccacgatcgattctacggccagatgattagcgaagctctgcgcctgcgtcgttccaagcaccaggaacgcaacgacttcatcaaccatctgctcgagatgcagagggaactggatctcagcgaggaggacatggcctcgcatgccatgaccttcatgttcgacggcctggacaccacctccaatagcattgcccattgtcttctgctggtaagttgctttatcttgtagtaaatatatttcaactaatagatatccatttagcttggtcgtaatccagattgccagcggcgtttgtacgaggaactccagttggtcaatcccggtggttatctgcccgatctggatgcactgatagatctgccctatctgagtgcctgctttaatggtgggtcatgggttgtggaacattgaagtaccaaatatcttatgcatatatttattcagaaagcctacgaatctatccggctggcggctgggcatcaaagacctgcacaaaggagtacgaacttcggggtagccatcactcggaacctctgaagctgaggcctggcgaccatgtgatggtgcccatctacgctctgcacaatgatccggatctgtatccggaaccggatgttttccggcccgaaagattcctcgacggcggtctgaaaaactgcaaacagcagggcatctttctgggattcggaaacgggccacgccagtgtgtcgggatgcgattgggtctggccatggccaaagccgcactggctgccattgtccagcgattcgaggtcgtggtcagtccacggacactcaacggcacagagttagatcccctgatctttgtgggcgttcacaagggcggcatttggctgcagttcgttccacggaaaaatgtgactacgaaataaatggatcgattaggaagctcgagaaagaagttgcagcactggagatctaagaaacaaacagaaggggttaagctttagaaggggttaagtgccagaatatttaaacaactgaaaccttttagaatgttgcaaaatataatattgttggttaagttctatgtttctaattgtttgctacaaaagctttcagtttgatctattatcttatttttttttaattttttttcttacacatgacttcttgcatcaacttttcaaagatttgtattttcttttcatctctgtatggttcatcaatggaaattagagtggaccatcgcttttgttaggcgcaggttttagctgcattcagctgggaattatgtcatcgggcgatgtccaaacactgaaataataattcatcaaaagggcgaaggcaataaatgcattcatactaaatgcactgagagaaagcagtgttacttgaataattaaaaaaaattgtgttgaatatttattcaaaattatgttaattaccttgaagaaatcatgaatattaattcgatataatattaaatacccaaaacaaatgatgaagaatccaaatgaatattaatgatattattcacaatggtgacaacattttcctaataactttaaatgagttacttgcaaaatcatgtggtttatttttgaaggggtggagcctacgatatttcgtattgagtaaggtgcgaataattgtcatcgtagcacgaataaactgaaaaatggaacgtgtaggccacaaatccggtctggcctttcactattagccgcttactaagagcggaagcaaacaaataaataaaaacccgtcaaaagccaaatgaaaatgaaaccacaaaatccacgaaggtcacgcggagagagttttgttttgggttttgggtttgggattggggaagacacgcctttgggatgaataatttcggatcagagacatcgtctaaattatagtggcaatcatagagatgccaaa

SEQ ID NO: 2732 - DNA, 1518 bp, DROSOPHILA
atgtttggatcgcttctactggggattgccaccttgctgggcgcgatctatgcctttctggtctcgaactttggccactggcggcgtcgcggagtcacagaacccagagccctgccgctcttcggttcctttcccaacatgatttggccacgccagcacttcaccatggacatgcgcgatatctatatgcattacaggaatacccatagctatgtgggctgctacctgttgcgtgcacccaagctgctcgtcctggaaccacgccttgtgtacgagatctatgtgagcgcgttcagtcatttcgagaacaacgatgcctccaagatggtggacatcgccaaggatcgtttggtcgccctcaatccattcgtgctcgagggcgaagagtggcgccaccagcgggcggtcttctccactctgctgaccaacggtcgcatccgcaccacccatgccatcatgcagcgtgtctgtctggatctctgtcagttcattgcgataaagtcggctggaggcaaggatctggactgcattgatctgggtcttcgcttcacgggtgaatcgctgtttgactgcgtcctgggcatccaagcgcgcaccttcaccgacaatccactgccggttgtgcggcaaaaccacgagatgtccgccgagaatcgcggattggccattgccggcgccgtccatggcctcttcccgaatcttccgcgctggctgcgtcccaaggtctttccccgttcccacgatcgattctacggccagatgattagcgaagctctgcgcctgcgtcgttccaagcaccaggaacgcaacgacttcatcaaccatctgctcgagatgcagagggaactggatctcagcgaggaggacatggcctcgcatgccatgaccttcatgttcgacggcctggacaccacctccaatagcattgcccattgtcttctgctgcttggtcgtaatccagattgccagcggcgtttgtacgaggaactccagttggtcaatcccggtggttatctgcccgatctggatgcactgatagatctgccctatctgagtgcctgctttaatgaaagcctacgaatctatccggctggcggctgggcatcaaagacctgcacaaaggagtacgaacttcggggtagccatcactcggaacctctgaagctgaggcctggcgaccatgtgatggtgcccatctacgctctgcacaatgatccggatctgtatccggaaccggatgttttccggcccgaaagattcctcgacggcggtctgaaaaactgcaaacagcagggcatctttctgggattcggaaacgggccacgccagtgtgtcgggatgcgattgggtctggccatggccaaagccgcactggctgccattgtccagcgattcgaggtcgtggtcagtccacggacactcaacggcacagagttagatcccctgatctttgtgggcgttcacaagggcggcatttggctgcagttcgttccacggaaaaatgtgactacgaaataa

SEQ ID NO: 2733 - protein, 505 aa, DROSOPHILA
MFGSLLLGIATLLGAIYAFLVSNFGHWRRRGVTEPRALPLFGSFPNMIWPRQHFTMDMRDIYMHYRNTHSYVGCYLLRAPKLLVLEPRLVYEIYVSAFSHFENNDASKMVDIAKDRLVALNPFVLEGEEWRHQRAVFSTLLTNGRIRTTHAIMQRVCLDLCQFIAIKSAGGKDLDCIDLGLRFTGESLFDCVLGIQARTFTDNPLPVVRQNHEMSAENRGLAIAGAVHGLFPNLPRWLRPKVFPRSHDRFYGQMISEALRLRRSKHQERNDFINHLLEMQRELDLSEEDMASHAMTFMFDGLDTTSNSIAHCLLLLGRNPDCQRRLYEELQLVNPGGYLPDLDALIDLPYLSACFNESLRIYPAGGWASKTCTKEYELRGSHHSEPLKLRPGDHVMVPIYALHNDPDLYPEPDVFRPERFLDGGLKNCKQQGIFLGFGNGPRQCVGMRLGLAMAKAALAAIVQRFEVVVSPRTLNGTELDPLIFVGVHKGGIWLQFVPRKNVTTK

SEQ ID NO: 2734 - DNA, 2637 bp, DROSOPHILA
ataaccacacgtacgattagcgaggagaggagcatcaggtgcagcgaggatgcgaaggaggagcccttccagctcgccgggtcggttttggtcgccttcgccgtggtggtctactgcagctatctgaacatgtatcgtcaccgcaagtcctttcgtaggaaaccacccgctagccactccgcagagtggataggggcctccggagcactgctgtagcccgccccttcgatatatactcatctctacaactaaccttacacttgattagcagccacacatccggtcgcatccacctgtttcgaatggattttaaacactttttatacttttgataagtcaagtcggaggcattcgatttaaaatctattgaaatatgtaatttccgaatttagttttaaaccacgtccgcgctcccaaaaatcccccgaaccgaaaagactacattcgcgatgaattcaaaatttctcttgaaaccaaaagacaaatgcttaagaagtattacaaaaaagaaatcaacattacacacataatcatgcggtttttgaaaacattataaatgtttaatcgagcctcatttgcatttgcatattacataatatacgttagccacatgtcatctcattgcccataataacctgcatcctgcatattatacacgttaatctcacactctgaatttatacaaatcgaagacaattgtaaccgacaccagaacaattcttggatacagaacatgttgcttgataaaagatcttttaaatgatgagaaaaataaaggaagcttaaccgtaaaataccacacacgaacgccttttaattgaaaaatacttgaatatctatgaagaaaatgaaatcagtttaaaatgaaattcaaattaaggcggttccgagtggttcattttactcgttccgccgataggttggcagccctggtttgggctctgactcactgggcgctctgtacaaaaacaacaaagactgcactacattgccaactactccgaatctcagccggctgttcgaagtttagtcgaattaactgtgattcatgccaggaagtccccgtcgagcttcactaacttcagttcataggcgaacgcagtagaacgcagcccaacaaaaatgacagacccccgcatccggcaactggtgattaaatccggagtggtccggcggttgaccagggagaagtactgctacgccaaggaagtgctgaccgagcaggcgcggttggagaagctcaggggcgacggagccgacgaccacgtactgcgcaagcaggaggaggtcatccaggagtgcatcatgatggtgcccgactccaagagaaggtatgcattcttccgtttcccccttcaaaagcctaatgggacgttcctttcacagactgcagaaggagtacgaggtactggaaaagtacctcgccgatgagcaggacctgatcgagacagattcgtataagaaggcagcagagatcctcaaagatgccaaagctgaactggagacctagaaccaccccaaaacttaattcactgcccctaatgtcagcattaatgcaaattcctgatggcaattccatctccgagctctgagctgcagagcggcttgaatccacacatactgagctaatactcttcccctttgtttgttttaaaaaaataacattatatttttttgaaaaggaatcgcctagttgctggtggcgttcgcctcacttttgctaaataaaaataataatctataattaaatattttaaaactacccccaatgtgcaccttcaggcgtttaccaacaccaacaaccaaaataagatgactccgccgcacaaaaagcatagattaagtgaagttaaagccaagattcagcaagttatatcgagtttggggcaactggagcaacagagctgtggagcaggtcgcgatttcgatgtgcaccgggcggaggagctgcagcggagcacggcaaccctgctggatgaacttgaccaagtaccgggccaacaagtagtcgacgaacaaaaacaaagaaaacgccggcgacgcttatatagacgaagccaacatcgggtgatacgtgcaaccgtcaaatctgaggctgcagaacagaagttctccatagaaccgccccgaaataccgcactggaacaagcgaagcacatatccctgcgaaaacaacgcgatgctgcctccattttggagacctttgatcttctggagaaactttgcgagtctcgtggaggagacagagccgccctttgccaaaaactgacccacatgcgtcttgtttggcgcagagtccaagaagagactcaagctggccatgtcaaggagtccaagaaggtggcttcacttgaatctcaatggaaggctgtgttcttcggccgatccttgccaactcccaaattaaataaggggaaatttcttgaaattcggtatgtctagggaaatgcattgtccggcgggagctcccttttaattgcatcgctttttccagctccacatgggattcttacataagctactgtggaagaggctcctctatacccagaggatgggtgctaccgccaacaaagcctacagctcagtggataggctatcgactatccttaacttaatatcatagaaacctttccaaag

SEQ ID NO: 2735 - DNA, 582 bp, DROSOPHILA
ccgaatctcagccggctgttcgaagtttagtcgaattaactgtgattcatgccaggaagtccccgtcgagcttcactaacttcagttcataggcgaacgcagtagaacgcagcccaacaaaaatgacagacccccgcatccggcaactggtgattaaatccggagtggtccggcggttgaccagggagaagtactgctacgccaaggaagtgctgaccgagcaggcgcggttggagaagctcaggggcgacggagccgacgaccacgtactgcgcaagcaggaggaggtcatccaggagtgcatcatgatggtgcccgactccaagagaagactgcagaaggagtacgaggtactggaaaagtacctcgccgatgagcaggacctgatcgagacagattcgtataagaaggcagcagagatcctcaaagatgccaaagctgaactggagacctagaaccaccccaaaacttaattcactgcccctaatgtcagcattaatgcaaattcctgatggcaattccatctccgagctctgagctgcagagcggcttgaatccacacatactgagctaatactcttc

SEQ ID NO: 2736 - protein, 110 aa, DROSOPHILA
MTDPRIRQLVIKSGVVRRLTREKYCYAKEVLTEQARLEKLRGDGADDHVLRKQEEVIQECIMMVPDSKRRLQKEYEVLEKYLADEQDLIETDSYKKAAEILKDAKAELET

SEQ ID NO: 2737 - DNA, 3948 bp, DROSOPHILA
ggtaggttttttgaagcattgccttaggtaaattctttttgataccattacctttacagatcgttcccaatcctgaggagaagacgaagtactttgccaagaacaactagggacagatagagatgcacattaccttagtagcctagcccagttacattcctaatgttcacgactgaatcacgatgcaaacgaacaatcgctagagtcctctgtacagaaaatccaaatccgcaatgccaccgattgtgaatatttcgcatttgctttgtacaaaacatagtttgtttattttacagcataactgagatataaataaattcatgaagtacatgtgaaggtgatgaaaattgcgcggcgccacaggagcggtaccaaaaaggaggagatgttttcgatctcaaaatgccttgaaagctggctcactaggccactctaatgggtaacaattcgattgcaattagtttcatacaaaaatatatgtaatatgtaatatgtagtaggtaaaaggtaatagtaaattagttaggtacgccatggttgcaattaagttatcctgtgctccgacctatgcgtacaacaaagctaggtctgtcgaggtatataaatctggggaaacgggacgggggcgacgacaataactaggacgtcataaggcactcgttctcgtcggattcttcgtgtgtagtctgctttctgttttccgttttgtgcgtttgtcagtaagtgcttcattgtggtgagctttaaatgccaaaaccgaggttcataaaataacgaaggtgcaactgcggttcagatccaagttgtgcgggagattcctttgctgcggagattccgtatcgatcaaagcgttgcactgttcagattcccggaaacgttaatcaaataaggggttaaaaagttcttagagctatgaccatgcaacacgtcgaaccaaaaagcagtcggcgattataatgtttgggcgtttgttcctttagaatgcgattcatcatacagcctactgctcgtagtaaaccgcgtcctggaattaagacaaacacaaatcaatgaagggaaacgagtatatagcactggcatatgctttatttcactcagtgatatatatgatatactgatatactcacaatcaaaaagagcgctgcgaatatgagcgccttcatgcggacatccagattcagggggaaggtgacgctgaagtagtccgcatcggtgaacagctcccttcccagtccggaccattgtttgctgattttgccgatctcctcgttgttggcgctcaatacctgtgcgcggttaaaggggcgagagatgtttgcgtttcgcattaatcggttcgcagttcgcggcatcgcaattaattgactcgctctggacagtcaggcatggctaaccatgacgtcactgcctcggactgcagtctctttgcttctgtacgatcacagcagcggtcagtaaaagggctcatagatcggcacaaacacttggtgcattttagccataaaaagtataaattgattgattgattttcctatatctagaggcatctgttaaataacgtatacaattgaaaatttaaaactagtgtgggtgctattaatttgaacgcttctgtctgttcataattatttagaatatatgtatataggcacttataaatgtttaataattaaaaaagcaattaagtggacgcctgatactgttcattttggaattttataaagcttcgtctttgactgatgaagaccatacatatgtactcctccgaagaatttaaagctaatccgctgaccgctgctgtgtgtgtatacacttgtttgggcattgggaatcgagatcgagagccaagaataaccacttgttggctgcgtactgaccttgaagttggtatcgctgaagcacttgcagggacagacgggtccctcgatctgcaggacggtatcgccgcatgtgttcttgatgttgaacttgggccgcatgaaggtgcagacctgctcaacgctaccgatcacctggccgggtggcgccgacacctccacggcgttcatgcagctgggaaagcagcagaggatgtcgcacttgaagggccggtacaggtggagcacctcgttctgaaaattgtccagtatcttcatctcgaaggggcgcgaccggccgagcatgttgcgggtgcagcagtcgctctcctcgtacgcgaagtacacattctggcccagtgagttcttcaccttgaagcggttcttcgtctcgaagccggtgagcagctccagtttctcgatcttctgcgacacgagcaactggtccagagcggtcaggtattccagtccctgcgggcagttgggcatgcccacgggtatcgacatccagttttctgcaatggggcgttgttccggattagctccctatgtatttatatttatctatatgcataaagtgcttttccgatatctatgcatgggtaaaggaaattagcatagctacaatggcggtcaggcgattagggccagtgatagcagttcttaacataaactaatattttaaacaatatgtatttacgtattgacttggaatcacttcactttttggtacattataaaatatcttttttacatagataactatgggtgctattgccatgcccgctgctgtactaaatgccaagaaagagacgacggcatttccgcctttcgcacacgcccactagcccacacagacgcgcgcaaccgactaggtccatccgagtgatggaattcaacagtggacaaatccatatatgtccatcgctacgcaccaggtccgttggcattgttgccaacattcgccgcctgcggctgcaggaccactgcgccattctcgtcctgcggtgcattctgcgggagcaccttgtactcgctcatctgcatcattgttattcccagcaattaaattcgtatcggattctttaacagttcacaaaacactaaatgcagggtgaccgcgttgcgaacgccgaaaaatgcaacgcaaatgcaccgtacgaaatattctgtcatatattttggtatttattcgaacacagaaaaatatcaacaaaaagctttcagcactcaatgcagtgacaagttaaatttgttatgagctgacgtttttgtggattcatttgtattattgcattgtattgcaatagtttccttaagctagcctctttaagttctaagaattttgagtttatttgtgccagttggtatattcgcgcctgccaccgacggtaacactgcggctatgattggatgataagcgatccataaaagcctggacacaaaagacctgaaacatgctgcttggcagccgaatctccagtcgaaatgagcgaatctcttgataagaccaccagcccgagctcggccagttccagggccacgcccccgggaacgcaggatgcggatgagggccacgacgtgagcgataccttctacacgagccagcgcaagaagggcagccacgtatttcgggtgcgccttgacgccacaggattcaccctgcagcgggagtcgccgggcggtagcattgttaaggagcaacatgtccgcatatcggacattgtgggtgcccgctgcatgcggcccaagaagagccggcgcctggcgatgtcgggcgcctgtgcgtgcagctccggtaatcccaattcgccagccatctcggcgtccggcgatcaccatcgccctgccaccacaccaagcaaatgcagcaccaatagtcgggataatattccttcggatggcggcgatgtcagcgcgtttctctacgtttttgcctatgttctgaagaagaggagcctgcggtcggagttgcaccgggagcgaacggtgctcactctgcgcttccggtcgttcgacaccttcgaggacaacatgagggaggcggatcgttggtacagatcccttcgctggcagttgcatcgcacgctgg

SEQ ID NO: 2738 - DNA, 834 bp, DROSOPHILA
ctgttaaagaatccgatacgaatttaattgctgggaataacaatgatgcagatgagcgagtacaaggtgctcccgcagaatgcaccgcaggacgagaatggcgcagtggtcctgcagccgcaggcggcgaatgttggcaacaatgccaacggacctgaaaactggatgtcgatacccgtgggcatgcccaactgcccgcagggactggaatacctgaccgctctggaccagttgctcgtgtcgcagaagatcgagaaactggagctgctcaccggcttcgagacgaagaaccgcttcaaggtgaagaactcactgggccagaatgtgtacttcgcgtacgaggagagcgactgctgcacccgcaacatgctcggccggtcgcgccccttcgagatgaagatactggacaattttcagaacgaggtgctccacctgtaccggcccttcaagtgcgacatcctctgctgctttcccagctgcatgaacgccgtggaggtgtcggcgccacccggccaggtgatcggtagcgttgagcaggtctgcaccttcatgcggcccaagttcaacatcaagaacacatgcggcgataccgtcctgcagatcgagggacccgtctgtccctgcaagtgcttcagcgataccaacttcaaggtattgagcgccaacaacgaggagatcggcaaaatcagcaaacaatggtccggactgggaagggagctgttcaccgatgcggactacttcagcgtcaccttccccctgaatctggatgtccgcatgaaggcgctcatattcgcagcgctctttttgattgacgcggtttactacgagcagtag

SEQ ID NO: 2739 - protein, 263 aa, DROSOPHILA
MMQMSEYKVLPQNAPQDENGAVVLQPQAANVGNNANGPENWMSIPVGMPNCPQGLEYLTALDQLLVSQKIEKLELLTGFETKNRFKVKNSLGQNVYFAYEESDCCTRNMLGRSRPFEMKILDNFQNEVLHLYRPFKCDILCCFPSCMNAVEVSAPPGQVIGSVEQVCTFMRPKFNIKNTCGDTVLQIEGPVCPCKCFSDTNFKVLSANNEEIGKISKQWSGLGRELFTDADYFSVTFPLNLDVRMKALIFAALFLIDAVYYEQ

SEQ ID NO: 2740 - DNA, 2932 bp, DROSOPHILA
gttgtcagctagagtccaccaacggggggaggatgtttggttatgcagccaaactcttatacactgatgacgcaattttgacttacccatttatggattgtttttcttttttattgaaataaaaatctataaacaacaaactgcattctatataaactttttatttatagaattgttaaacttttaagggaaaaaaatttccaaagctctcgctcaagccgttttccaaatatctcacgtcaaatatttttgctcagggggcgctaacctggttttaatttttattctgtgaaacttgctcatttggcttctgcattcagttaacaattaagtgttgatcgcaccggtattgctatgatacactttaactcaatcggttcggtacgggccgccgttcgatataccctaaatagaccctaaaaaaaactgaaatattacttgaaaaattaactttagcgtgtttataaattgccacaccacttctccaccacttgcctcaacatgttcttcatccaagcttggcgaggttcgccgaaaaatgtgacagtttaaatgtcagcggcaggcagagacttttcacagagtaaaccgttttacgagtattcttgtactgctgttactactgttgttccactgttgagttttgactggtttatttgaattacgtggtaaacgtggtctaacgtggtattcctatcgtaaacaaactgctcgctatagacattcattagatgggttataatagtattaataaatatataccgtccagtaaaaatactcgctttcccagttttttaatctgctcaatcggtcgcttcagtcgccaaagaaaaatgctaaatacctaggaatattaattgagctatcgagaattatcgaaaaatgacttcgcaaaataggaatgatggaaatgtgtgagaatcggctataaagctgtcgtcgctgttttcactatgagttttatttttaggatggaaaataaatttatcgttttgtaacaatggagcgtctattgatcaacacgatatggcgctcctacgcaacaaaattaactgggtcccaggtgaagttaatggcgcggggattgcctaaaaagcaaccgattattggagtacaagatattatagtcgttgcctctggaaagggtggtgttggaaaaagcaccgtggcaggtgtgtactcacatatttcgattcatgggttattggagtccttttcacagttaattttgcctgcagcttggcaaaactaggaaagcgagtaggattgctggacggggatatcttcgggcctactattccacttctcatgaatgtccatggtgagccggttgtgaacgataagaatttgatgatcccgccgcaaaactacaatgtaaagtgcttgtctatgggcatgctgacacctgtagagacctctgttatctggcgaggtcctcttgtaatgtcagcaatacaacgactgctaaaaggtactgattgggggcttctagatgtcctagttatagatactccaccgggcactggagatgtacatctctcactatcccagcatgcacctatcacaggggttatcctggtaacaacacctcatactgcagctgttcaggtgaccttgaaaggtgcaagcatgtacgaaaagttaaatgttcctatctttggcgtagtagagaacatgaagtacaccatttgtcagaactgtaatcaacgattggagttttttaaagacagccgtataagttctctaccgcgcaagctaatttctcttccgttagactcacgaatagcggatagcaacgagagtggagtgcctgttgtaataaaatatccggacagcaagtactcttatctatttacccaattggctgaggagattacacaaatacttaacgaacaaagatgtaatcaaaatcaaaataacagtgcacattaaaaaaaatttgtgtatatcaaaaattcttattacttacatttgttatgctgtaccgctaaaaccaataaagttatcaggggaaagggactgttgtttcgtttcccgcatttacattaaacaacacaccacaaaaccatgtcatgcttcacagctaagactaagagaaggtttcaaactagttctgctttttgtggattgatttttgctggtagtttcaaaaatgtaacgccaactagctgaaatcctcttctggcttctttaatctagattgctcatcttgtctgtgacagatacaatcttcatgtttaaatatgccctcctatagcaaaacgtgtcccggatattaaccatctccacgctttcaaacaggctctgaattcgtgcgcttgtgagaattactatagtattcgcacctctaaatttggatatacacagccatttctaatgctttttatccatccatttatcaatggtaaattgtcagttttggcatcatcaacttaaggatgacaacctatactgaattgtgattccgggtttcatttttatattcattaaattattatttattattattatcattaaatatattgcccgagaaaagcggattgccaaaacgaaccgatctctgctctgaagaagacaacgaagcgacaatcaactacagacaaggcaatacttgtttttcgtaaacctaaaacaaggatcgaatgtcgacaaagtactgaaaataactcaactaggcagacatcgagtcactatggagcgtgcgcgccgcagaaaagagttttacagtctgaaatgtcacatttttaggcactcaacgaattattgtcttcagaatcccatccgtggtaaatgtgctggatcccacgttacacgaggtcatgcttttagttttcttaatatttctattctcactttgctcgtttaaatggggctcaacttgaatcaaatattgctaagcaatatctgaaaggatcagaatcaatgcaagacc

SEQ ID NO: 2741 - DNA, 882 bp, DROSOPHILA
atggagcgtctattgatcaacacgatatggcgctcctacgcaacaaaattaactgggtcccaggtgaagttaatggcgcggggattgcctaaaaagcaaccgattattggagtacaagatattatagtcgttgcctctggaaagggtggtgttggaaaaagcaccgtggcagttaattttgcctgcagcttggcaaaactaggaaagcgagtaggattgctggacggggatatcttcgggcctactattccacttctcatgaatgtccatggtgagccggttgtgaacgataagaatttgatgatcccgccgcaaaactacaatgtaaagtgcttgtctatgggcatgctgacacctgtagagacctctgttatctggcgaggtcctcttgtaatgtcagcaatacaacgactgctaaaaggtactgattgggggcttctagatgtcctagttatagatactccaccgggcactggagatgtacatctctcactatcccagcatgcacctatcacaggggttatcctggtaacaacacctcatactgcagctgttcaggtgaccttgaaaggtgcaagcatgtacgaaaagttaaatgttcctatctttggcgtagtagagaacatgaagtacaccatttgtcagaactgtaatcaacgattggagttttttaaagacagccgtataagttctctaccgcgcaagctaatttctcttccgttagactcacgaatagcggatagcaacgagagtggagtgcctgttgtaataaaatatccggacagcaagtactcttatctatttacccaattggctgaggagattacacaaatacttaacgaacaaagatgtaatcaaaatcaaaataacagtgcacattaa

SEQ ID NO: 2742 - protein, 293 aa, DROSOPHILA
MERLLINTIWRSYATKLTGSQVKLMARGLPKKQPIIGVQDIIVVASGKGGVGKSTVAVNFACSLAKLGKRVGLLDGDIFGPTIPLLMNVHGEPVVNDKNLMIPPQNYNVKCLSMGMLTPVETSVIWRGPLVMSAIQRLLKGTDWGLLDVLVIDTPPGTGDVHLSLSQHAPITGVILVTTPHTAAVQVTLKGASMYEKLNVPIFGVVENMKYTICQNCNQRLEFFKDSRISSLPRKLISLPLDSRIADSNESGVPVVIKYPDSKYSYLFTQLAEEITQILNEQRCNQNQNNSAH

SEQ ID NO: 2743 - DNA, 9063 bp, DROSOPHILA
tgcagctgcagcaaactccagggaatggaaagtttttgcacttgtagacagtaaataatcgcagaaatgttaacatcagcgtgttagcttgtgataatacatctcaatatttcaaatttgtgtgaaaattgagcgaaaaattattagttggtagtctgacattaatgcaaatgtttattctaatttacagcaagaagaaaatccgtcaaggaactgcaacgatagcggattggatctcactggagcagcaggtgcccacagcaacaacaatgaatcggatgctaagaacaccatgatgtttgaaatggatgattaggatgttatttaaaccataaatatattcatattttttgagtgatttagtggcatgttttcaaggtttttaaatgctactacataaatgttaactaacgcaacgtttttttttttttaatatttatactgtaattccttttatatcgaggcgaattgctcaattggaaatacacaaaattgtatttaggcaacacgaatcagggctaaatcagaaatcaaaatgttcattacatcaaatactaagtgttatgtaattcggttaaacattgaaattgttaaaacgcaagatgaaatcctacgctgaactgaaaaagaaacctattattatagatcgataatttcatattcattctcattgaagaacacacaacaatgatgtcttacaagttagcaaactacaagttttaagtaaacattaaaacgcttgtttattggctccatgctcagctcatataacaatcataacacgataaacctaaacaatatcaatagttaacaattcctctagtattacacacaacaaaatcacccaatgcataagtagagtataagctacgtacatgtttagaagcactggctgaatcaatgcatgtaattttaacttttataagcgagctgcaagttaaaatacatatacatctcttatgaatgagaaatccaacctgcatacgagtattgattggcattagaagtggtgttcaaggagtttgttccagtgctcgatttgctggagttcccttcgctttccctccaagacatacagcactgggcagtcgagggaatcacactgtaggctacccaggcgtccgcaacaagcctggcatatctgccgagttagttggtagcccctctccagacgcgctgtcttatctgagagcacaactacgcacgtggtggcgtttttcaggcagtctgggcaaatgcccgccttggtttggcggccacagtcgatcacgcagctggtggtagagaaatactgggagatggtggacttggcaccgcgtgcacccgccaattcgttggcggttccaacggccggcgtcatgagcaacttcctcggcagactggcaaaccagtcgtgcacattggcgcctatgagcagcaggcagcgattcagcggcggaataatcgccttggtaatgtagtagatggcgtttatcttgtgaccctcgttggccaggatgtcgtgcgggctgcgcaccaggcggattagctgcatgcccggcgggccgttgactattatgaaggggacgcgttcgccacgacgcggcacatgtcgtgggtctttttgcatccatttactgaaaacgaaaatggtcataatacaattcaggaatggcaaagaaggaatgtctcgtagcttaccgcgtgagctccagtgctggcacacaagccgtgggcttgtagccattgagacccctgaactccttggcgaaaatcaggtcctgcagattggccctgcccgacagcagcttggtgaactgccggcacacgtacgccttgatcttgctgacgtcttgcgtctcgaacaatatgcgcagcaccttttccagcatcttggccaccgccggacaaccatctcgccgcacagtttctattcccttcgcctcgtaaacgggctgctcctgatcggctgtctcatacatgtaacccacgtagcgcttcttggtctgcagcatgcaaggttggtagaccttctccagttttagcttcactggctgtggattcatttcggtgaccgccttggcgatctcctcgccgattcgaaaagcttcagctcgatttcgacccggcacaagaacgaacatggagtccgtgtcgccatagacgacacgcaccttccactcctcgttgttctccactagtttgatagcacgctccagggtctcccgtcctttggaaactacagaatcgcccacttccactgaaggcattcggccactgaagttagcggcggtgtagccataggtaacattggccatcagcttaaggcccagctgccgtgagtgaaggatccgctgaagtgcagagctgtccttatggagcttcatcgactgtttgaccatttggcgcgtgtccaagatctcggtgagcatgcgcggcaggatgccctcgcgcacttcacgcttcacgaacacaacgccgcatggcgaaacagtaaccagatcgtgctccagcaacttctgcagcatctgccgcgaaactcggagctgcgacgcgccaaattcaaagggcgaacttccacccaggtgctctactctacccaagcacgtggagaagcagtagttgtaggcgatgatcatgctggggtacaagctctgaaaatcaagcacgattaggggatcggcatagaatcgtgactgcggttccattattagcgccaagtactcgggagctctcatatgagcgcgagcctggacgctgggtgaaagtggcaccaggttctttggcttggcgattctatgaagacagagagttcagggaggatgcaacatattttgcctgcgctcaagggttacactcacctcagcatcatgctttccacgcgaaactgtgagccgcgcgacagcacctcgtagaactgaatgccaatgagcttggccatttcgctagtccgtcccagtaagtccagctgatccaggagagttaaggtgccacgcacacgctccaagtaatattccattactatccagcgggtgcagggtgagccgaaccattcggtgagggatttggcagtgtgccagggacatctcttatgcaaaatgtggtacattacgttttcgaaggtgtacgacgtcagtgcaatctcggagcgcatcaggcgccatacgtccagcagaatgcggccgcagagcttcatttccacatccaaatcggtgaactgctcccgatcctcgtccacaaagtcccggaccttctgtgtgggcactcgggacagcagaggagcgatgttgaagcacagatgcttggcccgatcaatcacatagccccaagaggacatctcgatttcgtaccctgcgtatatgtccgcatcccaccgttcacacaaagccagcaacgcctcaaatgcctccgcttcactggtcactacttgcacctcaatatcgcgatctataccatgaaaaggtccttcacttagcaaatcctggacagtgttcaccattatatagccgcaggctttgctaggcagcttttcatccggcaaactgtgttcgatagcataaaacaaacaccgaatctcgtcgtgcatcggatctggttggagatcacctcgcgtggacacaaacacctctaacgttatgattgtcaggtggttgcaatcaatgtcggctttggcctgctgcagattctccaaattaaccttgaacccgaacgtgttgtccaaggtagcgtggctaagtccaaagctgaggtcgtgctgcctatcctggctactgccctctaactggcgcagaaaggaactacgatctagctccgcctgggccgcactactggagacgctctgttcgctggactgcgagcttggtggttcctcgtcctggcttcctatgaagctgagcctagttccgcgcttaaggcgactctttcctgtttctctggctttgctactggtaggggttgccttgcatttatccttagcttgggacaagggcgttagacttagactgcaatcgagttcctcaccagcatcttcatcgccacttccgccatcgccttcctcagcctgcagcatcatagtgatcttctgccgcttgatcttgatggggctgtctatgtcatcagaggacttttttggttcctctcgttgacgaaggagttccttggctttcaaccagatcttggcttcctgccaggtgggtgctagttgtgctggctcgattgctattctttgttgcgtgctgaaatactcccgtactttttgttctccccgatgtcgctgcaacattgccaggccaccaatggctatcagttgccgacgacgccaggaggccaggccacgatcattgcccagtatgctctggaagggatcacagtcatttagcttgttccccggaatgtggagcaccaggaagcccacctccgtcaccttgctcacatcggagggattgctgtagtatggcttttggaactcgtactcgggtatgtccattttacggctaccgctaaccacttcatcgtaggatggaggcagctccaagggggcaatcacgaacgagttgctatcgggagatggaggagcagacctaggagaatccatatgtatctcggggctatccaagaagtcactgaagaccgacggactgttcacaatcagcgaatgctcatagaaacttcgcatcagctccggtgtgttgctctcattgcttttgggacttagctgaggagtggtctcagtctcagggggtcttatgcctgaactgggagtaaattgtttgttcagcaactccgaccgaatgctccatcgaaggcgtttcaagttgggtgttttacgaagtttggtgactatataatcgctttccgtgtcggattcgatagcctcatcatggcatggactaaatgtgatctcctccgtggagtttgctgaatctccaggcgaaataccagctggttcctgtggaattagctcacgttgtaacttttcgtcacagcttcgtgcagtttcatcagacttttttggtttactttcgagatattcgatttgttcagaaacagagttttcctgctgatgcggactctctgagttagatgaactatcttttgttgctttttccaatgcaacagttccattcatgcttgttttagtattttctttgggactttgggatagtctggctttcttttgaggtctatccaaacttgtagtcgtcactcgtggcccagttgtttgtatttcgctggaacactcatctggatttgccgaattaaccttatggcgagcactgcgacgcggcttcagctcatccaaggcacttccttctgacctgtggggtctctctatctcacaaccggccttgggtagactttctatatcttgattccgagtgctccatcgcgtctttcttactactttctttggtggtaattgcttgccgtcctctgtttcgaacatgtcgctcaagccaggatttctgtccctcggcgtaagggaacaaataatgtgtgttttgtccagattgctagttgatcgtctggtactcctaactggagtacaactatcgggaaaacaataatataaatcgccttgccataaaggatatcagttaaccatactcgttctttaagagcacaaaactgtcctcgaaacttttccgtcgcatctccgacatggctagttttttgcgcaatgagatttctggcctacgaacaaaaatgttggtcatagaaatgttggtacatatgatgaaaacaaagaatttgattaccgaagtgttcccgttccggttccttggtctagctgcaaactgaggcgtggattagatggtctccctgcgaattcatcgttgctttctgcaattggttatgattgcaaaaaaaattcgtgtgatcgttatcaattctacccactctttgatgaactgcttccaattgtcaaagccagcggcgcatatttcttggctgcactggttttcggagtacgtggcgatttgggaagacttttctgacctattggcgttgttggagtctttgaaggacttgactttgacttagagctgatcgatttaatgggggtcctttgtaggcgatcatcagcaccatcaatttggggcagtttactagatgctttcagttccttcgattccgcaggctgactttgtgttaacttaagcaacaactcatcgacatcgtctaggacggtagagaagtcatgtcgggtttcttggtcggcatcctcgtcggagtcaacatcttcgtcgaaaagagcagcagtagctgcggtctccttgtccaacaattcgggtgtaagttcgactacaaaaagagatcagtgtaaaacatttattaaaaaacaactccatttcacaacaactcacactttttatgttgcgacaatggagccaacgaactgtctaagtccacatgcgattcactttcattctgctcctccaacagctgcaacgcgtccaaaagttccaaatcctcctccctcactgaagcaaggagaaaacaactggtttataccaaagtgcgagttgtaattttggcaaccgtgtactcacaggtggcatcatggggtatcgctccatgaggctgtgtgaggctcagtattagttcctcatccactacagtttcgtccaagtcatcggactcatccttggaggttgacaaactgacactgctgctgtagccgcaggtaacatggttttgtatgaaggaagcattaaccagcagttgctgctgatcctgtgagcattcctccggataaacggcgttggctagaagtttttgcaagttaaacctgcgtttctgtgcctttgtgccgggcatggtggtctgcatggttgcttggggaaggattgtctgatccgacaacgtttgctcggacagtgtggactgctccagtgtcatcagcttgctctccagagcggtgcggtagaagatatcgctttcggcgatttcaatttgatgccgctcctgtgttggcggtaactccaatactggcacctacgatggatggacaaggctgtaggatttatcaatacaagatgtattcccggattaccgcttcagccttctcctcatcgccagcatcggtgtgcttctcgacaagtttctgtcggcgcaatttctcatcattccagatggcctcgatgccggggttagtgtggttgctcttactcttcgccaccagctggaaccgattcagtatgaagttcgagctgacatccacctctaaagcactgcaggccactttcttagcggttgtgatgtccagaagctgcgcttgcttgacatttgcataggggattactaaagggttagttacgggttagttaggaacttaaatagatgatgtatccagcttgccgtcatcgtcatggttgcgccggaacttgagaacctccagcgggacatgcacatagctcataccgtacagattgtagtcgatcataaactgcagaatgtagggcacatgcgactcgtgcggactgaagttcttgctcagaatggcgccgctttggagaaggttggcggcgcggcgtacgaaccggggattgaacatgtagatcttgaggaactggtgttccactcgatggtagccatagaagggtctgtaaagagaggtcggttagagatttacgccaagaagtcgtccagaaagaactcacatgcccttgaccagctgaattttgaacacatgctgggcgttggagctgccttgacccaaggatatgttgatggccttgtccaggtgcatggccatctgcaggatgccccgctccagggactcaaaatccttcttgtcatacggaatgtatagataggggaaaactccgtgtacatgcatgcaggtcttctggcctctggagttgccgccaaacactcgaatcactggcacctggaagtggaatggatcgttataccagtttttactgtggtgaaatagaccggctcacccgcttgatttctttgccgcgcagctccgaatagcacggatccattccgaactgcggcttctccatatagaaatccgcgatgaccagccggacggagtagactccatcgattgcctctcctgcggctgccattttcgccaaaactcagattcgttttcgcagagctatttgttgtcaattcaattcaaactagagtgaccatgtatcgaaaagtatcgatctatcgattgttgctttttgaattcaaactaagggcaaaaacgtaaaataaatatttttaaattgaaagaagagctctagaacttaaagaactaacttggcaacaatgttaagaaaaactttagtgcaagatgaaggaattttatacttgacaatgctaatttttgtataaacttaattacgtaaagggtcctacaacccatatatatcattagttgttagaggctctttttaaggcgcttatataatcaaaccctttgtaaaaattaaagttttaaatggaattctaatcgatttatttcacattagctttatttaagtgtgacctacgcagaaagctagcgaaatactcatcaaccctcccccgccatcgcagcgccattctcctaatttgcgaaaaaagctccgggaaaaggaaaaagcggcagtcgtaatagcgaactgaaactgaacgagagtaaaagtgaaaagacagcaggaactcagccatgtcgaagatcggaattaacggatttggccgcatcggccgcttggtgctccgcgccgccatcgataagggcgcctccgtggtggccgtcaacgatcccttcatcgatgtcaactacatggtttacctgtttaaattcgactcgactcacggtcgtttcaagggcaccgttgcggctgagggcggattcctggtggtgaacggccagaagatcaccgtgttcagcgagcgcgacccggccaacatcaactgggccagtgctggagccgagtatgtggtggagtccaccggagtgttcaccaccattgacaaggcgtccacccacttgaagggcggcgccaagaaggtcatcatctcggccccatccgccgatgcgcccatgttcgtgtgcggcgttaacctggacgcctacagccccgacatgaa

SEQ ID NO: 2744 - DNA, 5610 bp, DROSOPHILA
atggcagccgcaggagaggcaatcgatggagtctactccgtccggctggtcatcgcggatttctatatggagaagccgcagttcggaatggatccgtgctattcggagctgcgcggcaaagaaatcaagcgggtgccagtgattcgagtgtttggcggcaactccagaggccagaagacctgcatgcatgtacacggagttttcccctatctatacattccgtatgacaagaaggattttgagtccctggagcggggcatcctgcagatggccatgcacctggacaaggccatcaacatatccttgggtcaaggcagctccaacgcccagcatgtgttcaaaattcagctggtcaagggcatacccttctatggctaccatcgagtggaacaccagttcctcaagatctacatgttcaatccccggttcgtacgccgcgccgccaaccttctccaaagcggcgccattctgagcaagaacttcagtccgcacgagtcgcatgtgccctacattctgcagtttatgatcgactacaatctgtacggtatgagctatgtgcatgtcccgctggagcaagcgcagcttctggacatcacaaccgctaagaaagtggcctgcagtgctttagaggtggatgtcagctcgaacttcatactgaatcggttccagctggtggcgaagagtaagagcaaccacactaaccccggcatcgaggccatctggaatgatgagaaattgcgccgacagaaacttgtcgagaagcacaccgatgctggcgatgaggagaaggctgaagcggtgccagtattggagttaccgccaacacaggagcggcatcaaattgaaatcgccgaaagcgatatcttctaccgcaccgctctggagagcaagctgatgacactggagcagtccacactgtccgagcaaacgttgtcggatcagacaatccttccccaagcaaccatgcagaccaccatgcccggcacaaaggcacagaaacgcaggtttaacttgcaaaaacttctagccaacgccgtttatccggaggaatgctcacaggatcagcagcaactgctggttaatgcttccttcatacaaaaccatgttacctgcggctacagcagcagtgtcagtttgtcaacctccaaggatgagtccgatgacttggacgaaactgtagtggatgaggaactaatactgagcctcacacagcctcatggagcgataccccatgatgccaccttgagggaggaggatttggaacttttggacgcgttgcagctgttggaggagcagaatgaaagtgaatcgcatgtggacttagacagttcgttggctccattgtcgcaacataaaaagttcgaacttacacccgaattgttggacaaggagaccgcagctactgctgctcttttcgacgaagatgttgactccgacgaggatgccgaccaagaaacccgacatgacttctctaccgtcctagacgatgtcgatgagttgttgcttaagttaacacaaagtcagcctgcggaatcgaaggaactgaaagcatctagtaaactgccccaaattgatggtgctgatgatcgcctacaaaggacccccattaaatcgatcagctctaagtcaaagtcaagtccttcaaagactccaacaacgccaataggtcagaaaagtcttcccaaatcgccacgtactccgaaaaccagtgcagccaagaaatatgcgccgctggctttgacaattggaagcagttcatcaaagaagagtccgcatcagcaggaaaactctgtttctgaacaaatcgaatatctcgaaagtaaaccaaaaaagtctgatgaaactgcacgaagctgtgacgaaaagttacaacgtgagctaattccacaggaaccagctggtatttcgcctggagattcagcaaactccacggaggagatcacatttagtccatgccatgatgaggctatcgaatccgacacggaaagcgattatatagtcaccaaacttcgtaaaacacccaacttgaaacgccttcgatggagcattcggtcggagttgctgaacaaacaatttactcccagttcaggcataagaccccctgagactgagaccactcctcagctaagtcccaaaagcaatgagagcaacacaccggagctgatgcgaagtttctatgagcattcgctgattgtgaacagtccgtcggtcttcagtgacttcttggatagccccgagatacatatggattctcctaggtctgctcctccatctcccgatagcaactcgttcgtgattgcccccttggagctgcctccatcctacgatgaagtggttagcggtagccgtaaaatggacatacccgagtacgagttccaaaagccatactacagcaatccctccgatgtgagcaaggtgacggaggtgggcttcctggtgctccacattccggggaacaagctaaatgactgtgatcccttccagagcatactgggcaatgatcgtggcctggcctcctggcgtcgtcggcaactgatagccattggtggcctggcaatgttgcagcgacatcggggagaacaaaaagtacgggagtatttcagcacgcaacaaagaatagcaatcgagccagcacaactagcacccacctggcaggaagccaagatctggttgaaagccaaggaactccttcgtcaacgagaggaaccaaaaaagtcctctgatgacatagacagccccatcaagatcaagcggcagaagatcactatgatgctgcaggctgaggaaggcgatggcggaagtggcgatgaagatgctggtgaggaactcgattgcagtctaagtctaacgcccttgtcccaagctaaggataaatgcaaggcaacccctaccagtagcaaagccagagaaacaggaaagagtcgccttaagcgcggaactaggctcagcttcataggaagccaggacgaggaaccaccaagctcgcagtccagcgaacagagcgtctccagtagtgcggcccaggcggagctagatcgtagttcctttctgcgccagttagagggcagtagccaggataggcagcacgacctcagctttggacttagccacgctaccttggacaacacgttcgggttcaaggttaatttggagaatctgcagcaggccaaagccgacattgattgcaaccacctgacaatcataacgttagaggtgtttgtgtccacgcgaggtgatctccaaccagatccgatgcacgacgagattcggtgtttgttttatgctatcgaacacagtttgccggatgaaaagctgcctagcaaagcctgcggctatataatggtgaacactgtccaggatttgctaagtgaaggaccttttcatggtatagatcgcgatattgaggtgcaagtagtgaccagtgaagcggaggcatttgaggcgttgctggctttgtgtgaacggtgggatgcggacatatacgcagggtacgaaatcgagatgtcctcttggggctatgtgattgatcgggccaagcatctgtgcttcaacatcgctcctctgctgtcccgagtgcccacacagaaggtccgggactttgtggacgaggatcgggagcagttcaccgatttggatgtggaaatgaagctctgcggccgcattctgctggacagatgtccctggcacactgccaaatccctcaccgaatggttcggctcaccctgcacccgctggatagtaatggaatattacttggagcgtgtgcgtggcaccttaactctcctggatcagctggacttactgggacggactagcgaaatggccaagctcattggcattcagttctacgaggtgctgtcgcgcggctcacagtttcgcgtggaaagcatgatgctgagaatcgccaagccaaagaacctggtgccactttcacccagcgtccaggctcgcgctcatatgagagctcccgagtacttggcgctaataatggaaccgcagtcacgattctatgccgatcccctaatcgtgcttgattttcagagcttgtaccccagcatgatcatcgcctacaactactgcttctccacgtgcttgggtagagtagagcacctgggtggaagttcgccctttgaatttggcgcgtcgcagctccgagtttcgcggcagatgctgcagaagttgctggagcacgatctggttactgtttcgccatgcggcgttgtgttcgtgaagcgtgaagtgcgcgagggcatcctgccgcgcatgctcaccgagatcttggacacgcgccaaatggtcaaacagtcgatgaagctccataaggacagctctgcacttcagcggatccttcactcacggcagctgggccttaagctgatggccaatgttacctatggctacaccgccgctaacttcagtggccgaatgccttcagtggaagtgggcgattctgtagtttccaaaggacgggagaccctggagcgtgctatcaaactagtggagaacaacgaggagtggaaggtgcgtgtcgtctatggcgacacggactccatgttcgttcttgtgccgggtcgaaatcgagctgaagcttttcgaatcggcgaggagatcgccaaggcggtcaccgaaatgaatccacagccagtgaagctaaaactggagaaggtctaccaaccttgcatgctgcagaccaagaagcgctacgtgggttacatgtatgagacagccgatcaggagcagcccgtttacgaggcgaagggaatagaaactgtgcggcgagatggttgtccggcggtggccaagatgctggaaaaggtgctgcgcatattgttcgagacgcaagacgtcagcaagatcaaggcgtacgtgtgccggcagttcaccaagctgctgtcgggcagggccaatctgcaggacctgattttcgccaaggagttcaggggtctcaatggctacaagcccacggcttgtgtgccagcactggagctcacgcgtaaatggatgcaaaaagacccacgacatgtgccgcgtcgtggcgaacgcgtccccttcataatagtcaacggcccgccgggcatgcagctaatccgcctggtgcgcagcccgcacgacatcctggccaacgagggtcacaagataaacgccatctactacattaccaaggcgattattccgccgctgaatcgctgcctgctgctcataggcgccaatgtgcacgactggtttgccagtctgccgaggaagttgctcatgacgccggccgttggaaccgccaacgaattggcgggtgcacgcggtgccaagtccaccatctcccagtatttctctaccaccagctgcgtgatcgactgtggccgccaaaccaaggcgggcatttgcccagactgcctgaaaaacgccaccacgtgcgtagttgtgctctcagataagacagcgcgtctggagaggggctaccaactaactcggcagatatgccaggcttgttgcggacgcctgggtagcctacagtgtgattccctcgactgcccagtgctgtatgtcttggagggaaagcgaagggaactccagcaaatcgagcactggaacaaactccttgaacaccacttctaa

SEQ ID NO: 2745 - protein, 1869 aa, DROSOPHILA
MAAAGEAIDGVYSVRLVIADFYMEKPQFGMDPCYSELRGKEIKRVPVIRVFGGNSRGQKTCMHVHGVFPYLYIPYDKKDFESLERGILQMAMHLDKAINISLGQGSSNAQHVFKIQLVKGIPFYGYHRVEHQFLKIYMFNPRFVRRAANLLQSGAILSKNFSPHESHVPYILQFMIDYNLYGMSYVHVPLEQAQLLDITTAKKVACSALEVDVSSNFILNRFQLVAKSKSNHTNPGIEAIWNDEKLRRQKLVEKHTDAGDEEKAEAVPVLELPPTQERHQIEIAESDIFYRTALESKLMTLEQSTLSEQTLSDQTILPQATMQTTMPGTKAQKRRFNLQKLLANAVYPEECSQDQQQLLVNASFIQNHVTCGYSSSVSLSTSKDESDDLDETVVDEELILSLTQPHGAIPHDATLREEDLELLDALQLLEEQNESESHVDLDSSLAPLSQHKKFELTPELLDKETAATAALFDEDVDSDEDADQETRHDFSTVLDDVDELLLKLTQSQPAESKELKASSKLPQIDGADDRLQRTPIKSISSKSKSSPSKTPTTPIGQKSLPKSPRTPKTSAAKKYAPLALTIGSSSSKKSPHQQENSVSEQIEYLESKPKKSDETARSCDEKLQRELIPQEPAGISPGDSANSTEEITFSPCHDEAIESDTESDYIVTKLRKTPNLKRLRWSIRSELLNKQFTPSSGIRPPETETTPQLSPKSNESNTPELMRSFYEHSLIVNSPSVFSDFLDSPEIHMDSPRSAPPSPDSNSFVIAPLELPPSYDEVVSGSRKMDIPEYEFQKPYYSNPSDVSKVTEVGFLVLHIPGNKLNDCDPFQSILGNDRGLASWRRRQLIAIGGLAMLQRHRGEQKVREYFSTQQRIAIEPAQLAPTWQEAKIWLKAKELLRQREEPKKSSDDIDSPIKIKRQKITMMLQAEEGDGGSGDEDAGEELDCSLSLTPLSQAKDKCKATPTSSKARETGKSRLKRGTRLSFIGSQDEEPPSSQSSEQSVSSSAAQAELDRSSFLRQLEGSSQDRQHDLSFGLSHATLDNTFGFKVNLENLQQAKADIDCNHLTIITLEVFVSTRGDLQPDPMHDEIRCLFYAIEHSLPDEKLPSKACGYIMVNTVQDLLSEGPFHGIDRDIEVQVVTSEAEAFEALLALCERWDADIYAGYEIEMSSWGYVIDRAKHLCFNIAPLLSRVPTQKVRDFVDEDREQFTDLDVEMKLCGRILLDRCPWHTAKSLTEWFGSPCTRWIVMEYYLERVRGTLTLLDQLDLLGRTSEMAKLIGIQFYEVLSRGSQFRVESMMLRIAKPKNLVPLSPSVQARAHMRAPEYLALIMEPQSRFYADPLIVLDFQSLYPSMIIAYNYCFSTCLGRVEHLGGSSPFEFGASQLRVSRQMLQKLLEHDLVTVSPCGVVFVKREVREGILPRMLTEILDTRQMVKQSMKLHKDSSALQRILHSRQLGLKLMANVTYGYTAANFSGRMPSVEVGDSVVSKGRETLERAIKLVENNEEWKVRVVYGDTDSMFVLVPGRNRAEAFRIGEEIAKAVTEMNPQPVKLKLEKVYQPCMLQTKKRYVGYMYETADQEQPVYEAKGIETVRRDGCPAVAKMLEKVLRILFETQDVSKIKAYVCRQFTKLLSGRANLQDLIFAKEFRGLNGYKPTACVPALELTRKWMQKDPRHVPRRGERVPFIIVNGPPGMQLIRLVRSPHDILANEGHKINAIYYITKAIIPPLNRCLLLIGANVHDWFASLPRKLLMTPAVGTANELAGARGAKSTISQYFSTTSCVIDCGRQTKAGICPDCLKNATTCVVVLSDKTARLERGYQLTRQICQACCGRLGSLQCDSLDCPVLYVLEGKRRELQQIEHWNKLLEHHF

SEQ ID NO: 2746 - DNA, 2868 bp, DROSOPHILA
cttttaattgaaaaatacttgaatatctatgaagaaaatgaaatcagtttaaaatgaaattcaaattaaggcggttccgagtggttcattttactcgttccgccgataggttggcagccctggtttgggctctgactcactgggcgctctgtacaaaaacaacaaagactgcactacattgccaactactccgaatctcagccggctgttcgaagtttagtcgaattaactgtgattcatgccaggaagtccccgtcgagcttcactaacttcagttcataggcgaacgcagtagaacgcagcccaacaaaaatgacagacccccgcatccggcaactggtgattaaatccggagtggtccggcggttgaccagggagaagtactgctacgccaaggaagtgctgaccgagcaggcgcggttggagaagctcaggggcgacggagccgacgaccacgtactgcgcaagcaggaggaggtcatccaggagtgcatcatgatggtgcccgactccaagagaaggtatgcattcttccgtttcccccttcaaaagcctaatgggacgttcctttcacagactgcagaaggagtacgaggtactggaaaagtacctcgccgatgagcaggacctgatcgagacagattcgtataagaaggcagcagagatcctcaaagatgccaaagctgaactggagacctagaaccaccccaaaacttaattcactgcccctaatgtcagcattaatgcaaattcctgatggcaattccatctccgagctctgagctgcagagcggcttgaatccacacatactgagctaatactcttcccctttgtttgttttaaaaaaataacattatatttttttgaaaaggaatcgcctagttgctggtggcgttcgcctcacttttgctaaataaaaataataatctataattaaatattttaaaactacccccaatgtgcaccttcaggcgtttaccaacaccaacaaccaaaataagatgactccgccgcacaaaaagcatagattaagtgaagttaaagccaagattcagcaagttatatcgagtttggggcaactggagcaacagagctgtggagcaggtcgcgatttcgatgtgcaccgggcggaggagctgcagcggagcacggcaaccctgctggatgaacttgaccaagtaccgggccaacaagtagtcgacgaacaaaaacaaagaaaacgccggcgacgcttatatagacgaagccaacatcgggtgatacgtgcaaccgtcaaatctgaggctgcagaacagaagttctccatagaaccgccccgaaataccgcactggaacaagcgaagcacatatccctgcgaaaacaacgcgatgctgcctccattttggagacctttgatcttctggagaaactttgcgagtctcgtggaggagacagagccgccctttgccaaaaactgacccacatgcgtcttgtttggcgcagagtccaagaagagactcaagctggccatgtcaaggagtccaagaaggtggcttcacttgaatctcaatggaaggctgtgttcttcggccgatccttgccaactcccaaattaaataaggggaaatttcttgaaattcggtatgtctagggaaatgcattgtccggcgggagctcccttttaattgcatcgctttttccagctccacatgggattcttacataagctactgtggaagaggctcctctatacccagaggatgggtgctaccgccaacaaagcctacagctcagtggataggctatcgactatccttaacttaatatcatagaaacctttccaaagctcacactccttataaagaagcaagattatatagtaattattgtggaattttatttctttagaagaatcaatctgtattcagcttagacgagggcagacagttaaagtagccgtctattcgtagatccagtccttggcggccggggtccaggtgaccagctccttttcgttgaaccacagggcgatctccttctcggcagactcgacggcatcggagccgtggatgatgttgcgtccgacctgaatgcagaagtcaccgcggatggtgccgggcagcgagtcggcggggttggtggcgccgagcatctggcgaccggtcttgaccacattcagaccctcccacaccatgggcaccacggggccggagttcatgtagttcacgagtccggggaagaaggggcgggcggacagatcagcgtagtgcttctccagcagctccttggaggcctggttacaaaacggttcgttatcagttaattgcagttctgacctctaaacacatgtcattccgcgatgacgcctgcacccagcctttgaggttaggtccgatggcaaccccgcgtggggcaacccgtttccacgtatttatatctattgatttcttcctaattcaattatccgcttacccaggtgaacttcagggcgaccagcttgaagcccttctgctcgaagcgctcgatgatcttgccgacgagcccgcgctggacgccatcgggcttgaccatgatgaaagtcctctccttgttagccgccattgtcgccgagattacagaaaagaatgccaaaattgtgccgagcatcaggagcttcatgtgttcgccgttgcaaaaaaatcccgaatacgaaatgccggcaaggtgaattgtgggaaatcgtcaagtggtcacactgggcagccagccgcgttcttgagtttttgtttttgttgggcgatttaaaggataggaaaatacttgttatttaaattccaaagcggaaatttgagtgcattgctaaagtattcatatttttttcagtttataaccgctcaaatggggctgc

SEQ ID NO: 2747 - DNA, 806 bp, DROSOPHILA
agatgactccgccgcacaaaaagcatagattaagtgaagttaaagccaagattcagcaagttatatcgagtttggggcaactggagcaacagagctgtggagcaggtcgcgatttcgatgtgcaccgggcggaggagctgcagcggagcacggcaaccctgctggatgaacttgaccaagtaccgggccaacaagtagtcgacgaacaaaaacaaagaaaacgccggcgacgcttatatagacgaagccaacatcgggtgatacgtgcaaccgtcaaatctgaggctgcagaacagaagttctccatagaaccgccccgaaataccgcactggaacaagcgaagcacatatccctgcgaaaacaacgcgatgctgcctccattttggagacctttgatcttctggagaaactttgcgagtctcgtggaggagacagagccgccctttgccaaaaactgacccacatgcgtcttgtttggcgcagagtccaagaagagactcaagctggccatgtcaaggagtccaagaaggtggcttcacttgaatctcaatggaaggctgtgttcttcggccgatccttgccaactcccaaattaaataaggggaaatttcttgaaattcgctccacatgggattcttacataagctactgtggaagaggctcctctatacccagaggatgggtgctaccgccaacaaagcctacagctcagtggataggctatcgactatccttaacttaatatcatagaaacctttccaaagctcacactccttataaagaagcaagattatatagtaattat

SEQ ID NO: 2748 - protein, 246 aa, DROSOPHILA
MTPPHKKHRLSEVKAKIQQVISSLGQLEQQSCGAGRDFDVHRAEELQRSTATLLDELDQVPGQQVVDEQKQRKRRRRLYRRSQHRVIRATVKSEAAEQKFSIEPPRNTALEQAKHISLRKQRDAASILETFDLLEKLCESRGGDRAALCQKLTHMRLVWRRVQEETQAGHVKESKKVASLESQWKAVFFGRSLPTPKLNKGKFLEIRSTWDSYISYCGRGSSIPRGWVLPPTKPTAQWIGYRLSLT

SEQ ID NO: 2749 - DNA, 4242 bp, DROSOPHILA
aacgcctcaagccggagattcccttaaatttcactcagctctctcacttaaaatgcacttaaattgcacactgggcacccatgtgcgtacatcggcctaccgaacggccactaaacaactgaaccacgcaaatgcacccgcatgtcgggcggcagggcaactctgggcggagttttacctatgcttttcactcgctgccgccaactgcttgctccttggggaccgcttcacctgtcgccgctcgcgaatcgcttcacttttaatttaacactagtttgccttgtaatttctttactttttcgccctcagcgaacagcgaacactcaaagactagggctgccaaagcatcgatggcactatcggcactcgcaggccgagggctacgcacgactatcgcaatggcttagcgatgacacttttaaagcattgctgtaaattttaaaaataaactataaaatttatattcgaaatatatttgattcttttaaatttatattagcacatcaaattttggaaatatttaaattgttattttccctatatatttttttttaattttaattttgttaatacgatttcatattgaaattgttttctacagtaagtgatattttatggtattcctattttattttttaagcataatttgcaaataatatataagctgtgttgccgatagtttaagaaaaaattctaatgcttgattgtttcatgaatcagcaatatgattcgcattcagaattttagtcagccgcatattcacattttcgagatacagttttgaatcatagaatttatcataaggaaaataattacaatttatacaaaaattgcaatatcacgtttttggaatattattgtaggggtcataatattccaaaaacgtgatattgcaatttatgtataaattgtaattatattccttatgattaattcaatgataataaatataataatttcttaaagtgattaattccatgaaaaacacactccactttaagataccgctaaaatggtcagaccgaaatctcttccaatgcttcagcgtcttttcgatttaatcaattcatataaactatgtatatttaggaaatcaacaaaagttaatatctaactaaaatttcgtacaaaatccagcgcggtcatcgacctagcggatcttggtgaccattccggcggcaatggtgactcccgccacgcgaagcatcacgcgtcccagctccttgaagtccgcataccgctcgatgcagatgggtctgctggtttccagttccactagggcacacgagttgttgcccaggcaacgcggcttcttcttgaccacctcgccggtgctcttgtgaatcgatgcggtcagcttgcagaccacggcgggctctattagggattggtggtgcagcagcacggggaagcccatggtaatgggcaccttgacgttgaacacgattatgcgggcctggaatcgcgttgtcaccggaataggggtttgtggatcgctgatgatgcagcccacggtgacgttgttgatgtccaaggcgggcagggtgacggagacctgatcgccggcgaacacgcaagtctgtgggaattcgttcatggtaagggatttcacttgggcctgctcccggctggcacccaccagcaccttgtcgttcaggcacagcactccggtttccactcgtcccgagatgcagaatccggagccagtgcccttgtaaatgtccgacacggacattcgcagcggtctgtcgatggctctttcggggatcttgaagttctcaatgacatcgaggaggtggcgtccactgtaccagttggtcagggcgggttcctgggctttcttggtgaggttctcgccggttagtccggaacagggcgtaaaactcacatcggaatccttgaagcccgccagtttgaggaaggactttagcttggtcacaatctctgtgaatcggtcctgggaccagccaacggtgtccagcttgttgatgaccacgcctagctggttaacccccagggatcgcactagaatggcgtgctctctagtctgtccgccgagctcaaagccggattcaaactctccccttgtagcatccaccaccagaagggcaacatccgcctgtgtggcaccggagatcatgttcggaatgaagtccttgtgccccggagcatccagcagtgtgacgatcttggtcttggtttcgatacgcgactggcccacgtccatggtgatgccgcgggcccgctcctcgcccgtctcgtccagcacccaggcatacatgaagctctgcttgcccagcttcttggactcctgctcgtgcttgtgcatcactcgctgcgaaacgttgccggtgtcgtacagtagatggcccatcagcgtactcttcccggcgtcgacgtgaccaatgacaatcatgtgaatgtggctcttctggtcggctcgctccttctcgtacagctggcgggcattgcgcacggcctgttccttggagaccttgaaaacggttgctgagctacgggagatgtcgtcgccggcgctaatgtcaacgggtgtgtttctgcccgagaccacaggcgatgagggcaccttgggcgagggtatttcgaagccacgtcgcggctctttaaggctgatcttgggtggtggcgtaggcaccgttttgctgaccgtctttggcagcactggagcagcgggcgctttcatcttattcacagccggcttggcagacttgttggtctcttcgttgaggatctcgtccaggatcttctgcatgtcatagtcgaatttcatggatgtctccacgatgcggcgctcggagacggcatcgcccaccacgctgcgcacctcgtccacgcaggagctcagcttggcctgctcgatctcgtccagttgcggcatttggaagctctcggagtcgcggcgagccttggcgaaggcggcgtcctcgtcctcatcctcgtcggcctcctcctcttggatgtccttgttcttgctgatgaacgccgagatgctctgctggccacgagcccgatcgtagagccattgctgggcatccgtgggcgagatgcagtgctcgtcctccacggagtgcccgtagatgtcgtcgtagccgtcgtactcatcattgtagtccatggtgcgcactatcctgtgccgcgacattttggaggactctgtatttcacaatttacggagcagggtcagaatttcatcaaaaataataaaggtgcgtgcaggtgtggctgcctttttagaggtttggtattttgcggcactttgaccaggagtttttagtacaatagtacggttagaaggtattgccactagcggagaggcgactgttctgatttgcttcatgtatcaatcaattgacataagaatctaataatttgttatttttaaaatctgcacatttttcaaatatgttataaggtcgaaagaaggaacaacattggtgcaagtgtgaaaccgtttaagcataattgatgcggccttgtgtgaacaatgatgtgtgcttaaatataccaagcaggctggcagccacccccacacagtatttaaccacccccgaggaacggtcacattgctgcgagtctgaatatttttttgctttgtgtcgcgttttaatgtgaaaagaaaaacactttttccacggttacgggcgcagaaatcagtgcaaaacattgcgaatacggagtgcccgaaaatgcaggcggggcagcactaagtcggagccgcatctcccccgatttccgccgtgctggcagccaacgttggcagcccgaatccgaatctccagcgcactcgtttattattaaacaacgggcaacggaaacagggaaagaaaaacgcagagaatccaagccagaaaatatgtacaacaacggggccaggggcttctccattcacgacgccttcgaggaggagaccgacgaggcgatacgcgtctatggctccaccgtgatatccacgcccatgagaggcaagcaaggtcgctccaccgaagacgtctccatccggattcaggaccccaagtgagtgggctaggctcgttctctggtgaaaacaggtcttctttgatctatctgcctgcgtgggcagcgattactggcaccattttcgtcgccaccgcggccgccgctgtgtgccaaacaaggagctccattcccattcccattgtgactgtgattccggttattgttgtgtttatactatgtgtacatcgtacaattgtacgttcg

SEQ ID NO: 2750 - DNA, 2242 bp, DROSOPHILA
cacacctgcacgcacctttattatttttgatgaaattctgaccctgctccgtaaattgtgaaatacagagtcctccaaaatgtcgcggcacaggatagtgcgcaccatggactacaatgatgagtacgacggctacgacgacatctacgggcactccgtggaggacgagcactgcatctcgcccacggatgcccagcaatggctctacgatcgggctcgtggccagcagagcatctcggcgttcatcagcaagaacaaggacatccaagaggaggaggccgacgaggatgaggacgaggacgccgccttcgccaaggctcgccgcgactccgagagcttccaaatgccgcaactggacgagatcgagcaggccaagctgagctcctgcgtggacgaggtgcgcagcgtggtgggcgatgccgtctccgagcgccgcatcgtggagacatccatgaaattcgactatgacatgcagaagatcctggacgagatcctcaacgaagagaccaacaagtctgccaagccggctgtgaataagatgaaagcgcccgctgctccagtgctgccaaagacggtcagcaaaacggtgcctacgccaccacccaagatcagccttaaagagccgcgacgtggcttcgaaataccctcgcccaaggtgccctcatcgcctgtggtctcgggcagaaacacacccgttgacattagcgccggcgacgacatctcccgtagctcagcaaccgttttcaaggtctccaaggaacaggccgtgcgcaatgcccgccagctgtacgagaaggagcgagccgaccagaagagccacattcacatgattgtcattggtcacgtcgacgccgggaagagtacgctgatgggccatctactgtacgacaccggcaacgtttcgcagcgagtgatgcacaagcacgagcaggagtccaagaagctgggcaagcagagcttcatgtatgcctgggtgctggacgagacgggcgaggagcgggcccgcggcatcaccatggacgtgggccagtcgcgtatcgaaaccaagaccaagatcgtcacactgctggatgctccggggcacaaggacttcattccgaacatgatctccggtgccacacaggcggatgttgcccttctggtggtggatgctacaaggggagagtttgaatccggctttgagctcggcggacagactagagagcacgccattctagtgcgatccctgggggttaaccagctaggcgtggtcatcaacaagctggacaccgttggctggtcccaggaccgattcacagagattgtgaccaagctaaagtccttcctcaaactggcgggcttcaaggattccgatgtgagttttacgccctgttccggactaaccggcgagaacctcaccaagaaagcccaggaacccgccctgaccaactggtacagtggacgccacctcctcgatgtcattgagaacttcaagatccccgaaagagccatcgacagaccgctgcgaatgtccgtgtcggacatttacaagggcactggctccggattctgcatctcgggacgagtggaaaccggagtgctgtgcctgaacgacaaggtgctggtgggtgccagccgggagcaggcccaagtgaaatcccttaccatgaacgaattcccacagacttgcgtgttcgccggcgatcaggtctccgtcaccctgcccgccttggacatcaacaacgtcaccgtgggctgcatcatcagcgatccacaaacccctattccggtgacaacgcgattccaggcccgcataatcgtgttcaacgtcaaggtgcccattaccatgggcttccccgtgctgctgcaccaccaatccctaatagagcccgccgtggtctgcaagctgaccgcatcgattcacaagagcaccggcgaggtggtcaagaagaagccgcgttgcctgggcaacaactcgtgtgccctagtggaactggaaaccagcagacccatctgcatcgagcggtatgcggacttcaaggagctgggacgcgtgatgcttcgcgtggcgggagtcaccattgccgccggaatggtcaccaagatccgctaggtcgatgaccgcgctggattttgtacgaaattttagttagatattaacttttgttgatttcctaaatatacatagtttatatgaattgattaaatcgaaaagacgctgaagcattggaagagatttcggtctgaccattttagcggtatc

SEQ ID NO: 2751 - protein, 661 aa, DROSOPHILA
MDYNDEYDGYDDIYGHSVEDEHCISPTDAQQWLYDRARGQQSISAFISKNKDIQEEEADEDEDEDAAFAKARRDSESFQMPQLDEIEQAKLSSCVDEVRSVVGDAVSERRIVETSMKFDYDMQKILDEILNEETNKSAKPAVNKMKAPAAPVLPKTVSKTVPTPPPKISLKEPRRGFEIPSPKVPSSPVVSGRNTPVDISAGDDISRSSATVFKVSKEQAVRNARQLYEKERADQKSHIHMIVIGHVDAGKSTLMGHLLYDTGNVSQRVMHKHEQESKKLGKQSFMYAWVLDETGEERARGITMDVGQSRIETKTKIVTLLDAPGHKDFIPNMISGATQADVALLVVDATRGEFESGFELGGQTREHAILVRSLGVNQLGVVINKLDTVGWSQDRFTEIVTKLKSFLKLAGFKDSDVSFTPCSGLTGENLTKKAQEPALTNWYSGRHLLDVIENFKIPERAIDRPLRMSVSDIYKGTGSGFCISGRVETGVLCLNDKVLVGASREQAQVKSLTMNEFPQTCVFAGDQVSVTLPALDINNVTVGCIISDPQTPIPVTTRFQARIIVFNVKVPITMGFPVLLHHQSLIEPAVVCKLTASIHKSTGEVVKKKPRCLGNNSCALVELETSRPICIERYADFKELGRVMLRVAGVTIAAGMVTKIR

SEQ ID NO: 2752 - DNA, 4910 bp, DROSOPHILA
atttgaactttcaattgtaggccttctgcgccgctgctatcagtgccgatcccgtggcgaactgggcagctgcaaggaccccttcaccttcaatgcaacggacgtggagcaggaaccgggagtggcggccatcccgtgcgccagcggctggtgcggcaaggtgatcgagggcggcggcacctatgccatcgacgactacgacctggccatccagcggatgtgcgtgcagcgcggtccggacgacaacatggatcgctgtgcggacaccatctacaactataagaaggtgtacatgtgcttctgccagggcgacctgtgcaacggcgcgaggagctggtccagtgcaccccagatgatcctcatcaccatgctgccgctgctcggctcctggctgctccagcggatgcgaaactagactgtttgctttctgtgctcttagccggcaatgtgtatatacatcttccaatactcagcaacactcaatgtaatatcaacagttcgataaatacaaacaattttttgttattacttaaaatcgaatgttcttgctctgcttaagattttattgccgtttactcgtgcattttttcgtatcatttttccgatcgcaaataaggtacttacattcaatatgtaaccattgattatggctatatatggcatagatcccgacttcgggtcaatcagctatcagtggaacagactcgattgtttgcgaaaaagaaacaatatgaatattattcatatacctaattaaatcactcctgctgcgtaacaccattctctttgtttgcaaatagaatatccattcgttttaattagtatatttataaaataagaatataataatcatttatataatcatataatcatttaagtaataataaattttaatataaaaacacgaactcagcataccaactagggttgattcaaatatatacaatcctttatgcaagaatgagaaacatttaacatcaatggctcacttggcaacgcactacttctccaacttatctttttcgcgcaagcatggggggcagcgagagttctgcagctgcatcagctggcgatttttggtgaactcgtggcagtccatgtggtataatccgctgcacaagtggcagtacatcgcttcggtttctgggaaaaaaaaaacaagcaaaacaataaaatattaataaaatcattaaatgggtaatacgaatttaagaaaaccaactcaacaagtttgtggttggtggatgactcacccacacgacgtttgcattcacggcactcgcggcatttgcggcacttggaggcaccgccgtctttatgctgacaggctgatgaagacgcagttcccgatgcgccagatcctcctcctgcgctgctcttctccgaaatctcgtccggcgacttgctcttgcgtgtgtacgtcctcttcgagttggcctgcaaacgtttttccgtcggcgagagcaggaattcggacttctccttggtcttcttctgaccacgaacgcccatgactaacgcgtccacggcattcaactgctggccatagtgaaaatccactccgctggcattctgaacggtgcgacgcttgcgcttcgagtggcgctgactgagcttcttgagcacctccggcgagtagagctcaaagaggccgaggaacgtctcctggccgtactcctccggctgggtgcggctctcgcgcggctcatcgcgccactgggcggcggatgcgacgcgtctttgctgctcctgctgcagctcggcactggaatcatcggagctgccggatgacgataccgctggctgcgactgtccactggatgtgggcgttggcgaggatttcctgcacgtgtttttgctcttcgcggtattattcttcgccatcccctgactagacatttgtgggatggtcttcttggctgcctgattggcggcagcattcgttggctccagcgatggcggtgtccccttgccatcgctggttctgttcttgttgcgatcgttctgcaaactggtgatctccaggtcctcctcgtcgtcgaacaaacgtggctgctgcttcgtctttctggcccttctcaatgcctgctgcaagttcttgcgactctgggccacaacgtgaaagtttactggtggagattctgcttgtggtgatggaggtacttgtgacaactcagccactacggtttgggttataggcgccaagggcggcggtgagctgcggctgatattctctcgcttggccggggtcgaatccagcgaccctttcatcagcttcgacttcgattgtggcggcggcggtggcactgatactgtcgcctcatcgccttggagccactctggctccggcttaacggcggcgatctgctgacccaatcccctaaccggcggagccagcatcaatggtatattctcatccaattcgctgagcttaagcggcggcataccagaatcatcgtcctggctcagcaggaagtgcttgcgaataagcatctcctcggtatcacgagccatcaccgactgtggcataatcttatagttgggatcgacgatcaaaggcactacctgggcggaaacgtactcatgggcgatgtccggcaggaacatgatgttgttctccttcagcttcacggagaattcctgtaggctatcgttgaggcgtagcagaaggaactgctgctcggcattgatctcgtacacctcctcctccagttcgtccaagatgcgacgcatctgcactggatcctaatgacgacaagaacgtgagtgtcacattaggtgtggctgggattgttaggtggaagctgcacaggtgctaatggccattaaaaacgctaatgaccacaagcactgagcaaaaaagggaatacatttcaatcacaaatgaggttgagattgatggataaggatgcacgttggaaaaatattgaaataaagcggcattaaagaatatgcgcattaatgctgttaagaaatcagcaatatttgctcatatagatgatggatttcgtcatatacataattctcatatgtcttcttttcaaaaaaaagtgaaagtaatttcgaaaaaattcagagatgcgaacgtggttcctttggaaatgaaaacatttgacccaatttttgtgcattattagttttgcttaaaacgcagttgcctctttcatgtttctaacccaactctagaaaattatcgcgagtacatcagtttctttgaaatgaaaaaactaaactaagtactacgtttcatagcttcatctacatacagttctttgttttggttttttttttggttgtgtgtagtgggaggggggttgggtggtgttctacgggcgaacaccttcaccctggggaatcgggaattctcgtggcgtagagaacaaaggacaaagacttgcagtcttctggcattaaacccaccgcatccgcctgctcatcgaagacctccgagaccaactgcgtaagtgagagaacagagacaaaggaaacaaattaactggtgttcgccaaggagccatggtgcacttaccgcgtgaaccttgaggaaatcgcgcagcgatcgctggcagtagatgatgtcgttcttcagctccagcggcagcacgtagtacttctccatgtagtacctgaacttggcgtacttgcgctccttatggtacttgctcatcttgttccgattatattgacgctatatatataacgacggttatcgtacgaatcacgcacgcgactgatttcggatgcgttgcaattgatgcacttgtgggaattttgggcaaattttcgaaagggagtggggtgggaattgaaaccgaatgtggttagaaaatgtgatagattgatcactacattcgtaactgatatctggccgaggaacttcgcaatttaagataaaaatgtgttgcatcaactggtggcgttgccagatagatgaatacatgtgctcgttctcgtagcgaatttttaatcttaatatgcgtttaattatgaatttggagaaataaggacgatgtgcgtcaataacttcgatgacggaacggtggaatttttgaacatggggaagttttttaaaaattaatttttcgttatttagtgttccaaaatgcacgcaagaccatcaaattagcgtcgatgagttagagtcgatggcggaacggtgaaatttttgaacattggaaagttttttattattttttttttttttatgggtcaaaatatgaacaagcctatacaaaaaagtacccatgaaagtcatttatgtttggtgttgttgacagagcgtgttccggaatgccgtgcttataggcttatgtaggcctaattaagtaatgatccttaaaaaattcatcaaaaatttatctacagttttgcagaaaatcgtctacaagtggaaggagtttaaatgccaccttctccagtactacagccaataaatatcatgaaccgccctattaacgataagagttctccgctgactttattttattattatttattttattacattgcactattatttatatttattatttaactcagctcacagagcgtattccgtcgtacggcatctcaaaagtttcgtaattttatttattatttattcaaaaagtttcattacaatttgatagacagtttttttttttgttactacacgtgttctgtatatctactaagccatatatttaatatattatattaaataattgcaaatggtgtggatggtatataagtaagcgccagaatttggaacctctctatgctcgcacggtcacactggccgataacgaaaacatcgaggcaacagctatacttcatttatcactcaaatctggcagcactgcattgtgtttcggcaaaaaagaaagttgtggttttctaggaatttcgagcaaaatgtaagtagaactaca

SEQ ID NO: 2753 - DNA, 2052 bp, DROSOPHILA
ttgatgcaacacatttttatcttaaattgcgaagttcctcggccagatatcagttacgaatgtagtgatcaatctatcacattttctaaccacattcggtttcaattcccaccccactccctttcgaaaatttgcccaaaattcccacaagtgcatcaattgcaacgcatccgaaatcagtcgcgtgcgtgattcgtacgataaccgtcgttatatatatagcgtcaatataatcggaacaagatgagcaagtaccataaggagcgcaagtacgccaagttcaggtactacatggagaagtactacgtgctgccgctggagctgaagaacgacatcatctactgccagcgatcgctgcgcgatttcctcaaggttcacgcgttggtctcggaggtcttcgatgagcaggcggatgcggatccagtgcagatgcgtcgcatcttggacgaactggaggaggaggtgtacgagatcaatgccgagcagcagttccttctgctacgcctcaacgatagcctacaggaattctccgtgaagctgaaggagaacaacatcatgttcctgccggacatcgcccatgagtacgtttccgcccaggtagtgcctttgatcgtcgatcccaactataagattatgccacagtcggtgatggctcgtgataccgaggagatgcttattcgcaagcacttcctgctgagccaggacgatgattctggtatgccgccgcttaagctcagcgaattggatgagaatataccattgatgctggctccgccggttaggggattgggtcagcagatcgccgccgttaagccggagccagagtggctccaaggcgatgaggcgacagtatcagtgccaccgccgccgccacaatcgaagtcgaagctgatgaaagggtcgctggattcgaccccggccaagcgagagaatatcagccgcagctcaccgccgcccttggcgcctataacccaaaccgtagtggctgagttgtcacaagtacctccatcaccacaagcagaatctccaccagtaaactttcacgttgtggcccagagtcgcaagaacttgcagcaggcattgagaagggccagaaagacgaagcagcagccacgtttgttcgacgacgaggaggacctggagatcaccagtttgcagaacgatcgcaacaagaacagaaccagcgatggcaaggggacaccgccatcgctggagccaacgaatgctgccgccaatcaggcagccaagaagaccatcccacaaatgtctagtcaggggatggcgaagaataataccgcgaagagcaaaaacacgtgcaggaaatcctcgccaacgcccacatccagtggacagtcgcagccagcggtatcgtcatccggcagctccgatgattccagtgccgagctgcagcaggagcagcaaagacgcgtcgcatccgccgcccagtggcgcgatgagccgcgcgagagccgcacccagccggaggagtacggccaggagacgttcctcggcctctttgagctctactcgccggaggtgctcaagaagctcagtcagcgccactcgaagcgcaagcgtcgcaccgttcagaatgccagcggagtggattttcactatggccagcagttgaatgccgtggacgcgttagtcatgggcgttcgtggtcagaagaagaccaaggagaagtccgaattcctgctctcgccgacggaaaaacgtttgcaggccaactcgaagaggacgtacacacgcaagagcaagtcgccggacgagatttcggagaagagcagcgcaggaggaggatctggcgcatcgggaactgcgtcttcatcagcctgtcagcataaagacggcggtgcctccaagtgccgcaaatgccgcgagtgccgtgaatgcaaacgtcgtgtggaaaccgaagcgatgtactgccacttgtgcagcggattataccacatggactgccacgagttcaccaaaaatcgccagctgatgcagctgcagaactctcgctgccccccatgcttgcgcgaaaaagataagttggagaagtag

SEQ ID NO: 2754 - protein, 602 aa, DROSOPHILA
MSKYHKERKYAKFRYYMEKYYVLPLELKNDIIYCQRSLRDFLKVHALVSEVFDEQADADPVQMRRILDELEEEVYEINAEQQFLLLRLNDSLQEFSVKLKENNIMFLPDIAHEYVSAQVVPLIVDPNYKIMPQSVMARDTEEMLIRKHFLLSQDDDSGMPPLKLSELDENIPLMLAPPVRGLGQQIAAVKPEPEWLQGDEATVSVPPPPPQSKSKLMKGSLDSTPAKRENISRSSPPPLAPITQTVVAELSQVPPSPQAESPPVNFHVVAQSRKNLQQALRRARKTKQQPRLFDDEEDLEITSLQNDRNKNRTSDGKGTPPSLEPTNAAANQAAKKTIPQMSSQGMAKNNTAKSKNTCRKSSPTPTSSGQSQPAVSSSGSSDDSSAELQQEQQRRVASAAQWRDEPRESRTQPEEYGQETFLGLFELYSPEVLKKLSQRHSKRKRRTVQNASGVDFHYGQQLNAVDALVMGVRGQKKTKEKSEFLLSPTEKRLQANSKRTYTRKSKSPDEISEKSSAGGGSGASGTASSSACQHKDGGASKCRKCRECRECKRRVETEAMYCHLCSGLYHMDCHEFTKNRQLMQLQNSRCPPCLREKDKLEK

SEQ ID NO: 2755 - DNA, 5366 bp, DROSOPHILA
ctctccttgaccacgcgcttgtcgtcctcggcgtagcggttcaagatctgaatgcagtcctctgtggcgatggcgccaagggcctcggcacactcgtgacgcaccatttcgttttccaggcgatcctccagattctcttgaaggaagggaatgctgcagggttcttgcagctggcccagtacgaaggccacctcgtggcggaagagggcggaagagtccttaagtccctcggcaatggccaagacactctcttcggtgcgcagattgcgcaggctgaacatggccctatatcgatcgaacaggctctgctgggcatccagatagatggccttcagctcggtgacgctcttgtcgcccgcagttggcggtgagggatcaacggaggcgtaagggttgctgtcatctaccttttggccactctgcagccagcggacgcggtccagagcaatggcacatgtttcggccacctccactaccggatcttgtttgtactcctccagaattggcagcacatctggatgaccaatggcgcccatggcctccgcagcctcgtggcgcaccatcggctcctgggtggtgtcctttagcaccttggtgaggatgtctaacgcctgtgcgtcctgcatctgacccaagcagtaggccagctcatgtttgagaagggccgaatcatcgtcaaaggctttgctgatcgcctcgatggccgctcctccgccgatgttcttcagcgtgaagagggctcgaaagcgctctttcagtgggcgttccttgttgttcagaacgcctccaatggcctcgatttgctgctgcgaaaccatttgtatgcggtgtggacttataaataaaaaactgcaacgggccgcgtgtggtgtcgcaatgtggccatacactcagtacttggtaataccaaaactacaagtaatcgatatgacgtggctatcgatggactatgagtcgatgaaacggcgctgccaacgcgtttagagtacaaattgtgcagcactagcaagaagcagtttagttacgtttactccgtagaagcgcgatacaaaaaagtcaataaaagggtgaaaagcgaacgttctagacacagaaagtattcaaaaatactgactcagtcctggcgcagcatcggtgaccaaaagagcggctcttcacggtgaaaagtttccgcaaaatcggcatttctgaaagttgcgcgttcacggtatgcgaagcgtggcgtgtgtgtcgagttgagttacctgtaattgtgtgcgcctgcgagagtggaagtggagtaaacctcgccaccgttttgaagttttggaaagatatagggataaccgcccagcgtttattttaaacaatgtcggaggcaactgtggcccaaaagccggaggcggtggaagatgtgaatgcgtcgacgggggacgagaagcagactcccgtaagtagccgcacatacacatatttagcgacaattaacatagcacggcgataacgcacaccaacacgggctccgctttgctttgcccgaattatctgcggtatttttccaaaataactgtgtgtgtatatgggcactcggatgtggtgcattttcaccatttccctttgtgcgctgtgtccgtttctatttacgtttcttttttcaacggctaccctcgtgtgcgcgcgctttttgctttttcctgtccactttccaactcccccttcccccgcctgctgaggaagccagcagcatgtgtgcgtgtgtgtatacgtgtgtagctactcgccgaagaagaagagaagaggagatgacgagagaagcagggcaatcggcgattccctttcaggctcacgttttgccgctgccgccgcgtctcgtttgtttttatttttgcttgttcccttttcgactttttgttgtttgctgtactttgtcatacaaggcggcacgaacacttgcatccgctccgcggtgttgtgcatgtgtatgtatgcgatacgttgcgctctagattcggttccattttttagcggcgactttactaatagatatacgtacgtacacatcgatgtctaactcaactcctccgatcgacagctattaatgtgggggttcatttggggtctgttgtgtgaattcagctgcaagcgggtcgatgcgggtgcaattgctgcggtcacttggccatgtcaacaatagtacagtgcgcacttggatttaaacgcttaattattgccgataagagtttaaatataaatacatgattctgtttcttctatataattgtatttttgagtcactaataaagcgccgtggtttcagcccatcttgcacatgttttggtgttatagggaatgcacttttaactacaatgtttcatatgacgaaacattagtgaatcagaaaaatatggaatatcaggtatattaaaaaaataaaaaaaaggcgtaaaatagcatcttcattccctcaaagacaattgcgttttggcgggaaatcaaacttacaaaagtagcactactgcttatgtatactgaaatataacttaccgaacccgatctctcctctattacagaaacgcactcccaaacgccgctcgttcattgagcgggcgcagaaggaaagcgaggagcttgtgcgaacaatgggcggaagcctggagctggcgggcgggcggcggacgcggtctagcactcgaggaacgccgacgcgagccgccgaggcagtgacgccgccacccagcaaaaaggcgcgcacttcgccggcctcggccacaaaggccagtgcaggaaagggacgcggagcacgtaagctagacgtaggcgctgatgagcccgagcctgagctggagaaggagaaggagaaggtacagacctcggtcaagggaaaggtaagcgaattatctggtcttattatcattgaaaactaaataaacaagcttattttaagggagctgtcaagaaggacaagaaagaggtcaagaagcaggagaaggcaactgagaaatatgcgccggaggaggcaaaggaagatgtagctgaggcaaaagaggaagacgccagtcccgccggggtccaggaccaaccggatggtgtggagaatcttccttcagtggcggaagcgaagcagaatcatgtcgatgaagtcaaaccaatatcagaagaacctgggaattcaagcgaagaggtgccaaaagctgaagagcccctcaagtcgagcggagaaacgtcggagaatggagccgctacagagactgccgctgcacctaaagaacctgcttctgttatggatgtggacgaagatgagacgctcgtcgaaaacacaccatccgcaaataaagaaaaggcattagatgacgaaaaagaaccagaacagaagtcagaggaacatgcagcagcagttttggagtccaaggagcaaaatgagccagccaaggagcccacaccagaacctatggaagtggacggaagttcgaagggcagttcggacaccgctcaagtagacacaccagccatcgaaaacgtttctgccgctccagaaacagaagcagcagcaaagactacggagtctagcaatgatgtggtggaagtggccacagagggcaaagaaacagttttagaagtgcccgctgccgagcccaaggaagccgaaagcactgtagagtccgcggaagagcttacggaaaccagcaccgtggtggtgactgagccgaaggaagccgccagcagcgaagaggagcctagcaaggttgtggactctgcggaacccaaggaggcagagagcaatacggatgagagcgccacgcccgttcctattgatgtttctaccgcccccgcatccaatgatgtcagcaagcccttggaaatcgatacaaccttggttaagactgccgacagtcctgcaaaggaaccacaggaaatctgcgaggtcaagaaggccgaaattaatgtaaatggtaagctggaaataccttgttaatcatggactcaattaataccaagtctctttccaaggtgagcccaagatcgtcaacagttccgccgaggtgggcgagaatgctgcgcccaaagtgtgtaactaaaccaatcccaccgatggacaatcaacaactttaatgcgttgcagatgtgtaaaaaagcgtcttcatctcgcccgccgagttggtctgatgttgccaactacatgcaaacatttaagagttcccccaaacaaagctacaatattcttttttaattgataacttgatttcgtactccgaaatcccttaactttgataatagttcgcgtcctccagtatttggttgacgcgaaggacgccataggctgcaatcgatgctggactttcaatgctgcggtgtgtgcgtcagctggacagaaaaacaaaaaaaaaaagtaccctaagaccctcccacccactccccccgaaatgcacagacagattgtaaaatgcatcttaatataatatgtatgtggataattaatcaaattggaatcaaacaaattatacattaacggaaaatgtatgtaaaatagatgtttttaaattgtaagccattaatatccttaattataaaaccaattggacaacactcaaaaaataagcaaacggatcgcggacatatttaaactattgtaacacaatacaaatggtctgcggctttaagatacgtctatgcataactttcaccctttttggacatttttttaagtatttcaagcccgtttcgtttgaagcatttaagtttttaaagatccaaatgagctcattggaaactgttgtgttaggcaaaggtctcttccgggcgatctctcctaacttaattcgtaaatacaggctagagtacgaggaaactttttcaatgaaaagaagagaaacacaaattctaatagtaatactaatgataaataatataatacacacagcaaaagcgtatattagttttggaagccgttgcaactgaaatgatcagtcagaccgtttttgtatgtagcatatcttctgtataaggcattcttcatttcaatattcttttgtaaataaatcttaaatatatacaagagaaattaaacttgtttggccattatgaaaatggattcggtattgtatcttgtcgtatgctatatgtgttttgcgtttgagaattttagttcctaattgaattgatgtctctcgagaattttttttgtttggataaagtctaattcataaacatgtcattttatttcagaaatagtcgttactaaatattaaagcaatcttattagaactgtaagcatttcattattatgcttattcgccaattcctattcaaacttaaaaattcgaatgcaaatgtacagatgtggtaatactaagcttctgttgcgctgccgttttccttctccttgattt

SEQ ID NO: 2756 - DNA, 2129 bp, DROSOPHILA
cactagcaagaagcagtttagttacgtttactccgtagaagcgcgatacaaaaaagtcaataaaagggtgaaaagcgaacgttctagacacagaaagtattcaaaaatactgactcagtcctggcgcagcatcggtgaccaaaagagcggctcttcacggtgaaaagtttccgcaaaatcggcatttctgaaagttgcgcgttcacggtatgcgaagcgtggcgtgtgtgtcgagttgagttacctgtaattgtgtgcgcctgcgagagtggaagtggagtaaacctcgccaccgttttgaagttttggaaagatatagggataaccgcccagcgtttattttaaacaatgtcggaggcaactgtggcccaaaagccggaggcggtggaagatgtgaatgcgtcgacgggggacgagaagcagactcccaaacgcactcccaaacgccgctcgttcattgagcgggcgcagaaggaaagcgaggagcttgtgcgaacaatgggcggaagcctggagctggcgggcgggcggcggacgcggtctagcactcgaggaacgccgacgcgagccgccgaggcagtgacgccgccacccagcaaaaaggcgcgcacttcgccggcctcggccacaaaggccagtgcaggaaagggacgcggagcacgtaagctagacgtaggcgctgatgagcccgagcctgagctggagaaggagaaggagaaggtacagacctcggtcaagggaaagggagctgtcaagaaggacaagaaagaggtcaagaagcaggagaaggcaactgagaaatatgcgccggaggaggcaaaggaagatgtagctgaggcaaaagaggaagacgccagtcccgccggggtccaggaccaaccggatggtgtggagaatcttccttcagtggcggaagcgaagcagaatcatgtcgatgaagtcaaaccaatatcagaagaacctgggaattcaagcgaagaggtgccaaaagctgaagagcccctcaagtcgagcggagaaacgtcggagaatggagccgctacagagactgccgctgcacctaaagaacctgcttctgttatggatgtggacgaagatgagacgctcgtcgaaaacacaccatccgcaaataaagaaaaggcattagatgacgaaaaagaaccagaacagaagtcagaggaacatgcagcagcagttttggagtccaaggagcaaaatgagccagccaaggagcccacaccagaacctatggaagtggacggaagttcgaagggcagttcggacaccgctcaagtagacacaccagccatcgaaaacgtttctgccgctccagaaacagaagcagcagcaaagactacggagtctagcaatgatgtggtggaagtggccacagagggcaaagaaacagttttagaagtgcccgctgccgagcccaaggaagccgaaagcactgtagagtccgcggaagagcttacggaaaccagcaccgtggtggtgactgagccgaaggaagccgccagcagcgaagaggagcctagcaaggttgtggactctgcggaacccaaggaggcagagagcaatacggatgagagcgccacgcccgttcctattgatgtttctaccgcccccgcatccaatgatgtcagcaagcccttggaaatcgatacaaccttggttaagactgccgacagtcctgcaaaggaaccacaggaaatctgcgaggtcaagaaggccgaaattaatgtaaatggtgagcccaagatcgtcaacagttccgccgaggtgggcgagaatgctgcgcccaaagtgtgtaactaaaccaatcccaccgatggacaatcaacaactttaatgcgttgcagatgtgtaaaaaagcgtcttcatctcgcccgccgagttggtctgatgttgccaactacatgcaaacatttaagagttcccccaaacaaagctacaatattcttttttaattgataacttgatttcgtactccgaaatcccttaactttgataatagttcgcgtcctccagtatttggttgacgcgaaggacgccataggctgcaatcgatgctggactttcaatgctgcggtgtgtgcgtcagctggacagaaaaacaaaaaaaaaaa

SEQ ID NO: 2757 - protein, 489 aa, DROSOPHILA
MSEATVAQKPEAVEDVNASTGDEKQTPKRTPKRRSFIERAQKESEELVRTMGGSLELAGGRRTRSSTRGTPTRAAEAVTPPPSKKARTSPASATKASAGKGRGARKLDVGADEPEPELEKEKEKVQTSVKGKGAVKKDKKEVKKQEKATEKYAPEEAKEDVAEAKEEDASPAGVQDQPDGVENLPSVAEAKQNHVDEVKPISEEPGNSSEEVPKAEEPLKSSGETSENGAATETAAAPKEPASVMDVDEDETLVENTPSANKEKALDDEKEPEQKSEEHAAAVLESKEQNEPAKEPTPEPMEVDGSSKGSSDTAQVDTPAIENVSAAPETEAAAKTTESSNDVVEVATEGKETVLEVPAAEPKEAESTVESAEELTETSTVVVTEPKEAASSEEEPSKVVDSAEPKEAESNTDESATPVPIDVSTAPASNDVSKPLEIDTTLVKTADSPAKEPQEICEVKKAEINVNGEPKIVNSSAEVGENAAPKVCN

SEQ ID NO: 2758 - DNA, 4233 bp, DROSOPHILA
ggagcaggaggagactttctgtagtggaggctttcctgtggtccggcgatgcacttaattttgacagattacatctcattatgtacaccttgcggcggagtggctaaaacgagttcgggaacggaataaggccgagattgatggtcagttgggctttgcatagcaatgggctctgagcctcggatcgatccaagctatggacactgccaattaattcccattctcaccgccgacgactagctggcgaaattatttggcatctagtggaggagatcgcaatagaacattgtttattgcccggcgaattggagttcatttataaggcaatttaaaatcaatttacgtgttgcatgagccgttaatttatcaagtgaattggatggtgcaacgaaagcggcggttcctctggaggagcagcaaccgctagactcttcaacagtcccatcatcacgggcaattaataagggaatcgagctgactgcaatggggcgtgctggcattatgattttttcattgatacaaatatagcggcctgcccgctcctgactgccccatcatcgcccggattttatggcccctgctcgctgctaataggaacgtatttatcagatccgtacgtgctcagtcgggggaggtgttgtatcaaaacgtataatttattagaaacaaatacagactacataacacgtactgccccgaaaagcaagggatctctccatcacctgtcggggatttgtggactaagggtgcgcgacacttgctcaagattcggccgactgggggaataattaaaccattttcgaattgcagagcctgaaaacatttattgccatagctggggtgggattttgacaagattagtgtctgtccttgcgagaagattaagtcagtcggccgaaagttaagcaagtgtcttcgtacctttggaaactaaggctagtgaggcaagggtgaggatgctctaggatcacagaatggctctctttccctgacgaacacctcaaaggcagtagaccagggtccaaaacaaggcgttgaacacgatgaaggacagagggaagacgaaccgcatcttgcggtcgatccacagggacacctccttgggtgtcatggtggcgaaggtctgcgcgggtttctccttcgacgaatcgctggactccgaggtggaggtctcgtcctgctcgtccaagctaatggccgagtcctcgcgactaagactgcctccaataataattggtgtctctatggtgatcacggtgttgttgggaccgcaggtcttgtccatgctggtggtgctcatggtgctcatagtgctatcggtccttctatatccatgccgccgatgtttcttcagatgtgggacaaatgtggacttgactatatacttggtggttcgcttcttgagttgcagatcgttgtttcgcctccagatggtgttgacaaaggcgaactccaccaggctgccgaaaatgaagatggtgcagaccaggaaccacacctccgacatggtcacgtagctcaccttcatcagattgttctcctgggacaaggacagagtgatgaaggataggagcgtggtgcagcccagagtagtccttgcgggggtttgatccgcctgcagccagaaggacacccacgaaatggtgactatcatgatcgagggcagaaagtagtcgatcacgtagtagcccacttcccgagtaagcagaacggtgaagctaatgatgctgtagttgccctccaaggagccatgggacatgtaggattcgttggacactcggatggattcgttgtacagcgacccaattaggttgtattccgtcagctgaagttgcttgtcgaaactcactgggttatcggtctcccagtggagttgcaccagcgtggtgttgtacatccaactttccaatgtggtcttacacttctgctcatcaaacggaaacttctggaagttcatccagcagtacagtgtggcctgcagccgcgtggatgtaagaactgtgccattcggataaatgctggtcagctcgtccttggcgctggtgcccaggacagtggaggcctgttcgttggtcaggaatatatgtggcacccagagcatcttcttcagttccgactcccccattatgggctgccttcggttaggcagatagctggagaaggccaggcgcgggtccaggtatcgcaactgcagcagaccctgcaccgtaaactgcaggtcactcgagtccaggttcttcatcacatatatgtaaaaccgggcatatatgtccatgggtacctcctcaccatctttgttgtggaccacgggtggaaccatcctgtcatagcgacagggggcggttagtctcgtcagcagctccatcagcgccatggactctgcgtttttcagcgaaggacaattgttcacagtcgattgcgacaggttgatggacacactgaaagcatccgtggtgttcaaaggcgacaccaccaccgatccattggcggctaaaaaacaaaattatatttgacataatttaaatctttaaaacaagatattgcgaaatcagaatctttttcgcagaggccacgagcagttcaaatggtaactgcaatttgattgatacgatttttaagtgtcttcgaattcacaataatctagacgaactaaatataaatatggtctaattgcgataagctaaaaaagggtacaacatgacttaaaactggaattcccaaaaatcctgaccaaaatggtaattttggtaaatgtacttttttaaatttttgggtattttggccaaaacgatctaagtatcctttcttcctttcttgaaataaataaaaaacatatttttctaaagatctatactgctgttaaaattgtgaaatcaatttattccaggcatgagtaaattaaactttgtcacatgattgtaagctcggtaagaaatgataaaatgtttaatattgtgataacgttgtctacaactttagtgtaaatactagtttttaaaatgactacacgttttgaaacggcaatacttattacaaaaaatatccaccactaagagataggacaattaatattcaaatttttcctatttttcgtatccgtgaaattccgtttgatcagtcggagatactcctgtcaacctacccagattctgttgaagatcgcctagatgaactccggccgcacttgataatcccaagtagctgatgagtacgaaaatcccaagtgtatccattctctggtggttagtcatgtcttgcacgtcgttgttttttcgaatcacgggactcagtgggtaagttttcaggagtgcgacgatttcgcgacgattttatattttctttttagcgcgctgcgttttcgcggccatccgcttggccctttctcgatcaactattcaacttgtagcttttttggcagcgagttggcgaaacgcctgtccagtccgccagtagcggagtatcggaatatcggaagtcggatggcttggttcgggttcgtgctcttcggagcagcgcttcgttctacccaatatctattactaacttatatattttaattgtgagcggcttttaattcctcgccactcatgacagcttgttcgggccaattattgttggatgccagcgagccttatcgtcgctggccaaaatcgcctgtaagtggccggcttttgccccacctgccgtgtaatgccgttaattgcggttatcattccgccggagagtgcggccaaaatgtttgctcatgtctccggactcttgattaagtgcccggccaaaaacgccaaccggcggtcggctcctctagagatatagagatatacgctgtcgcacttcagttaaccgaagcgatcgcataattgatgatgacccattgtcagaagcgcttcgctgtcggtttatttttggcaaaagtatttctgcaatttggctagatgtgatatgattagccggcggttagccaacggatgttgacgagtacttttcggtctgtagtcactcgaacattctctgggtggtgttaatagattaaaaggtctggcatacatgagtaaagcaaaacacagtcttaggaactgagaactgcgcagtgcatcttggaccatttgaatccagagcagggcgtagtttttcagccccccatcggctcttcactttaatcagccgttcgcccacttttaccaagagcaggaccgcctcccgctgtttgttgcatgaggcccataaaaattt

SEQ ID NO: 2759 - DNA, 1581 bp, DROSOPHILA
atggatacacttgggattttcgtactcatcagctacttgggattatcaagtgcggccggagttcatctaggcgatcttcaacagaatctggccgccaatggatcggtggtggtgtcgcctttgaacaccacggatgctttcagtgtgtccatcaacctgtcgcaatcgactgtgaacaattgtccttcgctgaaaaacgcagagtccatggcgctgatggagctgctgacgagactaaccgccccctgtcgctatgacaggatggttccacccgtggtccacaacaaagatggtgaggaggtacccatggacatatatgcccggttttacatatatgtgatgaagaacctggactcgagtgacctgcagtttacggtgcagggtctgctgcagttgcgatacctggacccgcgcctggccttctccagctatctgcctaaccgaaggcagcccataatgggggagtcggaactgaagaagatgctctgggtgccacatatattcctgaccaacgaacaggcctccactgtcctgggcaccagcgccaaggacgagctgaccagcatttatccgaatggcacagttcttacatccacgcggctgcaggccacactgtactgctggatgaacttccagaagtttccgtttgatgagcagaagtgtaagaccacattggaaagttggatgtacaacaccacgctggtgcaactccactgggagaccgataacccagtgagtttcgacaagcaacttcagctgacggaatacaacctaattgggtcgctgtacaacgaatccatccgagtgtccaacgaatcctacatgtcccatggctccttggagggcaactacagcatcattagcttcaccgttctgcttactcgggaagtgggctactacgtgatcgactactttctgccctcgatcatgatagtcaccatttcgtgggtgtccttctggctgcaggcggatcaaacccccgcaaggactactctgggctgcaccacgctcctatccttcatcactctgtccttgtcccaggagaacaatctgatgaaggtgagctacgtgaccatgtcggaggtgtggttcctggtctgcaccatcttcattttcggcagcctggtggagttcgcctttgtcaacaccatctggaggcgaaacaacgatctgcaactcaagaagcgaaccaccaagtatatagtcaagtccacatttgtcccacatctgaagaaacatcggcggcatggatatagaaggaccgatagcactatgagcaccatgagcaccaccagcatggacaagacctgcggtcccaacaacaccgtgatcaccatagagacaccaattattattggaggcagtcttagtcgcgaggactcggccattagcttggacgagcaggacgagacctccacctcggagtccagcgattcgtcgaaggagaaacccgcgcagaccttcgccaccatgacacccaaggaggtgtccctgtggatcgaccgcaagatgcggttcgtcttccctctgtccttcatcgtgttcaacgccttgttttggaccctggtctactgcctttga

SEQ ID NO: 2760 - protein, 526 aa, DROSOPHILA
MDTLGIFVLISYLGLSSAAGVHLGDLQQNLAANGSVVVSPLNTTDAFSVSINLSQSTVNNCPSLKNAESMALMELLTRLTAPCRYDRMVPPVVHNKDGEEVPMDIYARFYIYVMKNLDSSDLQFTVQGLLQLRYLDPRLAFSSYLPNRRQPIMGESELKKMLWVPHIFLTNEQASTVLGTSAKDELTSIYPNGTVLTSTRLQATLYCWMNFQKFPFDEQKCKTTLESWMYNTTLVQLHWETDNPVSFDKQLQLTEYNLIGSLYNESIRVSNESYMSHGSLEGNYSIISFTVLLTREVGYYVIDYFLPSIMIVTISWVSFWLQADQTPARTTLGCTTLLSFITLSLSQENNLMKVSYVTMSEVWFLVCTIFIFGSLVEFAFVNTIWRRNNDLQLKKRTTKYIVKSTFVPHLKKHRRHGYRRTDSTMSTMSTTSMDKTCGPNNTVITIETPIIIGGSLSREDSAISLDEQDETSTSESSDSSKEKPAQTFATMTPKEVSLWIDRKMRFVFPLSFIVFNALFWTLVYCL

SEQ ID NO: 2761 - DNA, 13085 bp, DROSOPHILA
tatttcgctctcgctcgctctacgctcctcaattcatttccttccataacgtttcactttgtttttgttaaattttattttaaatatcacggcattcagctgaggtctgatctgatctatttcttatgcttatatatcttttcacacgattttgttttcacttttattgcattggcatttcacattttagttttctcggggaaagtacgtattcttctctttcgtagaaatcaaaaaacagaatccaatcagaatgaaaaaaaaaaaaacaaataataataagaagtataatggctacagaaacgctgccggatatatcgactatcgactacttggactaaactaaaaaaaaagcaaaaaattaaactacgatagctcgtcggagacacagatacagatacaaataccgaggcagatgcagttacagaagaatgcagatgcagttgcagatgcaaatgcagctgcagttgcagatacagagaatacagtgtgtagccaacggcaccaaaaccttcgtctaggaatcctcgccagcgcgcgcactaaagagctgggcgcacatacgtcgcatctggtgcagctggccacccaacaggcccgccctctgcattaactctcacaaattccgcctgcccagtgggcgatcctcccgctcatcatcatccggctccgcctcctcatccagctcctcctcctcctcctcctcctcctcgtcgtcgtcgtccacctcgaagcgattggcgccccttccatgcacctgcgcctgcgccactccagtgccagtcacactctcgctgaagtgcatcagattggtgtccatcaggccattggtcaggctgagcggcggcgacgattgcgatggcggtccctccagagagaggcgactattggtgctgatgctgctcatgcttagctggtcgtcgaacacctcgatgttcaccaccgtcgacagttcgccgtgatcgccgtacgaatggcgaatgggataatctacggcatcggtgacctccgctttctggaccttgttgctgctcgggatcgcattgggattggtattggtattgggattgggactcgcattgtctttggttgggattatgttgttgttgatgttattattgttgttaagagccaagccatccagctgatccgtggtaaaatagttgcctaaaaaatatacatacaattcacattagtttaggttttttcatttttgaatgtatctataaaaacatttaaaaattaatccttttaagatttcaaatctaaaatgcatttattttaactgaaggtcctggaaatctactccaaataatataacttattataagtttccgattcccaataagaacacttgatggccacatttgttgttttaactaaaattgcatttatttaatcatacatcatttaattaaattaaattttagtgtttagcgatttccttgcctcctttttttgtatccatctctcaaacgtaaatcataaatactgcgagttagatgtaatttttaaacgatatacatatatttatatacagaaaacaattgatttcctcactttttacaatctttttaagaaacagaacaaatgacgaaattaaaacgaaataaaaacaaaacggagaataaattaacaaacaaaaaaaaaaaaaaggatttaaaaaagaagagaccttgagtttgttgggaggatctatatgaaacttgaacgagtatggagaaaacttaacgaaagcaaagcctagaaacgagtttaaacaattgtgacattggacaattagtattataatccacatagtttagtcattagtcgctttgcagtagttcttacacgcagttggctttttgggcaggaaaatgtagtttgttgggggaaaaagtcgttcgttctattgaataccacccaattatgggtttgaatattactatttaaccattaaattccaactgtgtgttctgcaaacagctttagctgcatgtgtgtgtgtgtgtgtgtgtgtagtgtgtgtgtgtgtgtgtgttagctaaggggcaggatatcaattttacaaatttcgattttcgggcgccatttatgtacaatttgagagcattaattagttttgatacttgtgatcagtgtttttacttttaggcctttttcaatatattatatatatatatacgtatgtatatatatatatatgtgtgtgtctgatttatatatatatatatattgttatacttttaatttctagagatgtatagctaacaatataactttgcacttaaaaatcggttagtatttaaatatttttgtcgcttttccttaattgttttatgttttttgtctaaacgagtagctacagtcgttttgttttgtttttttttttttgtgtttatgttttgttttgctttaaattatgcattataactaacttgttgtttttcttttcgataaatcacaatttttttgcagagttttgtgttttgttttgttttttgttggttttctttttgaatcgttttgtttttgtttcgtggttactgaaatgatatacttttcttgcactcagctaaaaatctaagaatctagagtcatcatcatgtcgtggatgccatctccatctcatgtatatatagttcgcgaatctctgtgtggagcagctcactgtagtgacctccactcgtttgcttggcgtccattgctcttctacttggctctggtcctgcccaccggctgctcaacttcctcctgcttcagcatgggattgggttgaaaaatggctgggcctggctcctccgatggtggtggatgatccggtggcggcggctgcagcggctgttccggctgctgctgctgctgctgctgttggagcgcatgggcagtgggtgctccatcctgtcgattggcggcgtacagatgccacagcaccaccaggctaaagacgcacagcaaacatatcgctaattcttatctcttccggcgcttcgtcttcttctttgtggcactcggtgggctggccacgcctacggccaatcccacagaggtaacgccaccggcagcgggcagagatgctgctgtagcgccacccgtggtcgagcttccagcaccgactgcggcgcccggcgaatgggattgcaggccaatgcccagaccgaggcccgtgggatctggatgtaccgtcgtctccacactgctctcctccgccgaggatgtggacgaggaagtggccgcctcgatggccgcaatcagattgatcttgtgctccagctttttggtcttcagcttgtgcggtgcggcattgcttgtgctggatgagccgtagaccacattgtcatcggatgtggtagccggcaccggcccttcgctgtccgttgtggtggcattggtggccacgccactgctaccaaagtgcagcagatcctcgggcagtgattgctccggttccgtctcgggctcctcctcgacgccctcatcgtcgtcgggcatggctctgactggtatatccggcacgtccagctgggaatcgcacatgcttatgctgatcaggggacgcagctcctcgtcgtccggttcccgctccctttgctgctgctgctgttgcagttgaagctgcttcagtcgcttgtgcttcttgctcagcttctttacgggttcctccatgacgacaatctcctcagatccggatgagttattcgatgtagaggtggatttctgcagggccagcgtatccagggtaatgtataccggttccggtgttgttaccacctcaggctgcacttcggcctccgtttcccggatgcgttcctgttcattttcatagtgcagggaaccgcacaaggcgaggatcaaattctgttcggtgaaaccacgtggcggtggggaaatcttccgcggtatggaagctgtctcctgcaacggactttcaaagttgattagactgacagattcctttttcgagtcctccttaacctccaggggttcgagagcagggagaggtggcaaggcctccagtggctttaagccgctcaagaagtcctcaaaggtgtcgttcacctctttggggggagtagtcagtccaggcagcagtttttcatcccgcttcttctccggactcgctttagtgggcttcttgccaaggctgggatagtcctgaaccgcaggcagtttgggtggagtatcctcgacgactcgcctccatggattgctaacggttgccgagatgaggagcttttcgctttccagggacttctccttctctttgaccttgtctttctccttcttctccttgagtttaagctccttttccttctccttgagctgttcctccttttcctttagctttacttctttttccaggtctttaagcttttcagccctctctttctcttttagcttctcctccctttccttttctcgttgcctctcttccgtttcccttttgagcttctcttcccgttctttctccttgagcttctcttgcctttccttttccttgagcttttcttctctctccttttcctccttctcctttttcttgagcagctcttccttctccttgagcttttcttccttttctttctttagtttttcttctcgttccttctccttgatcttttcaactcgctccttctctttgattttctcttctcgttccttttccctcattttttcttcacgctcttttcggagcttttcttctttttccttctccttgattttctcttcccttagcttctccttgagtttttcctctctctccttctccttgatcttttcctctcttagcttttcttctcgttgcttctccttagccttctcttcgcgctctttttccttcatcctttcttctcgttccttctccttgagcttctcctcctttagtttttcctctctttgcttctccttgatcttttcttctttcaacttctcctctcgttccttctccttgatcttctcttccttaagtttttcctctcgttccatcctaaggctctcttctctttccttaagtttaagcttttcttctttctctttctcctgaagcttggcttccctttctttctcctttagcttcagctccttctccttggctttttccttctccttgtcgattgtcatggttgctactgcatctcctggtttttgcttcttcttgttgtctttggacattgttttgggtggctcctcatcgagcccttcgatctcttcatcttcgccttgctccgcatccgccgcactcatctccacgtgcaaacttaatccctgggcactggcactgctcaccatgacggccgcaatgctgctcttgttggccagcagactatctgcatgatcagactcggcatccgaatcctgctccttgttgatggttttcttgaccatcggaacagccctctcttcattttcctctttctcgacagcaaccttctcctccgccagattcgtctgctctggcttcttttcgctgacttttccgctggtcttttgcttgttattcttggccttcttcgctgatttggcgagtgtaatggtagtggtggcctcatcctcggacgttccactaccactcttctggctggcagttttattgttgttgctattgcccttgggcttattgagatgtgaaagctctgcgaatttttgcgcctgtgccgcatcctcggcggcagccagggttttctgttgttgctgctgctgttgctgttgctgctgtgccttgtgcgattgcttctgcgacttttgcttctccttctggacaagcacttcgtccatctccttggcaatcaccggtacaatcaacttattgaccaacacaacgggcggttggcaactggcctgttcgcgttccagttccgatgctgtcgcttcttccgtcttctgatccttttgaaggagcttttgtctctcagccggatcactgcaaaagatggccaccactggtcggaacagagcctcatcgcaattctcatggatcaccgtatcctcggcggccagttggccgaccacctcgtccagcatatccgtctgcagttcaccggagatcccagcatttagatccgtcacagtgcccagcggattgaccattttctctacacgcgaatagctacagatgttgggcagaacggatgccagggctgaaattgagtccattgagtgcaaatgcgtctctgcatctgtatgctgatgctgatcctccaccacctcgtccagatcattgagactctcgtgctcggcgagtgcatcgtaatagcagacattatcacaattcgaggaagcacttcctccggcgccggcagccaggagatccgctgaagctggcgaggcaccggtagccaggtgatcgccacacgggggagctgcctgatcgacagatgcagctggaggcgggtcaacaacgttggggcacaggacacagaacacagagcggagaaaaaagagaaatagaagagaaaacaaattatgagaaaagcgcatttttgttcgtacaagaaacaaaaaacaaaaagccaaaggcgaattttgatactaatttcgatactgattcgtagttttgaaaatgtttaattggaaaatacatttcagcgtatgtttgatctacatatttggtaacatttaagctaagcttgtaatgcattatattggcagtaggcgcgattaaaacttgtttttctcgagcagttgatcgattgaaaaaggaagcggaaaacactcaaaacaaaaaaggaaaatcgaacgtgaaacagaaaaatatataaatttgtaaagatatatatatttgtattgggcaactcaaaaatgaaaaacgaaaataaatttttaactgtcttttttttgtttgtttgttttgttttagtgtgaaaacgaaaattatttaaaaaataaagtgaagtaaatagctgtgacattgaatttggggaagtaataacgaaactggaaatagtttaatcgtgaattttgaattgcgttttcgaaatttttatggctttggctttttattaagagattcatgtagattaatgtgctctttcctctcaaccgttctctctctctctctctccccttgctttctccctctttccatctcactcgcccccaatcactctaatgctttctcactcgcacgtgcaatgaaactttcggttcacaattcttctttcgttctttttctttacgaacacaaatttttaagtgcatcaaaggaatcacaagagacaagggacgaaaaataggcacccataagtagagtgaagcagtagaaaaggaaggggaagcagcaaagtacagaggtaaaaatgcatgtgataaaaaatgcagacgtgtaatgaaaagttaggaatcaatgtgaagcaatgaagaaacgccatagtcgaatgctcgactatctgatacccgttgcatttggtaatgaattgcaaaataaaagtacttttttcgaaaaactcgtcatctgacggaaaggagcgaaatcttttggtatttcaaagaagtttatacggacagacaattatgcagaaggacaggcggaaaaagatacggacattttcgatgaacagaatctctttgtaacttttactttacgggtaaaattacaaaaaaatggaaagtgaatggatagtgtagtgtgataaaataaagcttgcaactgaaaaaaaaaaactatgcggaaatcaagtgtggaaaagtaaaatacgatcaaaagtctgtgatggagaagaagaaaatggaaatactgtgctgctttgtgttgggaaaagcgttcaaattttcattaggaaaatcagacaagatcgaggatatataactccatacattccacccgatccgtccgaccaaattccagggggttatgtgctcgacaggattaacagcgaccaatggggcaaaagtagatgtgtatataacgtgttgcagaagaattcctattgggggtatggttttgtggttttttttttttacattttcgtttagatagtggacactgctgtggcaaaaatgttgttagcttaaatttagttgtcaataaaatagaaatagattaattttagtggtatctcattttagggctagacaaaaacaccaaagataagttcataaataatttggttaagtgagttttgtttccggctagaaaaataaagtttcaacaactaaagtttaaaaaaaaaattaccaacacacttacaccacaaaaacactccaatacacacgcttacatacacacacacacacacagagaaagggaggaaatgtgaatggatggagaatgaggagaaagcttggtgaaatgagtttgaagtagagtaaaaggaacatgcaagggtgagcggtggtagggatggctataacatcatcattatcagcatcatatcatcaaagtttatcatcattatcaataaccaacaaccaatgccaatttcgtggtgtttcataatcaagatcaaaatacagctttttttttttcttatgtttgaccaccaaaaatattttgaattaaacattttcattttgaaagcgttcgaaataaaaaaacataaatatattgtatatatataaatagataaatatatgtgtttatcaaaacaaaaacgtaaatacaaatcgaagatccaaaatgtagaaagttaacataaaacgtttgtatagaacgtaaacaattaataaacagatttgtgaagacatcgagaatcggcaaatgatcaacgaggatgcctttgattccgggagctaacccgcttcaatgatcccgtccagaagcacacaagcaaataccttcccggaatcagcggctaacattcgaatagtcttgcacaacatgcgtaattcttgtgtacatctatccaggacgatatattttaggatttgcctgccacttaccggtagtctcacgtcgagctgctgccgttgatggcgattctcgcatggcatccgccaaatcctccttcaggcgtgtatcgccgtggccataatccgaatccaagtgaccatgtcggaagcgatccatcaacttgggactctgctcaatgctgcctgtttcgtttatgaagagtaaaagagttcgtaaaccggtacgttgagagaaaagatagaaagatttctccacttactgtacgatccagattcgatgagaaccggtacaccggcaccgctgcgtcctgtgaccgccgaactgccaatgccagctcctcccaccgacgtggctgcacttaggggcatattgagcggactggaccgatccttgcctataatcgtacccaatcccaaggcagatgaagccgccgtcgagggcaacgtggtggtcgtcgtcttgctcacgccaatttccacagcctctgcatcgacgtggttcagattggaactgtaataggatgaacatatacggtttagatttcactcaacatattacgcacgaacaaatcaactatctcttacccgctgggcgtattgtagttcttgaagacgaactgcggtcccatccacagccggcggtggggaccagcgtgcgtaatgatctccacctgggccaaccagctttcggttcgctcgtccggatcgtcgaattgattggcgctgtccaacagcaggctggcatggcgatccttaatcagccaattgtccagccccagcggtggtgcgatttcttgagatccatccttgcgccgtcccagattccactgggcgcgagcctcaacctccagctcgatgggcgtgtcatcacaaatcttctctttggcaacatctgcaatggataagatgattgtgtgccatacagtagatgctacgaaaaagctaaatgagtgactcacgtgaggctagcttcgtgtccagatcgtactggataagcgccccgtggccggccatcacgaagagcgagtccaccgccttgcgctggacacgatgcggctgctctcgcgtcgccatcggtggctccagcagccaggagcgcgacttggcgaagatggagcagacactcagtggtttgccgctatcgtctgacagcgaggagaggcgttgtcgctgccgttggctgttgctgcctacaccaacaccgactccatgaccaccggcacttacgccagagcccatcactccaccgccgcccacaccaccgcccagacccgccgatcctggcggtgatcctagagtgaagggctggcgcagctgggccagcggctgcactaccgacggccgcggatacggcggcaaagtgggattatgatacggctgcagtgactgcacgaacgtcgtgctctccgagtgcgagatcggcgaactggagcgtccatcggctccgaggccggcgctccggtggaagcgggacagcttattgaccacatgcagcgaggtgtgcgtgcgtacgcccatggcgccgccgtagggcgtaattgggaagacgtgggtggtgccgcgcaacgtggacacagcagcccagcgcgagtccagcgagaaggcgatgtgctgcaccttggcgctagtgtcgccgcgatgtagcacgtacaggtggtgcacggcagccaggctgggaccgacaggatgcggttgtacgcgaaagacgtggaaatcatgaccgcgtcgatcggcggtgagaagcagcataccggagctgtcgaactccatggccaccagagcctcgctgtgggccacaaagtgagcaacgatgggatcgccgccgccctgtgagccagccgtcgagctcaacggagtacccgacgtggggctgtagtccttcaccggatgctgtcaatcaaaaatatgattagttatgcatagtgtacagaactataaatattcattcacgcaccttcacatcgatgatggtgaccacaccggactgcttggcatccggaccgccgctggccgagtcgaagctgctgctcttggagctggcaccgctgccggcggtggtgcccgttaggccggcggccacctgttcaccaaactctcgcagtcccttgctcagggatttggccgcattgagaacagtggccgtgtagctgggaacgccctcgccatcgcatccgcctccgctgcgcttggagtgcagcagtttatgctccgcatacgccagccagcgcggtcccagagcaatgggattggggttgatcctgccaagaaaggcaattcaattttaaacaagtacaagttagcaacacaagcggtgattattttcaactacttctaactatcatcacttttaagcccaattataataaaactaagagtcacaatcaaagttaatggaccatctaaaatgacccactgtcaccgtgaaaatgaaaattaattccattagatcctcattatcattataagtgtaatttcagttaatgttatatgataaggcgttataattaacttatatttgaaccaaatgattatgtggatttttttttaacatggaataaagttaacttaccccggactgggatagcaggtggtaatagtgagacggtcctccagtgtcctggcatcaaagacggcaatccgttcgtggaacgttatgaccaccgccgatcgattggcctggatgtccagcacggcgttcttgaacttgatcgtcttcacctggacacccgttttgagggacatgaagtttacggcactgaattgggcagaggccgacacaccgatgccgctgacacctccaaccgatccgccaactgttgttactcctccgccgccgccacccagacccaatcccgagctgccagccagtagaccactggccgctgcactgcctccgtcgacgaacgccaccaggggacgtttctcggcaaatgaatcgaccggctcatccgcccgaccattctcatccaaagcagcagccgtggccggcgtgggcagcacacgaagcgcagtgacgacgccgtgacgccaggatagcacctcgaccgcctcgccgttggctggtatggcccacacttgaacgcccagaccgtagccgagaatcagcaatagtggtggcgctgcatttccctccagttcccagtcatcaccgaaacgcggatcgcttacatccgcacacgtttcgaaacgggcccaggtgatcgtgtccttgggatcttgcaccggctgattggccagcgttacatcgttgatgaaaccaatggccgagtcaaggatcgatcgatccgacactgtttgcggaggtacaatggccggcacggcggcgcccgatttgctgccaccggtagagccggaacccaagccagtaccggatccggagcccaatccaatgccggaaccgaccacgccagagggatgacggcgtggcgagtccgcggacatgatgcagcggctgctgggggggatggccggtggtgactgctggccgccggaatcgctcctcttctagctgctaccacagctgctgccaatgatgcagtgcctccacactggaggtcaatgggcagcggccggctgggggtggcagatggcggatggctgatggcagtgggtggcgggtggcaacctcgctcgctagcttctctcgcctactctctttctctcttttttgccttctatggagacactgcgtctgatcggttgcttcttttgcccagctgttccgctctctctttgtctctctctcgtttgctctcttgttgtcaactgcaaatagaaagcaaagacaataaataaacaaattgaacaatctcacacattcatctgtcccactctctttagggtgaacccaaacgacctttggtcgagtttgcgaaacatgaactgtgcaccaatagtttaaagatcttatgttgatagtctgctcaaccttttgttagcttttgcttgtcattaacaatcgtataagtggattgactcatcgctaggtacaattaaaaaaagcaaaacaacctaaaatgcacaaaaaaacaggttgcacaagcgataaccagaagtaacttgattaatcatttaaaaaaattaaatacctttacgcccagtaaacatggtaaacaatatggttgaacaaagcagtcattgttttagcagtgcagtatttgcagtcaagctatgtacacgtatgttaaaaatacgtctgaagatatttgaacttctgatttttcggcgaaaaataatgttttttgtcggcaata

SEQ ID NO: 2762 - DNA, 7078 bp, DROSOPHILA
cagacgcagtgtctccatagaaggcaaaaaagagagaaagagagtaggcgagagaagctagcgagcgaggttgccacccgccacccactgccatcagccatccgccatctgccacccccagccggccgctgcccattgacctccagtgtggaggcactgcatcattggcagcagctgtggtagcagctagaagaggagcgattccggcggccagcagtcaccaccggccatcccccccagcagccgctgcatcatgtccgcggactcgccacgccgtcatccctctggcgtggtcggttccggcattggattgggctccggatccggtactggcttgggttccggctctaccggtggcagcaaatcgggcgccgccgtgccggccattgtacctccgcaaacagtgtcggatcgatcgatccttgactcggccattggtttcatcaacgatgtaacgctggccaatcagccggtgcaagatcccaaggacacgatcacctgggcccgtttcgaaacgtgtgcggatgtaagcgatccgcgtttcggtgatgactgggaactggagggaaatgcagcgccaccactattgctgattctcggctacggtctgggcgttcaagtgtgggccataccagccaacggcgaggcggtcgaggtgctatcctggcgtcacggcgtcgtcactgcgcttcgtgtgctgcccacgccggccacggctgctgctttggatgagaatggtcgggcggatgagccggtcgattcatttgccgagaaacgtcccctggtggcgttcgtcgacggaggcagtgcagcggccagtggtctactggctggcagctcgggattgggtctgggtggcggcggcggaggagtaacaacagttggcggatcggttggaggtgtcagcggcatcggtgtgtcggcctctgcccaattcagtgccgtaaacttcatgtccctcaaaacgggtgtccaggtgaagacgatcaagttcaagaacgccgtgctggacatccaggccaatcgatcggcggtggtcataacgttccacgaacggattgccgtctttgatgccaggacactggaggaccgtctcactattaccacctgctatcccagtccgaaccccaatcccattgctctgggaccgcgctggctggcgtatgcggagcataaactgctgcactccaagcgcagcggaggcggatgcgatggcgagggcgttcccagctacacggccactgttctcaatgcggccaaatccctgagcaagggactgcgagagtttggtgaacaggtggccgccggcctaacgggcaccaccgccggcagcggtgccagctccaagagcagcagcttcgactcggccagcggcggtccggatgccaagcagtccggtgtggtcaccatcatcgatgtgaaggtgactccgttgagctcgacggctggctcacagggcggcggcgatcccatcgttgctcactttgtggcccacagcgaggctctggtggccatggagttcgacagctccggtatgctgcttctcaccgccgatcgacgcggtcatgatttccacgtctttcgcgtacaaccgcatcctgtcggtcccagcctggctgccgtgcaccacctgtacgtgctacatcgcggcgacactagcgccaaggtgcagcacatcgccttctcgctggactcgcgctgggctgctgtgtccacgttgcgcggcaccacccacgtcttcccaattacgccctacggcggcgccatgggcgtacgcacgcacacctcgctgcatgtggtcaataagctgtcccgcttccaccggagcgccggcctcggagccgatggacgctccagttcgccgatctcgcactcggagagcacgacgttcgtgcagtcactgcagccgtatcataatcccactttgccgccgtatccgcggccgtcggtagtgcagccgctggcccagctgcgccagcccttcactctaggatcaccgccaggatcggcgggtctgggcggtggtgtgggcggcggtggagtgatgggctctggcgtaagtgccggtggtcatggagtcggtgttggtgtaggcagcaacagccaacggcagcgacaacgcctctcctcgctgtcagacgatagcggcaaaccactgagtgtctgctccatcttcgccaagtcgcgctcctggctgctggagccaccgatggcgacgcgagagcagccgcatcgtgtccagcgcaaggcggtggactcgctcttcgtgatggccggccacggggcgcttatccagtacgatctggacacgaagctagcctcacatgttgccaaagagaagatttgtgatgacacgcccatcgagctggaggttgaggctcgcgcccagtggaatctgggacggcgcaaggatggatctcaagaaatcgcaccaccgctggggctggacaattggctgattaaggatcgccatgccagcctgctgttggacagcgccaatcaattcgacgatccggacgagcgaaccgaaagctggttggcccaggtggagatcattacgcacgctggtccccaccgccggctgtggatgggaccgcagttcgtcttcaagaactacaatacgcccagcggttccaatctgaaccacgtcgatgcagaggctgtggaaattggcgtgagcaagacgacgaccaccacgttgccctcgacggcggcttcatctgccttgggattgggtacgattataggcaaggatcggtccagtccgctcaatatgcccctaagtgcagccacgtcggtgggaggagctggcattggcagttcggcggtcacaggacgcagcggtgccggtgtaccggttctcatcgaatctggatcgtacagcagcattgagcagagtcccaagttgatggatcgcttccgacatggtcacttggattcggattatggccacggcgatacacgcctgaaggaggatttggcggatgccatgcgagaatcgccatcaacggcagcagctcgacgtgagactaccgctgcatctgtcgatcaggcagctcccccgtgtggcgatcacctggctaccggtgcctcgccagcttcagcggatctcctggctgccggcgccggaggaagtgcttcctcgaattgtgataatgtctgctattacgatgcactcgccgagcacgagagtctcaatgatctggacgaggtggtggaggatcagcatcagcatacagatgcagagacgcatttgcactcaatggactcaatttcagccctggcatccgttctgcccaacatctgtagctattcgcgtgtagagaaaatggtcaatccgctgggcactgtgacggatctaaatgctgggatctccggtgaactgcagacggatatgctggacgaggtggtcggccaactggccgccgaggatacggtgatccatgagaattgcgatgaggctctgttccgaccagtggtggccatcttttgcagtgatccggctgagagacaaaagctccttcaaaaggatcagaagacggaagaagcgacagcatcggaactggaacgcgaacaggccagttgccaaccgcccgttgtgttggtcaataagttgattgtaccggtgattgccaaggagatggacgaagtgcttgtccagaaggagaagcaaaagtcgcagaagcaatcgcacaaggcacagcagcaacagcaacagcagcagcaacaacagaaaaccctggctgccgccgaggatgcggcacaggcgcaaaaattcgcagagctttcacatctcaataagcccaagggcaatagcaacaacaataaaactgccagccagaagagtggtagtggaacgtccgaggatgaggccaccactaccattacactcgccaaatcagcgaagaaggccaagaataacaagcaaaagaccagcggaaaagtcagcgaaaagaagccagagcagacgaatctggcggaggagaaggttgctgtcgagaaagaggaaaatgaagagagggctgttccgatggtcaagaaaaccatcaacaaggagcaggattcggatgccgagtctgatcatgcagatagtctgctggccaacaagagcagcattgcggccgtcatggtgagcagtgccagtgcccagggattaagtttgcacgtggagatgagtgcggcggatgcggagcaaggcgaagatgaagagatcgaagggctcgatgaggagccacccaaaacaatgtccaaagacaacaagaagaagcaaaaaccaggagatgcagtagcaaccatgacaatcgacaaggagaaggaaaaagccaaggagaaggagctgaagctaaaggagaaagaaagggaagccaagcttcaggagaaagagaaagaagaaaagcttaaacttaaggaaagagaagagagccttaggatggaacgagaggaaaaacttaaggaagagaagatcaaggagaaggaacgagaggagaagttgaaagaagaaaagatcaaggagaagcaaagagaggaaaaactaaaggaggagaagctcaaggagaaggaacgagaagaaaggatgaaggaaaaagagcgcgaagagaaggctaaggagaagcaacgagaagaaaagctaagagaggaaaagatcaaggagaaggagagagaggaaaaactcaaggagaagctaagggaagagaaaatcaaggagaaggaaaaagaagaaaagctccgaaaagagcgtgaagaaaaaatgagggaaaaggaacgagaagagaaaatcaaagagaaggagcgagttgaaaagatcaaggagaaggaacgagaagaaaaactaaagaaagaaaaggaagaaaagctcaaggagaaggaagagctgctcaagaaaaaggagaaggaggaaaaggagagagaagaaaagctcaaggaaaaggaaaggcaagagaagctcaaggagaaagaacgggaagagaagctcaaaagggaaacggaagagaggcaacgagaaaaggaaagggaggagaagctaaaagagaaagagagggctgaaaagcttaaagacctggaaaaagaagtaaagctaaaggaaaaggaggaacagctcaaggagaaggaaaaggagcttaaactcaaggagaagaaggagaaagacaaggtcaaagagaaggagaagtccctggaaagcgaaaagctcctcatctcggcaaccgttagcaatccatggaggcgagtcgtcgaggatactccacccaaactgcctgcggttcaggactatcccagccttggcaagaagcccactaaagcgagtccggagaagaagcgggatgaaaaactgctgcctggactgactactccccccaaagaggtgaacgacacctttgaggacttcttgagcggcttaaagccactggaggccttgccacctctccctgctctcgaacccctggaggttaaggaggactcgaaaaaggaatctgtcagtctaatcaactttgaaagtccgttgcaggagacagcttccataccgcggaagatttccccaccgccacgtggtttcaccgaacagaatttgatcctcgccttgtgcggttccctgcactatgaaaatgaacaggaacgcatccgggaaacggaggccgaagtgcagcctgaggtggtaacaacaccggaaccggtatacattaccctggatacgctggccctgcagaaatccacctctacatcgaataactcatccggatctgaggagattgtcgtcatggaggaacccgtaaagaagctgagcaagaagcacaagcgactgaagcagcttcaactgcaacagcagcagcagcaaagggagcgggaaccggacgacgaggagctgcgtcccctgatcagcataagcatgtgcgattcccagctggacgtgccggatataccagtcagagccatgcccgacgacgatgagggcgtcgaggaggagcccgagacggaaccggagcaatcactgcccgaggatctgctgcactttggtagcagtggcgtggccaccaatgccaccacaacggacagcgaagggccggtgccggctaccacatccgatgacaatgtggtctacggctcatccagcacaagcaatgccgcaccgcacaagctgaagaccaaaaagctggagcacaagatcaatctgattgcggccatcgaggcggccacttcctcgtccacatcctcggcggaggagagcagtgtggagacgacggtacatccagatcccacgggcctcggtctgggcattggcctgcaatcccattcgccgggcgccgcagtcggtgctggaagctcgaccacgggtggcgctacagcagcatctctgcccgctgccggtggcgttacctctgtgggattggccgatggagcacccactgcccatgcgctccaacagcagcagcagcagcagcagccggaacagccgctgcagccgccgccaccggatcatccaccaccatcggaggagccaggcccagccatttttcaacccaatcccatgctgaagcaggaggaagttgagcagccgctggatggcttggctcttaacaacaataataacatcaacaacaacataatcccaaccaaagacaatgcgagtcccaatcccaataccaataccaatcccaatgcgatcccgagcagcaacaaggtccagaaagcggaggtcaccgatgccgtagattatcccattcgccattcgtacggcgatcacggcgaactgtcgacggtggtgaacatcgaggtgttcgacgaccagctaagcatgagcagcatcagcaccaatagtcgcctctctctggagggaccgccatcgcaatcgtcgccgccgctcagcctgaccaatggcctgatggacaccaatctgatgcacttcagcgagagtgtgactggcactggagtggcgcaggcgcaggtgcatggaaggggcgccaatcgcttcgaggtggacgacgacgacgaggaggaggaggaggaggaggaggagctggatgaggaggcggagccggatgatgatgagcgggaggatcgcccactgggcaggcggaatttgtga

SEQ ID NO: 2763 - protein, 2274 aa, DROSOPHILA
MSADSPRRHPSGVVGSGIGLGSGSGTGLGSGSTGGSKSGAAVPAIVPPQTVSDRSILDSAIGFINDVTLANQPVQDPKDTITWARFETCADVSDPRFGDDWELEGNAAPPLLLILGYGLGVQVWAIPANGEAVEVLSWRHGVVTALRVLPTPATAAALDENGRADEPVDSFAEKRPLVAFVDGGSAAASGLLAGSSGLGLGGGGGGVTTVGGSVGGVSGIGVSASAQFSAVNFMSLKTGVQVKTIKFKNAVLDIQANRSAVVITFHERIAVFDARTLEDRLTITTCYPSPNPNPIALGPRWLAYAEHKLLHSKRSGGGCDGEGVPSYTATVLNAAKSLSKGLREFGEQVAAGLTGTTAGSGASSKSSSFDSASGGPDAKQSGVVTIIDVKVTPLSSTAGSQGGGDPIVAHFVAHSEALVAMEFDSSGMLLLTADRRGHDFHVFRVQPHPVGPSLAAVHHLYVLHRGDTSAKVQHIAFSLDSRWAAVSTLRGTTHVFPITPYGGAMGVRTHTSLHVVNKLSRFHRSAGLGADGRSSSPISHSESTTFVQSLQPYHNPTLPPYPRPSVVQPLAQLRQPFTLGSPPGSAGLGGGVGGGGVMGSGVSAGGHGVGVGVGSNSQRQRQRLSSLSDDSGKPLSVCSIFAKSRSWLLEPPMATREQPHRVQRKAVDSLFVMAGHGALIQYDLDTKLASHVAKEKICDDTPIELEVEARAQWNLGRRKDGSQEIAPPLGLDNWLIKDRHASLLLDSANQFDDPDERTESWLAQVEIITHAGPHRRLWMGPQFVFKNYNTPSGSNLNHVDAEAVEIGVSKTTTTTLPSTAASSALGLGTIIGKDRSSPLNMPLSAATSVGGAGIGSSAVTGRSGAGVPVLIESGSYSSIEQSPKLMDRFRHGHLDSDYGHGDTRLKEDLADAMRESPSTAAARRETTAASVDQAAPPCGDHLATGASPASADLLAAGAGGSASSNCDNVCYYDALAEHESLNDLDEVVEDQHQHTDAETHLHSMDSISALASVLPNICSYSRVEKMVNPLGTVTDLNAGISGELQTDMLDEVVGQLAAEDTVIHENCDEALFRPVVAIFCSDPAERQKLLQKDQKTEEATASELEREQASCQPPVVLVNKLIVPVIAKEMDEVLVQKEKQKSQKQSHKAQQQQQQQQQQQKTLAAAEDAAQAQKFAELSHLNKPKGNSNNNKTASQKSGSGTSEDEATTTITLAKSAKKAKNNKQKTSGKVSEKKPEQTNLAEEKVAVEKEENEERAVPMVKKTINKEQDSDAESDHADSLLANKSSIAAVMVSSASAQGLSLHVEMSAADAEQGEDEEIEGLDEEPPKTMSKDNKKKQKPGDAVATMTIDKEKEKAKEKELKLKEKEREAKLQEKEKEEKLKLKEREESLRMEREEKLKEEKIKEKEREEKLKEEKIKEKQREEKLKEEKLKEKEREERMKEKEREEKAKEKQREEKLREEKIKEKEREEKLKEKLREEKIKEKEKEEKLRKEREEKMREKEREEKIKEKERVEKIKEKEREEKLKKEKEEKLKEKEELLKKKEKEEKEREEKLKEKERQEKLKEKEREEKLKRETEERQREKEREEKLKEKERAEKLKDLEKEVKLKEKEEQLKEKEKELKLKEKKEKDKVKEKEKSLESEKLLISATVSNPWRRVVEDTPPKLPAVQDYPSLGKKPTKASPEKKRDEKLLPGLTTPPKEVNDTFEDFLSGLKPLEALPPLPALEPLEVKEDSKKESVSLINFESPLQETASIPRKISPPPRGFTEQNLILALCGSLHYENEQERIRETEAEVQPEVVTTPEPVYITLDTLALQKSTSTSNNSSGSEEIVVMEEPVKKLSKKHKRLKQLQLQQQQQQREREPDDEELRPLISISMCDSQLDVPDIPVRAMPDDDEGVEEEPETEPEQSLPEDLLHFGSSGVATNATTTDSEGPVPATTSDDNVVYGSSSTSNAAPHKLKTKKLEHKINLIAAIEAATSSSTSSAEESSVETTVHPDPTGLGLGIGLQSHSPGAAVGAGSSTTGGATAASLPAAGGVTSVGLADGAPTAHALQQQQQQQQPEQPLQPPPPDHPPPSEEPGPAIFQPNPMLKQEEVEQPLDGLALNNNNNINNNIIPTKDNASPNPNTNTNPNAIPSSNKVQKAEVTDAVDYPIRHSYGDHGELSTVVNIEVFDDQLSMSSISTNSRLSLEGPPSQSSPPLSLTNGLMDTNLMHFSESVTGTGVAQAQVHGRGANRFEVDDDDEEEEEEEEELDEEAEPDDDEREDRPLGRRNL

SEQ ID NO: 2764 - DNA, 3431 bp, DROSOPHILA
tcgccatcctcgctgctgcccgtgtagctggcggagctgaaggaatccgttgaggaggcactaagcgagcggctcctgtaccgacttgtcttcttcagagccgaggactgcttggtggccggcggaggaaccaccacgctggcatcctgcggcgccggtccagcctgctgctgcttgtcgccgcctccgaatccaggatcaactaccacagtgtctgccaggttgttcatggtggaagtagagggtaatctggggatttccttactatcccttaaattggctccttgctctagctcctagtgttccaccttctgcgactccagagcttgcaatccttttccgctgctcctttgaatgggcgccttggatgttatgtaaagtctgaaatccaagcaggatgcgctgcaaatggctagtggtgtggcctgggtctatacgaactgcacaatcacgtgatttatcgacgttgtggagaccacaaattgctaaattaattgtttttagtgcgagtctcctttgtttcacctctccactattgtttttgttcttcttcttcttttgcgaatggggggctacactttggatccggggcttgatgggagtttccggagaggggatgatgatgcagccgtcggctttcgggcgacgttgtttgtgtggcgaccaagtgggggatcgtttggcgatcgcttattgaatttgattttatccggagaaaagagaactaaaccgaaccgaggacagtaagcgagacacgcgaaaataccaaaagcagaaggcgttagtgctattctgcaagtgtggtaagttcccactgaagaaaggccaaagtaacgactttttaactgaaatcgtctaaaaattaatttttataatttcttaccattaattatgtgtttattttttaatgagcaaagtaaataaagtgtgatttacaactcctcagctgcaagtcttttaaatctggtagctggataatttaatgagtcaaaaagaaattggcaaagtattcgaggtttattaaaaacaaatagttaacacatttggcctacatatcctcctgtaggtagccgcacagctcgtagtcgtccgccgtgttgaccaagtgcgcttccctaagaaggccctccttgtaggtctgtctcttgacaatcaaacgcgacaattcctccggtgcaagtggtccttgcttggcgtgtttctggatgaagtccgccgccagttgtcgatccacgacggacatctcgaggctgcgactccaggcgagcagggccagcggtcgctgcggactcagagccagcgagggtgacaccagatggcgatacagacagccacccacgatgtcttgcagctgcttcacttggccgggaaaagcgcagggatggtagagcattacgatggcaccttccgccagattacgcacgtatcgctgaggaggcaagtaggaataggtgccatattcagcgggcatcgggcgataggggccactgataatacagatttgaatttgaaattagcaggaaactataatattgttcgccttacttggtggcaggcagatgggagtagctaatggactcattaaggcacttggcaggcggcagataggcgctaggtagaaagtgctccgtaagaatggcttctctggacaaatccggttggtacaagctgtgattactactgatgcataggaaattcaggctgtcacggatgtcgtttggatcgaagtccacggcaagattgctctgaaaattgttaataacaatgatagaaaaagatgactaatactaagcattcatcggtatttaggggaagtattagttatattgccaaactcaccttgccatcatcacagctgctttgtttagtcttgtgcgattcattgggaccctgcggaaacaatttaccctgccaagtatcctgtgtggtggacttccccgacttggttttgttatcgaccagcggttttttcttcaccaagtgcggctctccgggagcttgtggaaaccacttgccctgccagccatccttggttgtgaactccagcggaggaacttcctccgtggtgctcttcatttttaattcaatcgcttcctgctgttgtccaggggcatggggaaaccacttgccctgccagccattcttgccgggcgtcgcacctaatggaacctgcacacgttgcacatcattggaaatgtcgggtggggacttcccaatcttccctagcttctcatcaggatcaagagttggctccaacagattggcctgcgacttcttgatggatttcgcatcgatgagggcgaacccaaggcacaagagggtcaagtaatgccaaataaacataataattgcaagcaaaagaaaaacaaaagcgcaaaataagcaaacaaaaatataattaagaacttggcaaaacagctgtggagctgcgtttttcaacactggtcaaagcatgactttgttgcagggtagcaacaggttgtttggagtttgcataaatctccgatgataattatgtgttgttttaataactaaattaaaattatttacgccaaattaaagtaaataaagttaatttaaaatgactacttaaatcaagcagatttaaaaggaaatcaatgtatatttgaaatattcagactggattctaaggttaaatgacaaattactcaccagaaatcggctcataataataaatcattttattttcaaatgccccctgcgaacgctcccccgcattgcacacaccagggggtattttacgaagtgcccacacctggccacactggtcgcagctacaaaaagaagaagaacaagggccaacttgatggtcacttgctactgcgctttattaattcattattttccaaaataatgcacatatatacccgcccacagccgctctgcgcccccgctaatcgaaaaatgtgagtggtaagcgtttttaccagagtcttatcaacaatttaagcctcaattcccttccgtttccgtgattcgccacccagaaaacaataacaaaggggtgttgttgttgctgtcgctgctgctgcgctggaaaaacaactcgcataaaattttaaaacgcacaaagaaggcgaacgtggaaagttaggccaacaacccagtcgcgatgtcgtggttcaatccctgggatggcctcaaaacgaaaatgtgtcgctacctgctgcagcgatacctgggccagtttttcgagaataacttgaacctggagcagctgaaggtggacctttacaatggcaaggctgtggtggaggacattttcctaaaggtcaacgccttcaacgatctcttcgaggaccagggctgggccttcgaggtggtctcgggccacattggccgcctgactgtcgtggtgccgtggaatgcgctgatgaccaacgacagtagcctggagatccacaatctaa

SEQ ID NO: 2765 - DNA, 1279 bp, DROSOPHILA
cgcagctccacagctgttttgccaagttcttaattatatttttgtttgcttattttgcgcttttgtttttcttttgcttgcaattattatgtttatttggcattacttgaccctcttgtgccttgggttcgccctcatcgatgcgaaatccatcaagaagtcgcaggccaatctgttggagccaactcttgatcctgatgagaagctagggaagattgggaagtccccacccgacatttccaatgatgtgcaacgtgtgcaggttccattaggtgcgacgcccggcaagaatggctggcagggcaagtggtttccccatgcccctggacaacagcaggaagcgattgaattaaaaatgaagagcaccacggaggaagttcctccgctggagttcacaaccaaggatggctggcagggcaagtggtttccacaagctcccggagagccgcacttggtgaagaaaaaaccgctggtcgataacaaaaccaagtcggggaagtccaccacacaggatacttggcagggtaaattgtttccgcagggtcccaatgaatcgcacaagactaaacaaagcagctgtgatgatggcaagagcaatcttgccgtggacttcgatccaaacgacatccgtgacagcctgaatttcctatgcatcagtagtaatcacagcttgtaccaaccggatttgtccagagaagccattcttacggagcactttctacctagcgcctatctgccgcctgccaagtgccttaatgagtccattagctactcccatctgcctgccaccaatggcccctatcgcccgatgcccgctgaatatggcacctattcctacttgcctcctcagcgatacgtgcgtaatctggcggaaggtgccatcgtaatgctctaccatccctgcgcttttcccggccaagtgaagcagctgcaagacatcgtgggtggctgtctgtatcgccatctggtgtcaccctcgctggctctgagtccgcagcgaccgctggccctgctcgcctggagtcgcagcctcgagatgtccgtcgtggatcgacaactggcggcggacttcatccagaaacacgccaagcaaggaccacttgcaccggaggaattgtcgcgtttgattgtcaagagacagacctacaaggagggccttcttagggaagcgcacttggtcaacacggcggacgactacgagctgtgcggctacctacaggaggatatgtaggccaaatgtgttaactatttgtttttaataaacctcgaatactttgcc

SEQ ID NO: 2766 - protein, 380 aa, DROSOPHILA
MFIWHYLTLLCLGFALIDAKSIKKSQANLLEPTLDPDEKLGKIGKSPPDISNDVQRVQVPLGATPGKNGWQGKWFPHAPGQQQEAIELKMKSTTEEVPPLEFTTKDGWQGKWFPQAPGEPHLVKKKPLVDNKTKSGKSTTQDTWQGKLFPQGPNESHKTKQSSCDDGKSNLAVDFDPNDIRDSLNFLCISSNHSLYQPDLSREAILTEHFLPSAYLPPAKCLNESISYSHLPATNGPYRPMPAEYGTYSYLPPQRYVRNLAEGAIVMLYHPCAFPGQVKQLQDIVGGCLYRHLVSPSLALSPQRPLALLAWSRSLEMSVVDRQLAADFIQKHAKQGPLAPEELSRLIVKRQTYKEGLLREAHLVNTADDYELCGYLQEDM

SEQ ID NO: 2767 - DNA, 5245 bp, DROSOPHILA
cgcgggacattgttatgtagtcgaaccacctatcgttcacgtggaaatggaaaaagccggcatgcacaggtttttatattggagagcggtttatggattacctgaattaaagtgataaatgtttatgcaggacccttaattaccgtctgcggttcgatatacccttggtgggcaaggactgcgagtatgcgctggtccaggatttgcccgcatccgtttacataagcacagacgaactggatgacctgcagcgtttgaagagggtgcgttatcttgggaattagttacaagggttactatataaaaaaatgttcgtctccagttaaatgccatctatcctaagttcgtcaacattgaagtagccacggaacgggcgcagcccttctccgttttactgcgcggtacaccaaagattacggaatcgctggctctgcccgtgcattttcgctaccatgcccccagtgataagcggtgtggtgatcttgaagtctgaattgctttcgtccactagactaatcaattaatcctcacagtttggcggcaacggtggccatacccctacccgagctctatctcaactgcccgatggctgatagtgcgctcatcgaaaacgagttggttgcccggcccgataagctgtactgcctgaatgcgccggaaagccgtttcgacgagaaccatatcaaggatggccaacccacgaccatggctaatctggagcgctgcaactggaggcgggtgcacgtggactgccagctaaagatgccgctgcgtgccgagattccggtaggccatgctagcgcctacggtccagttctgtgcggcaccatcctgctaggttggtctctggccctgtggaccatcatccactcgatggccaacacgcgacgcatcaatcagcgcctcaacgagcagcgacttctgcagcaaaaagtcaagtaacaggcgacgaagtcggtgcgattcaaagtcagcgatggctaattgaacaatacattttagcgatgacacaggattgtaaatatgtattaatatgctgtttgcatagaaaactcacttattgatatagttaaagcgacttcagcagcttcgaaacgtgccacacatagtaaagtcatattttgggcttatcacacaactaagtcatattaagcttccctaagcataagcgtaaacataaaccattatctttagttatagctaggcatatccaaataacgctgtcacagcggcaagcttaaataagaataacttataattactacaattaacgaaaatgtatgtacatggcgtccaggtgcagatcgagggcttagtaccgaatgtctttatctgacgtgggaacaatggactttgaatcgttttcctggtggctgcggagcgtcatcgtgctagacgtcgatggaggttcgttccaaatctgaatagtggccttgccaaatatcacaaaaattgtgttgcacactaggtaaatacctcctgtaataaagaataccatgcgccactggctgggatcctcctcatccgatacgatcgctcccaccaccaaaggagctattatggaggtcactcccgcaatcccattggtgactcccatcattgggccggcaaagttgggcgacaggtcgatgtgattgatcagatatccacaggaacagcccgcattgatgcccactgccagtgtcagcagaagaatggcccacgttttctcatcggctgtcatgtagcccagtccaatcaaacaagccatcggtccccactgtccaatcgaattaaacagctttcgagccgtggtgatcgatatagtgcctctgttgataagcaaatccgatatgggactgaccacaaagcagagcaggcccatagcaaagtacggcagcgaggagaggaaggcattggacttgacatttagctgcagaaccatgctcatgtaagtgggcatttcggtgagcagcgtgtagaaaccccaggtgaatccacaatgggctgccagcagaccgtaaaaggctggcgacctaaagatcgacatccagggcacaggcatagactttaaaaagaggttgctccattacaattgctctacaaataacctatcacatcttcactcacctgactggagctgttgctgcccgtaaggctttcgatatactccacctcgcctttgctgatcctgctggctgtaaccggttcattggcggcctgccaaaagaaaagcagcgcccaagcgaggctgagacctccggaaaggtagaacaaccctggccaacccatgctggattcgaagatgaagccactggtgaccaggatgacagccgttccgaactgtgctcccgaataaacgccagtggttagcagtccccgctcagtgcgtggcacccacttagccagcagcgtgtggacacacggataaaccgtgccctggaccagaccggtaagaacgcgcagaacgcagatactctgccacccgcttttggctgcaatgggatggaagaagcacaaaatacctccgattgcagtcgccaggcccagcactaacttggctccaaatcgcttggcaagcagtcctacaaaattgtgaagcaggtggtaagtacgagtagattccggcctagattgcagccactcacctgccggcacctgggagaccacatagccccagaaaaagctgctgaggatcagggacttgtccgacgtatcccaggtgtagaacggagcccccgcggtggactgcgtcatgggcacaatggcagccgagatgttcacccgctggaagtagttgatcatcatgcccacgaacagaagaaccgcctgccagtgtcgcacgccaagacctccagctgagatgggtatgtaaatgatttatttagtttagagattaaagatacgctcatttacaggctagtctcctaagcggattcggaactactctgactagcaggggtcttctctctccactggaataataaaccatgtctgatcagttaggaatttaactggcgtctggccatccgatttattgattgccccattataagtgcacggtgcaaattgttgtcacttggtcgatattttctaggacctcaatctacggtttattgccgtttaacaatgctctgatagtgatgatttcattaattgcggctccgacggaactctttgggttttattataataatattttcattatcattaacgcctgccaatgaggaaaacaaaagcagctgtgtggtctcaatggaaaagttcgcgtagtggtggagactccaccgtgggaccaaacgtgtgtatacagtcgtaaagctcgattgcctcctcctatgaagttgaactggatggatattcagattagatcgccagaaattgctttccctgcagatgaacacgttggccaaccttcgcgcagttaataaatattttctttgtgtcaggccgatttatctctgttgatcttcataaagtcgtaagtctcggcagatgtctgatataagatttatcaagatatggtttgcaaatatatagccagacgtctggattgtaataacattgaccaaactcttagggtaggtctagtggtttgtgaagagcacttatggagaagattaagagagcagcggtataactgatactgatagtgctctatatgtaatttatgtctttaagttaaaacaagtgacgaacgaaccctcacaagatactaaagttctgatatcaacttttgtgacgaaaaatgattttgcacttgactttacaaaacaaaagattttattaattaaaaatctactaaatcgttaagctttgtaaaaatatttaaaaaagtatcctggtgcgcttcgtcactacgtgtacgtccacagcccacagtgacttaatttagcaagggaaccagctggtaaaaatattgttctttataatttttttttcatatatattattctatttaatattttcgattccagtaactccatatgttcacggtgcacaccttatcaaacctattcacacttgaattttgatattttgggaatctctcgaaggttttctatgaaactctagttattgtgcttttatttcgaaatatgtgaaatatgacactctaatactatcttaatcagcagtgattttctcttcgatccgaaacttacgccttgccttatcctcagagggttcgaaacccattttagatgtctttctgatttatttataataactcggtgatgtggaaatcagtctgtccgaagtggctggccccgaaaacgatggtaaactgcggagcgattgttgtacctttcgcttttatactgataccacaaaatcgcagtctcctgattacacgcggctccgcctccaggtctcaagtggccacgcagatcgtccgtcactatcgcggcaataatcataaacccataaaccgccaccaaagtgctcggcacttgcccctcattgttcaatccaatgcaaattacattaagtcttcgctttgattttcttttacgattgtaagcgattgaacacaaccgatcgtattattccagttgttataaaaagtggatcagtaatttatatagaaagggttatctgatacgtatacatatgtacatatatgggatgttactggcctgcactcgaaatcccttttagagccaatgattcaattgttatctcttgttgtgtgcactttccacagaattctcttgattatcctggcctaattgttttacagcttccgattagcgctgtcaacacttttgatcccaagtagattctggggaaagcctttatagctaagatataccatgtgtcagccttcaaggctttcgtcagaggggcaatcaagtattatgtaaggagaaagtaccacgacatttataattcaaacgaagacgttttgtaatatttgaagtggctttaaatctttatcactgcggagtgtgcaacttctatgtgatagatatgcgaaaaagatagtactcctgttcaaaattaactatgtgatgcatgccatgatttaaatgatttgtcataccatttaagtagctaataataaatatagtaattcttattaagaagtatttgatcgtattaggagaatataacaacgaaacacgtagaccacatcttgtgatcaaaagagccctatagttgtaatgtttacgttgttgattacattaatgccttgagatcttttgcgtttgttcgataagaaaatgatccaaacgctaaaattgacaaaatacaagaatctgca

SEQ ID NO: 2768 - DNA, 1815 bp, DROSOPHILA
ccagccacttcggacagactgatttccacatcaccgagttattataaataaatcagaaagacatctaaaatgggtttcgaaccctctgaggataaggcaaggcctggaggtcttggcgtgcgacactggcaggcggttcttctgttcgtgggcatgatgatcaactacttccagcgggtgaacatctcggctgccattgtgcccatgacgcagtccaccgcgggggctccgttctacacctgggatacgtcggacaagtccctgatcctcagcagctttttctggggctatgtggtctcccaggtgccggcaggactgcttgccaagcgatttggagccaagttagtgctgggcctggcgactgcaatcggaggtattttgtgcttcttccatcccattgcagccaaaagcgggtggcagagtatctgcgttctgcgcgttcttaccggtctggtccagggcacggtttatccgtgtgtccacacgctgctggctaagtgggtgccacgcactgagcggggactgctaaccactggcgtttattcgggagcacagttcggaacggctgtcatcctggtcaccagtggcttcatcttcgaatccagcatgggttggccagggttgttctacctttccggaggtctcagcctcgcttgggcgctgcttttcttttggcaggccgccaatgaaccggttacagccagcaggatcagcaaaggcgaggtggagtatatcgaaagccttacgggcagcaacagctccagtcagtctatgcctgtgccctggatgtcgatctttaggtcgccagccttttacggtctgctggcagcccattgtggattcacctggggtttctacacgctgctcaccgaaatgcccacttacatgagcatggttctgcagctaaatgtcaagtccaatgccttcctctcctcgctgccgtactttgctatgggcctgctctgctttgtggtcagtcccatatcggatttgcttatcaacagaggcactatatcgatcaccacggctcgaaagctgtttaattcgattggacagtggggaccgatggcttgtttgattggactgggctacatgacagccgatgagaaaacgtgggccattcttctgctgacactggcagtgggcatcaatgcgggctgttcctgtggatatctgatcaatcacatcgacctgtcgcccaactttgccggcccaatgatgggagtcaccaatgggattgcgggagtgacctccataatagctcctttggtggtgggagcgatcgtatcggatgaggaggatcccagccagtggcgcatggtattctttattacaggaggtatttacctagtgtgcaacacaatttttgtgatatttggcaaggccactattcagatttggaacgaacctccatcgacgtctagcacgatgacgctccgcagccaccaggaaaacgattcaaagtccattgttcccacgtcagataaagacattcggtactaagccctcgatctgcacctggacgccatgtacatacattttcgttaattgtagtaattataagttattcttatttaagcttgccgctgtgacagcgttatttggatatgcctagctataactaaagataatggtttatgtttacgcttatgcttagggaagcttaatatgacttagttgtgtgataagcccaaaatatgactttactatgtgtggcacgtttcgaagctgctgaagtcgctttaactatatcaataagtgagttttctatgcaaacagcatattaatacatatttacaatcctgtgtcatcgct

SEQ ID NO: 2769 - protein, 449 aa, DROSOPHILA
MMINYFQRVNISAAIVPMTQSTAGAPFYTWDTSDKSLILSSFFWGYVVSQVPAGLLAKRFGAKLVLGLATAIGGILCFFHPIAAKSGWQSICVLRVLTGLVQGTVYPCVHTLLAKWVPRTERGLLTTGVYSGAQFGTAVILVTSGFIFESSMGWPGLFYLSGGLSLAWALLFFWQAANEPVTASRISKGEVEYIESLTGSNSSSQSMPVPWMSIFRSPAFYGLLAAHCGFTWGFYTLLTEMPTYMSMVLQLNVKSNAFLSSLPYFAMGLLCFVVSPISDLLINRGTISITTARKLFNSIGQWGPMACLIGLGYMTADEKTWAILLLTLAVGINAGCSCGYLINHIDLSPNFAGPMMGVTNGIAGVTSIIAPLVVGAIVSDEEDPSQWRMVFFITGGIYLVCNTIFVIFGKATIQIWNEPPSTSSTMTLRSHQENDSKSIVPTSDKDIRY

SEQ ID NO: 2770 - DNA, 4289 bp, DROSOPHILA
ccggtaaatgctattttatgtatgtatgtacatacatatatgtatgtatgcacgttcttacatgcaatgtgtgcgtttgtgcatttctcgtcaatacagtgtacacattttccaagcacatctgcctcccgtgcttcatttcctgcccgtttgcctgggtatttctggaaattcgatagcagctgcctcttcggtctgtttcatgaaaatgccgcattgggcgcaaacggagcaggcggattatgtatgtatgtgtctacatacttacaagtacaacacaacaaccaaccggtttacctaggctccaatttcgttttggcaaatcaacccccattaaaggcctgcacaaagtacatacataatgtgtatgtacaaacgcggtcacttcaatacgtacatacatacatatttaactcgtagactcgtagttaaattcggaagcttcgcatggttttgcctaattgtttcagatttatggggcttacatacatacataattactttatacaacgaaaattactaaatagaatcgttcctgtaagcaggactgacacatttgcttgcgttgattgctattatatcgacctaccatagtcacataaatatgtacatatgtaaatatgtatgtatgtacaatcgcatgcttgacggcagttaagaaatgaagtcaccatttcggtgagctggcaacgattatgctgtggccccgaaaggaatgactcatcgtcccagagaatcgataccaacggtggaaagccaagtgcatgccacactgcgtgcacagcctgctgctacacttgccacaaacagcaggcggaaaagcgcagcagcggcccgaatcggggaaaatagaaagcgctaattatagacgaagtgaacggcagctctgctttcccgcagtcgaaactccgtgcaatgaccccgttctttcaccacgaaatgaatgatcgctgggagaaagaaaaggcaaagaaaaacagtggggttttcttatttctgacaacactgaatctggccgattttattcttgtgtacacaacttatcgccgagttaacttggcttttctgctatacgtgtctttgtggataaaatactttatggtttctcgtacaatcttcatcgttttcgtatgcttttcagtgttgcagtgaattttttgttgcgattggaagcgtaaacactgatttcgacggttaccccgcccaccaatgacgctcccatcgagcgttgaagtggcgtgacgcttagtactcctcagcgccctcaccctcgccgtcaccggagtccatgccgacctcctcgtagtccttctcgagggcagccaaatcctcacgggcctcggagaactctccctcctccataccctcaccaacgtaccagtggacgaaggcacgcttggcgtacatcagatcgaacttgtggtccagacgggcccaggcctcggcgatggccgtggtgttggacaacatgcacacggcacgctgcaccttggccaaatcacctccaggcaccacggtgggtggctggtagttgatgccaaccttgaagccagtggggcaccagtcgacgaattgaatggtgcgcttggtcttgatggtggcaatagcggcgttgacgtccttgggcacaacatcaccgcggtacagcatgcagcaggccatgtacttgccgtgacggggatcgcacttgaccatctggttggccggctcgaagcaggcgttggtgatctcagccaccgacagctgctcgtggtaggccttctcggcggagataacgggggcgtaggtcaccagagggaagtgaatacgtgggtagggcaccaagttggtctggaactcagtcagatccacgttaagggcaccatcgaatcgcagagaggcggtaatcgaggacacgatctggccaatcagacggttcaggttggtgtacgtggggcgctcaatgtccagattgcggcggcagatgtcgtagatagcctcgttgtcgaccatgaaggcgcagtcggaatgctccagggtggtgtgggtggtcaggatggagttgtagggctcgaccacggcagtggacacctggggggctgggtagatggcgaactccagcttggacttcttgccgtagtccacggagagacgctccatcagcagcgaggtgaagccggagccggtacctccaccgaacgagtggaagatgaggaagccctgcagaccggtgcactgatcggccagcttgcggatcctgtccagaaccagatcgacgatctccttgccgatggtgtagtggccacgggcgtagttgttggccgcatcctccttaccagtgatcagctgctcggggtggaacagctgacggtaggttccggtacggacctcatcgaccacagtgggttccagatccacaaacacggcgcggggcacgtgcttgccagctccagtctcgctgaagaaggtgttgaacgagtcatcacctccgcccacggtcttgtcagacggcatctggccatcgggctggatgccgtgctccaagcagtagagctcccagcaggcgtttccaatctggacaccagcctgaccaacatggatagagatacattcacgctgtggatgaggaggaagggaaaacggatgattagttacacaccccaagaaaatcgataattgcagagccgcgcccaacttgagccggcactgcgtgcgagtgagagaggtagctaaatggtatactgatttttttgctctactttgccgacgccggaattttactctctcgccattttctctttaattctatccaaaatctacagttatgcgtcgaagtatcatggtaaccgaatttagaatttttaagattaatgaagcgttccagcagcatagaaataatgaatattttttttatctagattttaagagccattcctcattgcgaacaaaaaaaaaaaacaggcatgacgtcatcacttttgaggaaaaaacgcaggccggccgccattttgagaaaaagccgcatcgcgtttttgcccattgaattttgcccacacaaatttcttttcagcattatttcactagatttttttttaaagtactcaccatattgagtttttattggaagtgtttcacacgcgacaaggaaaattcacagaattgtgtagagctacgatttcgaggtctgactcagagagcgtatacgttcgaactgccggctatgaggcttgacaaacgtaaaacgaatatgaaatgtggaaagcgggctgctttatataggcaccggagctagagacggcaagctgtcgacttaaacgccgcataaccgataactgaagtgggagaggtaatggcacttggtctctctaaaacttgctgcggtattttgcaggactagttgggactcgaaccagggcgtgaatctttgcttgcccaaccggtagacctaaccggttgctaaagtgggccaacattaataatatttttgttgaatgtttcataaaagctattttaatataaattcgcatcgttaccgattcaataaggtttagtaaatcattatatttctgactccatattgatttccaacagcaaattaattaactccataacttcccctctccctttggagcaaaggatgtagttaatatcttaacatctaaacttgttttgtttttttattcaaataggagttatattaaatagaaatgtaaaaaacaaagcaggttttaagaaaatgatgtcaggagattttgaactcctactcatggtcactctaatcgcagtctgcaatttacgtgtttccaacttaacgcccccaagttaatagccgtaatcatttgaaaagaaaggcacgcacgcacaacgccatgcggatcgaacctggggactccttttggacgaaaaaggcgatgttttccaacgcagaaaggcagtactttgagacggtccgtccgcggaagaccagtgtgagtaaaagttgaccgtcgatggcgatttcacaagtgacgtttaagtggcgggaacttctactcacaaatccctgagccctgtgatatgatttattttatggagccgtgatccggacgaaaaatgcacacacatttctacaaaaatatgtacatcgcggtgcgattgtgtcgcttaaagcacacgtacacccactgtcacactcacactcacatgcatacaccgccggcgaactttggtgtagttggccaccctacgaaattcaaccgcttcgattcgaattttcgaatcaacagttattggcagtcgaacaaaggcggcaaactttcgagttgcagaaa

SEQ ID NO: 2771 - DNA, 1800 bp, DROSOPHILA
gtcgacagcttgccgtctctagctccggtgcctatataaagcagcccgctttccacatttcatattcgttttacgtttgtcaagcctcatagccggcagttcgaacgtatacgctctctgagtcagacctcgaaatcgtagctctacacaattctgtgaattttccttgtcgcgtgtgaaacacttccaataaaaactcaatatgcgtgaatgtatctctatccatgttggtcaggctggtgtccagattggaaacgcctgctgggagctctactgcttggagcacggcatccagcccgatggccagatgccgtctgacaagaccgtgggcggaggtgatgactcgttcaacaccttcttcagcgagactggagctggcaagcacgtgccccgcgccgtgtttgtggatctggaacccactgtggtcgatgaggtccgtaccggaacctaccgtcagctgttccaccccgagcagctgatcactggtaaggaggatgcggccaacaactacgcccgtggccactacaccatcggcaaggagatcgtcgatctggttctggacaggatccgcaagctggccgatcagtgcaccggtctgcagggcttcctcatcttccactcgttcggtggaggtaccggctccggcttcacctcgctgctgatggagcgtctctccgtggactacggcaagaagtccaagctggagttcgccatctacccagccccccaggtgtccactgccgtggtcgagccctacaactccatcctgaccacccacaccaccctggagcattccgactgcgccttcatggtcgacaacgaggctatctacgacatctgccgccgcaatctggacattgagcgccccacgtacaccaacctgaaccgtctgattggccagatcgtgtcctcgattaccgcctctctgcgattcgatggtgcccttaacgtggatctgactgagttccagaccaacttggtgccctacccacgtattcacttccctctggtgacctacgcccccgttatctccgccgagaaggcctaccacgagcagctgtcggtggctgagatcaccaacgcctgcttcgagccggccaaccagatggtcaagtgcgatccccgtcacggcaagtacatggcctgctgcatgctgtaccgcggtgatgttgtgcccaaggacgtcaacgccgctattgccaccatcaagaccaagcgcaccattcaattcgtcgactggtgccccactggcttcaaggttggcatcaactaccagccacccaccgtggtgcctggaggtgatttggccaaggtgcagcgtgccgtgtgcatgttgtccaacaccacggccatcgccgaggcctgggcccgtctggaccacaagttcgatctgatgtacgccaagcgtgccttcgtccactggtacgttggtgagggtatggaggagggagagttctccgaggcccgtgaggatttggctgccctcgagaaggactacgaggaggtcggcatggactccggtgacggcgagggtgagggcgctgaggagtactaagcgtcacgccacttcaacgctcgatgggagcgtcattggtgggcggggtaaccgtcgaaatcagtgtttacgcttccaatcgcaacaaaaaattcactgcaacactgaaaagcatacgaaaacgatgaagattgtacgagaaaccataaagtattttatccacaaagacacgtatagcagaaaagccaagttaactcggcgataagttgtgtacacaagaataaaatcggccagattcagtgttg

SEQ ID NO: 2772 - protein, 450 aa, DROSOPHILA
MRECISIHVGQAGVQIGNACWELYCLEHGIQPDGQMPSDKTVGGGDDSFNTFFSETGAGKHVPRAVFVDLEPTVVDEVRTGTYRQLFHPEQLITGKEDAANNYARGHYTIGKEIVDLVLDRIRKLADQCTGLQGFLIFHSFGGGTGSGFTSLLMERLSVDYGKKSKLEFAIYPAPQVSTAVVEPYNSILTTHTTLEHSDCAFMVDNEAIYDICRRNLDIERPTYTNLNRLIGQIVSSITASLRFDGALNVDLTEFQTNLVPYPRIHFPLVTYAPVISAEKAYHEQLSVAEITNACFEPANQMVKCDPRHGKYMACCMLYRGDVVPKDVNAAIATIKTKRTIQFVDWCPTGFKVGINYQPPTVVPGGDLAKVQRAVCMLSNTTAIAEAWARLDHKFDLMYAKRAFVHWYVGEGMEEGEFSEAREDLAALEKDYEEVGMDSGDGEGEGAEEY

SEQ ID NO: 2773 - DNA, 9179 bp, DROSOPHILA
attttaagtgcgaaaagaattagcaactccgaagaattctagaatgctaagtgagtcaagggcagccatgttaatggcggagagaacttataataaaggtaaggcgctggacctcggtctacatcattggacctgaaatgccgcagcccatgaccactcaatcattatacttgtccgaggatagacgaacacagtacaagacgcgtgcgtgacgccagacagctggaaaaacgaagacatgtcatacaaaccagtacaaagaatcgatcaaaggggacaaaagccttcccttggggaacatacgagaaatcgaataataaatattacattaaaacaaagctttctgctgcttaaattgtgtacattacaaaccaataattattatcaggatcactattcgatgcgctcgattgggctcagccaaagacaccattatagtgtctttggcccagcccacttatacgataactcaattctaacatttttaattgctttttcattgctatatgttggtgaaaactatttataaaaagatccatttgtcatttacaaatttataagctttaaccaaaaaaatggatcaggttattttgaatcaaattaatcccccgcttgcggaactgataaatatatgctactttcaaacccacccaaaaaagttatttaagcagtgaacaattcagtagatcccagctcactttctcgtactgcgcatgctcagattttcggggtggggtttatggtttgtggtgcactgcctgcatgtggcaacccttagctcgatggtggtgcgttgtggccgttaattttatttcagttccgttgtgtttggtttggtttcgttcagttcgaattgggtataattcgcgtgaggataagtcttcatggaacgcggcggtcacataacaaactttcggaaaaaccacccacatgtgtgtacatgagtgtataaccgtgcatgcgtagaaaattttctagccgaaggtttcagttgtgaaaacagacgaggcactgtgccggagcgtctaggttttcatcagtttgatccagttaaaaggtaccttttttttaaaaatcaaacccttcttagacggaatcccaaatacattaatagtcttcgtctgattcgaatgaaaacttggctattggaacgttccagtgaagaaaccgtatgaaattttcttcaaataccctaattgtaatttgtgtaataacttatgcataaatttggttcaaaatgtgcaaagaaagacttatccaccgttctaaaggtctaccttaaaagtggattagatattaggtaaggtaaacactgtcaacaaccggttttaggagctttattatagaaatcaacatttaatccaatttgtccctacgtaaaaatgggaaatatattagaaagtgcaagccaccccctacacattgccttatccgtatgtgtaagtacgaccaaacacttacgtgtacctatgtttgtgtgtttacaaagcaacccttaaggtcgtgcgacgatggcaacgacaaaaaatattttgtacaactaataaataacaaatataacgcgaagtaccagatttgtaaaggccagaactttattggaaatgttaagaaacatgtgtttttattgtttgtctatgattttatattaactataggatattaaaaactagtgaaagttatataaaaaagactacttttcaaacgcctaaaatgaatctattgactaccattctttttcaaatttaaaagcacttgagttacggtaccaactcaagcgtcatattgtaaggaatggattccttaaatgatataattgaccaccaaacatttagccaggagttagttgaagatgcatcggagttcatcactgtgggtcatcattcggagcgcccttcgcagtccagtcagcagcctaattctggacaggatctgacaatgtctatgcaagacataatttcctgtccggtgaaacaccggacctgctctgcatctgggtcgggatcggcatcgggatccgattccgttgtcatggttatagacgcactgggacaaggtaacaggcagtcagcatatcaaattgtgcctcagcagttgcagcaaagaaacatgccattgcctttcgggctacttgaacgagataggcagcatatgcagcatgggcgtgaggtcaataccagtccagtggactttgtatcatcagatataaatttggatggtctgactgtagacgcagacgtctcccagacggatcactctcaagaaacggcggtaaagcaggagcaaaaactacttattgtgcaatccaagagtcaggatcaaagccataggcgcattcgaatgcttgtagacgtttcgagcgtaaattctggccttggcgtgcacgtggatgatatggatgagatttcctctgatggcgttggctgcgacgacgaaggagttacgctgagccaccagcatcttttggagcaagaggaacaattcggcctaacaagccaccatccgcatctccaacctcatacacagatcatccatggcttgcaccagagatcaacacattcggaaatgggactggacaatgggcatggggaggttctatcggttatcgtccattcccaggacagcgacaaggaggactgtgaggaaaatgatgatggggatgcagaaggagatttagaaaatgaagacgatgatgaacgcgactcgcggagtcgtgaacagctgcttagtcacagctcgtatcagacgctgacctcggtgaatgatcgcctatcttcgcctgggtttagtcaaacatcgtatgctacactcacccctatacaaccacttccgcctatatcaacgatgtccgagaagttcgcctactctggccacatctcgggaggagacagtggagacacggatgtcaatggagatggtgcaggtggaggagtcgttgaggttggtgaagtcaccaaccaatccagcgaggctacagggactgtttcaatatctagtggcaatgctacatcctctgtgtgctccaacaacgattgcagttctttttctgccctttccatgcccataggaagtggccatttgggtctaggtgttttaagcggcgtccagtcaccattttcttcatacgaaaagctatcttcgatgatttcccctccgcctaataactatttggtctcgtgcgatctacattcctccgtttcgggacgcgttataaattcatcgcacttgcagctaagtcacaacggcaataaaaaggagtctggaacacacgaacacacacataggcctgctgatgtcaatggtgggaagttttcctatactggccacatctcccgaggtgatagtgtagataatgacgtcaacggtgaaaagttctctttctctgaccatatctccggtggggatagcggagatgaagatgccaacagagaaaaattcatatactcagatcacatctccgaaggagaaaacggaccggacgtcaatagcggaacgtaagtatttttttttagctactttagtcggcatatgtattttatggttcactacttatagttcttggggtcgaggcgttcatacggacagaatgatcaagaatttgtaaatgtattttatatattcggaaacgcttccttctgcctgttacattctgtcgaatgtgtgccacgtccacacttttgctaaatgtgttttgtatctttccatattattattagttctgtaaatttctatcgatttgccaaaaaaaccatttttacgcccactcgtacgcctacaaaccgcccaatatctatcgatatcccagaaaaatgataaaatttcgccttcgcatttccactagctgagtaacgggtatttggtagtcgaggatatcgactatatcattctctatcttttattaactcggcagaagttgtttttgtttgatactttataggatcggaaactctttctgttttctgcaccgtactcttcaatgaatctagtacacccttcaaccctacgagtagcgggtaattctttgaaataattgagttctttaactaaacttttattggcgtgggtggtgtaccttaaaagttttttttttaaatatttttcgtgggtattattaaatattattaaatattgtcagtatctgtaatactctactttatgcaatgcttttggctatttgtactgtgcagtggaaccaccaccattttgaaccatactattaaaaataatatttaatttatttgaaggaattggctccagatgcactctgagagggaagtgcggctccatatgcccgtgccggctgagctggaagcgaggtttcacatttcgtcagagcgaaggactcgactcaatgtgccacctgctcgtggttctctaagccgacatcttgctccaaacgctccgatctgccccgcagattggaaagcggatgattggaaacacagcaatgctggcgttgttagtttgaccgcagatatgcccgtggttgtgtctcttactcctacaccgcctccgctaagagacgactcggtgagcggcattaaacaaaacgagcgatcatcaccagggcacagagaacagtacttcctggacaaaagccaagaacccagttccgttgtagcagatcagtgcagtccgggcatcaatggcaccccgcagtcggtgtgtgtcattcaccagcagtctccatcagctctcggaaacgggtttcaatcaagcagccagcaggccaaggtttcctcgtgcgcatcaccaaaagggacagtgtcctctggaggtgcagtttccaaccgcattgcaaattccagtgacatggaggagatcaatactaaggatctggcacagcgcatctcagccgaactcaagcgatacagcattccgcaggctatattcgcacaacgggtactatgccgatcgcaaggcaccttgtccgatctgctgcgaaacccaaagccgtggtcaaagctgaaatccggccgagagacgtttcgcagaatgtataaatggctccaggagcccgagtttcagcgcatgtctgctctgcgaatggccgctgcccaaattcctcagcgagctcctttgagctctggaatgtctcttgggtcagcaacaggtccaagtggctccaccggcacaataccgacggacttggacccacatggcggccctacgatgatccaaaatcgtaagttattttgagcttcaggctaatttatttttcaccaatactttcattcaaatattgtttaagtatttaataggtacatttattgaagatcaggtctaatcaaaacacaaatattaaaatatccggttctcttacatctaagcattattattacgaaaatataaaaaaaaatacccattcttatttatgttgttatttattttatatatttagtcaaatgtaaaactgctttacctctcaagattttcactattttatgtctcgtttaaaagttttaccttatctactctgaccttaatagtaagaaattagcaaacaatatttgatattttatggtaaattacatatagtacataaatataatatatatctatttacatataatatatatatatatacataaaatatatttttacatacatataatatatatatacatacatataatatatatatatacatataataatatacatgtaatatatatatatatatatacatataaaggtgatgcgttcccttgatattatttccaatatatgtttttaaagacacaactatcacaacacgactatcagatacctgttcctcatgtcatgttattatataatcctacatgaattgcatgcatgcactagaaaaatgaattccgacatcatctgttaattttgatcaaaaatatttatactttaaatatgtatttttataaccggctgattataccaattattatacgcgttacttgtagttactagattcgaaagtaagtaacaggaagcgtttgcaaccatttaaagtaaatatattcttgatcaaaattaatagctgagtcgacctagccatgccacattttgtttaattagtcgtgtcaatttctatcgatttgctaaaaaacttgtttgaaatttgtttattttaatatttattttgccaattattcttttgaaaatttgttctcattttattatatttcgtgttccttttatcgatatgccaaaaagaatatagaactttctcgttcgtattcccactagttcagtaacgggtatctgatagtcggggaactcgactacaacgttctctcttgttttgaatttaattaagacgattaagtcgaacgacgactacctcatatagctgccattggaaactttgaaacagtagttgaaaatattagaacagtaataggtttgttatttttttattataaattgttcccattcggtgtacaaaagccttttttaattttaatctaatataattactgcaagggtatattagctctggatttcacatgctagcatcctttcttgttataatatattgtaatcaaaactactctttgttcaactgtgtgtttgggcttgcatcagctctgacaaacgaatcggactcttcgcctgcatcaacacctgtcacaagcgttttggttgggagcgtcgttagctgtcgtcgaaaggaagagccccagatcgaacaaatgccccagcctaaaaagccgcgattggtcttcaccgatctccagcgacgaacattacaagctattttcaaagtatgtataaacattagctatttaaaaaaaattaaattatttttttatatctctctcaggaaggccatcccccgccttcctgaatgcctaaaaattttgtttttttttgattgtaaagaatctctaaaaacatcaggattgatgatttaacaaaattgaatgttcgccgctaattgtctttctaaattcctatgctatgaaaccaccaataataaatgattttacaggaaactaaaagaccttcgaaggagatgcaagtgaccatcgcgagacagctgggactggagcctactacagtgggaaatttttttatgaacgccagaagaaggtcgatggataagtggcgagatgatgactccaaaagcactatgcatgtggcacatagccgacaacaacaagacgaacagcagaaagataatgcccacactcatagtcaatctcaaattcaagatcaaaatcactctcaaaatcaagctatccataatagcatgtcgcaagatccctactcaaatcttcacacaacagctatgtcgcctcttggagcttttgatgaagacgctgatatggacttggaactagaaagtcacgactttgatttagtggaccccgatgaacatggggataccaatgatccaaacggcgacatgttgtgacagcatagccaaagcagacgtcgaacgatcaacacgcccaaagtaatggctccgaagacatcgactctctacttaaacagcacccgcattcagtctcgtacgcacatggtttctctaagaagagaaatggatgtcaatatagattgcattgtcagaaagaataacgaatgtaatagcaacgggagccatgacaaaaagcggggtgatatctcgtcggcccatttgcatgaagccgaacgtcattcagatgaaaagattatactaaaacaaagcttttgccaagaagcactcgataaggaggcccatatattcattgatgatatacctattcgaaatggcttggatgacctgaaggtaatgattgtctgcagacatgaaatctagcgatctcattacttactgacactttaagtgtccaaaggtttagcaagcttatcgtttataggcttaaagttgatttgaacaaatatattttcaaagcagcaatagtaaatacatatatcaaatacttttaaaccagtatcattcctcccaattccgaattatgaacagagattttatttctaaaatgtttgaccctgttttaatgcttatctgttaatgaatttattgattttcaagatgtaatcttaacaaggaaagcttaaaaacataaaatttgatgaaatggtttggtccatatattttaatgtttgaagattatttcatggaaatgtgaaggcgcttgaaatggtcaattcgcttagttcaattttggcatgctctttccagcatttcgtccggcatctcacaaataaaaataaaattcaatgttgttttccaatgtgtcaattcaagcgggcttgtctcgatagacattgtttttatcacatccccacaaacaatagtctaaaggcgttaaatcgcaccatctaggaggcatagccggtcccaaacgtgaaataatatggtcaccgaactggccaacagttattggtgcgaaatttagtcacaataggccgaattgccgcttaagtgagatcggttgattattgacggtcagtcaataatttccaaccgctcgtttgtaagacgatttattgttaaattgtagaccaaactgaagatgtttcacagtgaaaacaaacaagaaacatgcaagagctatttaaaccacccaacatgataattaccctatacttttcatttaaggtatgagaaatgagaagaatagattttttcgatgtacgcaatatagtatagccctatattcttaatcaggagtcatgccgaactatttatagtagtctagttatttcatctgcatgtctccaccacccccgcagggagtgtcaatatccatgatcgagatatttgtctatagctatttgtaatttatttgtgaaacgaaacaaaatttgacatgttaaagctgcaaaagtacaaaacttatatttgctgaattaagcttccttgttactatagaattattttttttatttattttaaaattcgttatcctacttaaaacttttatatccttcttaacgtttgactgagtacgcggaatatttataagtgattgtagttaagccgttacgcacgcatatatattttctcatcagcaaaattttgaaggtcctttatacgacattattgaccactagccttgtgtaatatgagaaatgtctcaaatatttacaattcaaagacatattattctccacttgcactataggtacaccttgtataggtacaccttgtacaatatatcgagacagtcagttagactttgggaagtaactatgtc

SEQ ID NO: 2774 - DNA, 4826 bp, DROSOPHILA
cagacgaggcactgtgccggagcgtctaggttttcatcagtttgatccagttaaaaggtaccttttttttaaaaatcaaacccttcttagacggaatcccaaatacattaatagtcttcgtctgattcgaatgaaaacttggctattggaacgttccagtgaagaaaccgtatgaaattttcttcaaataccctaattgtaatttgtgtaataacttatgcataaatttggttcaaaatgtgcaaagaaagacttatccaccgttctaaaggtctaccttaaaagtggattagatattaggtaaggtaaacactgtcaacaaccggttttaggagctttattatagaaatcaacatttaatccaatttgtccctacgtaaaaatgggaaatatattagaaagtgcaagccaccccctacacattgccttatccgtatgtgtaagtacgaccaaacacttacgtgtacctatgtttgtgtgtttacaaagcaacccttaaggtcgtgcgacgatggcaacgacaaaaaatattttgtacaactaataaataacaaatataacgcgaagtaccagatttgtaaaggccagaactttattggaaatgttaagaaacatgtgtttttattgtttgtctatgattttatattaactataggatattaaaaactagtgaaagttatataaaaaagactacttttcaaacgcctaaaatgaatctattgactaccattctttttcaaatttaaaagcacttgagttacggtaccaactcaagcgtcatattgtaaggaatggattccttaaatgatataattgaccaccaaacatttagccaggagttagttgaagatgcatcggagttcatcactgtgggtcatcattcggagcgcccttcgcagtccagtcagcagcctaattctggacaggatctgacaatgtctatgcaagacataatttcctgtccggtgaaacaccggacctgctctgcatctgggtcgggatcggcatcgggatccgattccgttgtcatggttatagacgcactgggacaaggtaacaggcagtcagcatatcaaattgtgcctcagcagttgcagcaaagaaacatgccattgcctttcgggctacttgaacgagataggcagcatatgcagcatgggcgtgaggtcaataccagtccagtggactttgtatcatcagatataaatttggatggtctgactgtagacgcagacgtctcccagacggatcactctcaagaaacggcggtaaagcaggagcaaaaactacttattgtgcaatccaagagtcaggatcaaagccataggcgcattcgaatgcttgtagacgtttcgagcgtaaattctggccttggcgtgcacgtggatgatatggatgagatttcctctgatggcgttggctgcgacgacgaaggagttacgctgagccaccagcatcttttggagcaagaggaacaattcggcctaacaagccaccatccgcatctccaacctcatacacagatcatccatggcttgcaccagagatcaacacattcggaaatgggactggacaatgggcatggggaggttctatcggttatcgtccattcccaggacagcgacaaggaggactgtgaggaaaatgatgatggggatgcagaaggagatttagaaaatgaagacgatgatgaacgcgactcgcggagtcgtgaacagctgcttagtcacagctcgtatcagacgctgacctcggtgaatgatcgcctatcttcgcctgggtttagtcaaacatcgtatgctacactcacccctatacaaccacttccgcctatatcaacgatgtccgagaagttcgcctactctggccacatctcgggaggagacagtggagacacggatgtcaatggagatggtgcaggtggaggagtcgttgaggttggtgaagtcaccaaccaatccagcgaggctacagggactgtttcaatatctagtggcaatgctacatcctctgtgtgctccaacaacgattgcagttctttttctgccctttccatgcccataggaagtggccatttgggtctaggtgttttaagcggcgtccagtcaccattttcttcatacgaaaagctatcttcgatgatttcccctccgcctaataactatttggtctcgtgcgatctacattcctccgtttcgggacgcgttataaattcatcgcacttgcagctaagtcacaacggcaataaaaaggagtctggaacacacgaacacacacataggcctgctgatgtcaatggtgggaagttttcctatactggccacatctcccgaggtgatagtgtagataatgacgtcaacggtgaaaagttctctttctctgaccatatctccggtggggatagcggagatgaagatgccaacagagaaaaattcatatactcagatcacatctccgaaggagaaaacggaccggacgtcaatagcggaacgaattggctccagatgcactctgagagggaagtgcggctccatatgcccgtgccggctgagctggaagcgaggtttcacatttcgtcagagcgaaggactcgactcaatgtgccacctgctcgtggttctctaagccgacatcttgctccaaacgctccgatctgccccgcagattggaaagcggatgattggaaacacagcaatgctggcgttgttagtttgaccgcagatatgcccgtggttgtgtctcttactcctacaccgcctccgctaagagacgactcggtgagcggcattaaacaaaacgagcgatcatcaccagggcacagagaacagtacttcctggacaaaagccaagaacccagttccgttgtagcagatcagtgcagtccgggcatcaatggcaccccgcagtcggtgtgtgtcattcaccagcagtctccatcagctctcggaaacgggtttcaatcaagcagccagcaggccaaggtttcctcgtgcgcatcaccaaaagggacagtgtcctctggaggtgcagtttccaaccgcattgcaaattccagtgacatggaggagatcaatactaaggatctggcacagcgcatctcagccgaactcaagcgatacagcattccgcaggctatattcgcacaacgggtactatgccgatcgcaaggcaccttgtccgatctgctgcgaaacccaaagccgtggtcaaagctgaaatccggccgagagacgtttcgcagaatgtataaatggctccaggagcccgagtttcagcgcatgtctgctctgcgaatggccgctgcccaaattcctcagcgagctcctttgagctctggaatgtctcttgggtcagcaacaggtccaagtggctccaccggcacaataccgacggacttggacccacatggcggccctacgatgatccaaaatcctctgacaaacgaatcggactcttcgcctgcatcaacacctgtcacaagcgttttggttgggagcgtcgttagctgtcgtcgaaaggaagagccccagatcgaacaaatgccccagcctaaaaagccgcgattggtcttcaccgatctccagcgacgaacattacaagctattttcaaagaaactaaaagaccttcgaaggagatgcaagtgaccatcgcgagacagctgggactggagcctactacagtgggaaatttttttatgaacgccagaagaaggtcgatggataagtggcgagatgatgactccaaaagcactatgcatgtggcacatagccgacaacaacaagacgaacagcagaaagataatgcccacactcatagtcaatctcaaattcaagatcaaaatcactctcaaaatcaagctatccataatagcatgtcgcaagatccctactcaaatcttcacacaacagctatgtcgcctcttggagcttttgatgaagacgctgatatggacttggaactagaaagtcacgactttgatttagtggaccccgatgaacatggggataccaatgatccaaacggcgacatgttgtgacagcatagccaaagcagacgtcgaacgatcaacacgcccaaagtaatggctccgaagacatcgactctctacttaaacagcacccgcattcagtctcgtacgcacatggtttctctaagaagagaaatggatgtcaatatagattgcattgtcagaaagaataacgaatgtaatagcaacgggagccatgacaaaaagcggggtgatatctcgtcggcccatttgcatgaagccgaacgtcattcagatgaaaagattatactaaaacaaagcttttgccaagaagcactcgataaggaggcccatatattcattgatgatatacctattcgaaatggcttggatgacctgaaggtaatgattgtctgcagacatgaaatctagcgatctcattacttactgacactttaagtgtccaaaggtttagcaagcttatcgtttataggcttaaagttgatttgaacaaatatattttcaaagcagcaatagtaaatacatatatcaaatacttttaaaccagtatcattcctcccaattccgaattatgaacagagattttatttctaaaatgtttgaccctgttttaatgcttatctgttaatgaatttattgattttcaagatgtaatcttaacaaggaaagcttaaaaacataaaatttgatgaaatggtttggtccatatattttaatgtttgaagattatttcatggaaatgtgaaggcgcttgaaatggtcaattcgcttagttcaattttggcatgctctttccagcatttcgtccggcatctc

SEQ ID NO: 2775 - protein, 1081 aa, DROSOPHILA
MDSLNDIIDHQTFSQELVEDASEFITVGHHSERPSQSSQQPNSGQDLTMSMQDIISCPVKHRTCSASGSGSASGSDSVVMVIDALGQGNRQSAYQIVPQQLQQRNMPLPFGLLERDRQHMQHGREVNTSPVDFVSSDINLDGLTVDADVSQTDHSQETAVKQEQKLLIVQSKSQDQSHRRIRMLVDVSSVNSGLGVHVDDMDEISSDGVGCDDEGVTLSHQHLLEQEEQFGLTSHHPHLQPHTQIIHGLHQRSTHSEMGLDNGHGEVLSVIVHSQDSDKEDCEENDDGDAEGDLENEDDDERDSRSREQLLSHSSYQTLTSVNDRLSSPGFSQTSYATLTPIQPLPPISTMSEKFAYSGHISGGDSGDTDVNGDGAGGGVVEVGEVTNQSSEATGTVSISSGNATSSVCSNNDCSSFSALSMPIGSGHLGLGVLSGVQSPFSSYEKLSSMISPPPNNYLVSCDLHSSVSGRVINSSHLQLSHNGNKKESGTHEHTHRPADVNGGKFSYTGHISRGDSVDNDVNGEKFSFSDHISGGDSGDEDANREKFIYSDHISEGENGPDVNSGTNWLQMHSEREVRLHMPVPAELEARFHISSERRTRLNVPPARGSLSRHLAPNAPICPADWKADDWKHSNAGVVSLTADMPVVVSLTPTPPPLRDDSVSGIKQNERSSPGHREQYFLDKSQEPSSVVADQCSPGINGTPQSVCVIHQQSPSALGNGFQSSSQQAKVSSCASPKGTVSSGGAVSNRIANSSDMEEINTKDLAQRISAELKRYSIPQAIFAQRVLCRSQGTLSDLLRNPKPWSKLKSGRETFRRMYKWLQEPEFQRMSALRMAAAQIPQRAPLSSGMSLGSATGPSGSTGTIPTDLDPHGGPTMIQNPLTNESDSSPASTPVTSVLVGSVVSCRRKEEPQIEQMPQPKKPRLVFTDLQRRTLQAIFKETKRPSKEMQVTIARQLGLEPTTVGNFFMNARRRSMDKWRDDDSKSTMHVAHSRQQQDEQQKDNAHTHSQSQIQDQNHSQNQAIHNSMSQDPYSNLHTTAMSPLGAFDEDADMDLELESHDFDLVDPDEHGDTNDPNGDML

SEQ ID NO: 2776 - DNA, 3658 bp, DROSOPHILA
gcggtcgcgtccgatggaggcggagggggcggggcgtccggcaacggtggcggaaccgacggttgcggaggtagagcggcagtgggagccactgcggcggcggtttgccattggccccacataccgtgtccactggattgattagcctattagcgaataacacacttgtaccgctcggttgggctttcacaaaatccggcggattggctccgttccgtttaaaatcgtccacctttcactaattcagtttgctatctgaacgaattgataatgaaaacttcgccatatttggcttgaaaactagagatggaactgtcagctaaatgggccgggcagtgtgaccgtgctgcgagtgtgcatccatatatcgcaagcaccctagaatattccattgccaattaataaaataatttgaatgtaatccaatgcacttacaagcctacaaattgaaaaattagcaaagatagcttgcttaagtgattgattcgtagaagttgtattgataatacgaaaatatgttaaaaaaaaaataaacaagaagatcaaactggcagaccttctaatgagctttttgaaaatctgcagcaaattaatagatttctcagaccaggcattttactacattttttcatatctgtaaatatgttaatataagttaagtcaagtgatattttgtttaactgatgttttttgtagtttgttaagtaaatttggtaattttccaacagtccggccgaaagtctaagtagtcaggaccgatatctccctgtgataataatataatatctcatagaaatatattttaacatgaattaattttaacaattttattgagagctagcaataaaattttagggaacgcattcatttagctttgcctaactcttaaaaatgtaaaatttaattaactaatattaaaatcacaaattcataaacactttttggtatttttagcataccctaacgtaacggtcacagctcactacagccacactaatcgcgacacgtgcagaaattgttattttttgccgtcctttgtttttcatgtgaaaattagcactgaaaatggccgaaacgagcgaaaagatcaagttccttgtggcggacaccacagcctttataaacgccgtgcccctgaatgtaagtcacgcacaatttgcccattcgagccatctaaagccgccactaatcccctacaggaatacgcggagcaggtgctcaccgtgccggatgtggtggccgaagtgcgcaacaagcgccagattcgccgcctctgcgttctgcccttcgacctccaggtgcgcgagcctcgtccggagagcattaaacactgcgtggagttcgccaagaaaacgggtgactacgcgagtctctcggggatcgatctgaaagtgatctcgctcacctacgaactggaagcagacaacgtgggcactgatcacctgcgccaggagcctgtgatggcgcagaccattgcgtccaaggataaacccgaggagatgcaggatgctaataacaagagactggtcggttggtacatgcccgagggcgaagaggaggaggaggaggattccgaggaggaagatgattactcccaggaagaggacgatgctgaaggcgatgagcaggaggcaaatgaatccccagacactgttaaagccgccatcgaagcccaattggccggcaaggaaccatttgccagcgagaccatcgaaaaggaggaggaccaagaccaggagcccagtcaggaggagctggacaagctgttcgagcagctcaaatgcgcacccagtgccgaggaagagaaagagctctcggaactgctcgtttcccagccggccgaagtagatgaggaggtatccgagccacaagaagccaaacagagccaaaatctcgacgaggatgtgggtgacgatggctggatcacgcattcaaacatcaagaaggccaagaaagcgctcgagggcaaagtggaaacggatgaagtgccgcccgtcgcctgcatgaccaccgattatgcgctgcagaacgtgctcaagcagctaaatctccacctggccgccctcaatggccggatcatcaagcagttgcgcacatatatactccgctgctacgcgtgctacaagaccaccagcatcatgaccaaggtgttttgccccaattgtggcaacaagacgctgaaacgtgtggccgtcagtctggacgagaacggtcgccaggtgattcacatcaatacgcgccgtccgctgaccaataagtacaagaatcagagcctgcctcgcttccagggcggcaagcattcgagaaatccgatcctgttcgaggatcagccgatgcccaggcagatgccgtcgcgcgttgccaagaccaagacgaacgctctggatcaggactacacggccggattctcgcccttcgtgctgcgcgacgtggactccaagtccgccatgctgcgctccaagggcaacctcaaggagtgggccaggaataacaacttcgaggaggatcgccggcgcaagaactacaatcgcttgtacaagtagattactctgggcagtaaggggctagttgttcattagctttccaatcgtagactttatataaatttatataatatataaaataaaacacaagggagaacctgaaactttgtaaaatgtaaacagagaagcttttcaagtagttacaagcgttatttttaaacgaaataaatcttttttttttgtatgtaaggtatggagtttttcttggattctaattccaatatttatttacaaagttaaaagctagaaaatctttttttttgttatgaactagcattaagtttcatttttttaacgtaattaaatctgtttttaattgaacattgtgtttgctgcttctggaaatcaaaatagtcgctgtttcaacaaagaattcatttcaaatgatggatggaaaccagacgttgcggctcaagactccatcgtttattgggaaaccgcataaatgcagaaatcacagcttgacgcacagctcgttgcccggataaacgggcagattcagttcgtatttgcgctgcagggcgggcggcacgaatctgccgcccaagtagtgatgttcgccgcgaaattggcgggcacagagtttcggcgcagtgagggaaatgagcagagccggctccacgtcgcattcagtcagcttgcccttctccacatcccagccgctgggaatgtccacgctgcaaggaggaagcaacattagcttagaattagctagtataacgtaacgaatctcacctggcaattggcagtttggtctgctgcattagttccacgacggcgacaaagtccgctcgcaccggcggcttgaagctgaatccgaagagcgcatccagaatgagatcatagtcacgggcggcactctccaccgacggacactccttcacgtcgcagatgtccatctgttggcactggtggctgaggttctcgaagagcggcttggccgtcggcttgggatagtagatggtgggtgtgtagcccatgagggcgaggtggcgggcggcaaccaagccgtcgcctccattgtttcctggtccacagcaaacgagaattcgtggatgcttctctgccgggaagcatttggccacagcatgggcgcagctcaagcccgccagctc

SEQ ID NO: 2777 - DNA, 1602 bp, DROSOPHILA
cgacacgtgcagaaattgttattttttgccgtcctttgtttttcatgtgaaaattagcactgaaaatggccgaaacgagcgaaaagatcaagttccttgtggcggacaccacagcctttataaacgccgtgcccctgaatcaggaatacgcggagcaggtgctcaccgtgccggatgtggtggccgaagtgcgcaacaagcgccagattcgccgcctctgcgttctgcccttcgacctccaggtgcgcgagcctcgtccggagagcattaaacactgcgtggagttcgccaagaaaacgggtgactacgcgagtctctcggggatcgatctgaaagtgatctcgctcacctacgaactggaagcagacaacgtgggcactgatcacctgcgccaggagcctgtgatggcgcagaccattgcgtccaaggataaacccgaggagatgcaggatgctaataacaagagactggtcggttggtacatgcccgagggcgaagaggaggaggaggaggattccgaggaggaagatgattactcccaggaagaggacgatgctgaaggcgatgagcaggaggcaaatgaatccccagacactgttaaagccgccatcgaagcccaattggccggcaaggaaccatttgccagcgagaccatcgaaaaggaggaggaccaagaccaggagcccagtcaggaggagctggacaagctgttcgagcagctcaaatgcgcacccagtgccgaggaagagaaagagctctcggaactgctcgtttcccagccggccgaagtagatgaggaggtatccgagccacaagaagccaaacagagccaaaatctcgacgaggatgtgggtgacgatggctggatcacgcattcaaacatcaagaaggccaagaaagcgctcgagggcaaagtggaaacggatgaagtgccgcccgtcgcctgcatgaccaccgattatgcgctgcagaacgtgctcaagcagctaaatctccacctggccgccctcaatggccggatcatcaagcagttgcgcacatatatactccgctgctacgcgtgctacaagaccaccagcatcatgaccaaggtgttttgccccaattgtggcaacaagacgctgaaacgtgtggccgtcagtctggacgagaacggtcgccaggtgattcacatcaatacgcgccgtccgctgaccaataagtacaagaatcagagcctgcctcgcttccagggcggcaagcattcgagaaatccgatcctgttcgaggatcagccgatgcccaggcagatgccgtcgcgcgttgccaagaccaagacgaacgctctggatcaggactacacggccggattctcgcccttcgtgctgcgcgacgtggactccaagtccgccatgctgcgctccaagggcaacctcaaggagtgggccaggaataacaacttcgaggaggatcgccggcgcaagaactacaatcgcttgtacaagtagattactctgggcagtaaggggctagttgttcattagctttccaatcgtagactttatataaatttatataatatataaaataaaacacaagggagaacctgaaactttgtaaaat

SEQ ID NO: 2778 - protein, 473 aa, DROSOPHILA
MAETSEKIKFLVADTTAFINAVPLNQEYAEQVLTVPDVVAEVRNKRQIRRLCVLPFDLQVREPRPESIKHCVEFAKKTGDYASLSGIDLKVISLTYELEADNVGTDHLRQEPVMAQTIASKDKPEEMQDANNKRLVGWYMPEGEEEEEEDSEEEDDYSQEEDDAEGDEQEANESPDTVKAAIEAQLAGKEPFASETIEKEEDQDQEPSQEELDKLFEQLKCAPSAEEEKELSELLVSQPAEVDEEVSEPQEAKQSQNLDEDVGDDGWITHSNIKKAKKALEGKVETDEVPPVACMTTDYALQNVLKQLNLHLAALNGRIIKQLRTYILRCYACYKTTSIMTKVFCPNCGNKTLKRVAVSLDENGRQVIHINTRRPLTNKYKNQSLPRFQGGKHSRNPILFEDQPMPRQMPSRVAKTKTNALDQDYTAGFSPFVLRDVDSKSAMLRSKGNLKEWARNNNFEEDRRRKNYNRLYK

SEQ ID NO: 2779 - DNA, 4406 bp, DROSOPHILA
aaaaatacgaaagcaacttttcctggttttcatttcgacggggctgctgggggagaaatcaatcagtggaacagatctaattgctcaataaagaatcccttttttattgttttgcgtttctcacaaatttcttacaaacatttttcactttttctaatatacatattaggtgtatatgcagtgtatatatatatataattctcgatctgatatatatgccagcgtgtatataattgaataaatggaataccttgcactgctgttccattaacgctctcgggacgaaacgaaagtacaaaagtataatcataatcataagcgggggccataaacattaacaaattaagtacgtaaacaatacgagaggttaaatcgatcacttattgcccagctgtcgtagctcaaaaaagggattagtcaggaaagtcgttaacattaaaatgtacatggatttcacgcgaaaaagttatagaaatgtaatgcaaatatgctagaaaccattatacaagtcaattcccattaaatatattatcaattccgaattagaagtatacatttagagaactaatcgcgtcttttgagctactgcagtctgattgacaggcgttcgaagtatttaaaataaattcaagtaactggctacaaaaaatgttgatggggataaattcttggggcaagattagttttggggattagagagtcatgttggataggtgaacggagagaatactcctgcggctaaagcgagtgctaaatactatgtcgaagactttaaatgctaacgaaaagcaaccaagaattccgctcgagctaaactaagcaatacaatggtaatagtaactttgtgttctcctttccgtatccttttgtgttttccgtgtgtgtgtgtgtcaacaattgttttaaatagttttacttcttcgcaaagacaatactttcgttggcgttgttgtttcttctaattgctggtgttattgtccgcatccgcccgccttgcgtcctagtagcggtagtagttgggcttgaaaggaccggccttgttcagtcccatgtacttggcctgctcgtcgctcagctccgtcaaatgggcatcgaaggtgggcaggtgcaggctggcaacatactcgtccatcttcttgggcagcaagtagacatccgacttgtagcgtccgggcggggcattgaaaagctcgatcagggccagggcctgggtggccgaggtgatagacacggcgaacgaggggatgctggagcagctcagattgaccagcctgccctcggccagaagaatgatgtacttgccctccggccagataatgtgatccacctgggagcgcaccttctcccaggtcaagtccggtgtgcgcaggccattcacatcgatttccgtgttcgagtggcccatgttgcatacgatgcagccactcttcatcttgtccatgtgctcgcgcaccaccacgttcttgttgccggtcgccgtcaccacaatgtctacgttgcggatcacctcgttcagcttgaccacacggaagccatccatactggcctgcagggcgcaaatgggatcgatctctgtgatgtacacaatgcagccctacgattggagattgaaaaggtgacaaaggtatatcatactaatggttgtgggtgccatttacctgcccctttagagcctgagcacatcccttgcccacatcgccgtagccacagaccacgacctgcttgccaccgaacatcacgtccgtggagcgcttgaggctgtccaggatggattccttgcagctgtagaggttgtcaaatttggtctttgtcaccgaatcgttgacattcatcgccggcactgtcagcttgccggccttagagagctgatagagacggtgcactccggtgacgctctcctcgacgattcccttgaccaacttgaacatggtcgggtacttttttagcatcaagtgcgtggcatcgccgccatcgtccaggatcatgtttggctgccagttctcggcgttaacgcagcgatctatgcaccaccagaagtcctcttccgtctcgccgcgccaggcaaagatcgggattccggattcggccaaagcagcagccacttcgttctaaaaataataagcaacgatattgagttgttttaataatgacagtccttgaaggctaataaaatgattgtcaaacaggtaaaaccctcgagagttggcctgataaatcgagtcaccctaatgcggcgtaaacatttgctaatatctgacttatatcgagctgataacgcatcgggctccattctcgctaagcacggcactcgtagcttggctgataagtcccagccgatacaggtgaatcagcgtgacaggctgtcgggggccgtgggcgataaaagctggcacggatgggtgcataaatgatcggggaagggcgctcgccctcgcactcgcatcgcttcattagagaagccataaattgtttagcgtcagcagactcgtgataattgcatcagccacgccgcaggaataggcaaacagatcgagtaaccgcagccgatccaatgctggaactaaaactgcgtccgtaacttccactcccaatggtatggcgacccaattcagggcacatcaattactcagcgattgccaaacacttgagccgcgggcgcttaattgattaacatggcttgattgatcatttgtttgcgtcgcctggcgtgacaacaattgtctccaagcgaccgagcagatcaagtgaccgagcacgcatatgcatatgaatttaaataaatataggaaaatgagttaagatatctcttaagagattccattaaatgcattaagcagcctatgaatacgtaagaaccctatgacattttcatacgacatctcacctgcgtggagtagatgttgcaggcggcccagcgcacgctggcgcccagttccaccagcgtctcgatgagcacggcagtctgggcgttgatgtgtgtgcaacccacgatcttggcatccttcagaggcttgtcctcggccgcccgcttcttcagcgctatgatgcccggcatctcctgctccgcaatctcgatctccctgcgcccaaatgcatgctgggcgcctatgttccttacacagaaatcggagctgcctttggagttcttttggaccttctccctgggcggcacgtcgtcgccatcctcgctgctgcccgtgtagctggcggagctgaaggaatccgttgaggaggcactaagcgagcggctcctgtaccgacttgtcttcttcagagccgaggactgcttggtggccggcggaggaaccaccacgctggcatcctgcggcgccggtccagcctgctgctgcttgtcgccgcctccgaatccaggatcaactaccacagtgtctgccaggttgttcatggtggaagtagagggtaatctggggatttccttactatcccttaaattggctccttgctctagctcctagtgttccaccttctgcgactccagagcttgcaatccttttccgctgctcctttgaatgggcgccttggatgttatgtaaagtctgaaatccaagcaggatgcgctgcaaatggctagtggtgtggcctgggtctatacgaactgcacaatcacgtgatttatcgacgttgtggagaccacaaattgctaaattaattgtttttagtgcgagtctcctttgtttcacctctccactattgtttttgttcttcttcttcttttgcgaatggggggctacactttggatccggggcttgatgggagtttccggagaggggatgatgatgcagccgtcggctttcgggcgacgttgtttgtgtggcgaccaagtgggggatcgtttggcgatcgcttattgaatttgattttatccggagaaaagagaactaaaccgaaccgaggacagtaagcgagacacgcgaaaataccaaaagcagaaggcgttagtgctattctgcaagtgtggtaagttcccactgaagaaaggccaaagtaacgactttttaactgaaatcgtctaaaaattaatttttataatttcttaccattaattatgtgtttattttttaatgagcaaagtaaataaagtgtgatttacaactcctcagctgcaagtcttttaaatctggtagctggataatttaatgagtcaaaaagaaattggcaaagtattcgaggtttattaaaaacaaatagttaacacatttggcctacatatcctcctgtaggtagccgcacagctcgtagtcgtccgccgtgttgaccaagtgcgcttccctaagaaggccctccttgtaggtctgtctcttgacaatcaaacgcgacaattcctccggtgcaagtggtccttgcttggcgtgtttctggatgaagtccgccgccagttgtcgat

SEQ ID NO: 2780 - DNA, 1566 bp, DROSOPHILA
atgaacaacctggcagacactgtggtagttgatcctggattcggaggcggcgacaagcagcagcaggctggaccggcgccgcaggatgccagcgtggtggttcctccgccggccaccaagcagtcctcggctctgaagaagacaagtcggtacaggagccgctcgcttagtgcctcctcaacggattccttcagctccgccagctacacgggcagcagcgaggatggcgacgacgtgccgcccagggagaaggtccaaaagaactccaaaggcagctccgatttctgtgtaaggaacataggcgcccagcatgcatttgggcgcagggagatcgagattgcggagcaggagatgccgggcatcatagcgctgaagaagcgggcggccgaggacaagcctctgaaggatgccaagatcgtgggttgcacacacatcaacgcccagactgccgtgctcatcgagacgctggtggaactgggcgccagcgtgcgctgggccgcctgcaacatctactccacgcagaacgaagtggctgctgctttggccgaatccggaatcccgatctttgcctggcgcggcgagacggaagaggacttctggtggtgcatagatcgctgcgttaacgccgagaactggcagccaaacatgatcctggacgatggcggcgatgccacgcacttgatgctaaaaaagtacccgaccatgttcaagttggtcaagggaatcgtcgaggagagcgtcaccggagtgcaccgtctctatcagctctctaaggccggcaagctgacagtgccggcgatgaatgtcaacgattcggtgacaaagaccaaatttgacaacctctacagctgcaaggaatccatcctggacagcctcaagcgctccacggacgtgatgttcggtggcaagcaggtcgtggtctgtggctacggcgatgtgggcaagggatgtgctcaggctctaaaggggcagggctgcattgtgtacatcacagagatcgatcccatttgcgccctgcaggccagtatggatggcttccgtgtggtcaagctgaacgaggtgatccgcaacgtagacattgtggtgacggcgaccggcaacaagaacgtggtggtgcgcgagcacatggacaagatgaagagtggctgcatcgtatgcaacatgggccactcgaacacggaaatcgatgtgaatggcctgcgcacaccggacttgacctgggagaaggtgcgctcccaggtggatcacattatctggccggagggcaagtacatcattcttctggccgagggcaggctggtcaatctgagctgctccagcatcccctcgttcgccgtgtctatcacctcggccacccaggccctggccctgatcgagcttttcaatgccccgcccggacgctacaagtcggatgtctacttgctgcccaagaagatggacgagtatgttgccagcctgcacctgcccaccttcgatgcccatttgacggagctgagcgacgagcaggccaagtacatgggactgaacaaggccggtcctttcaagcccaactactaccgctactag

SEQ ID NO: 2781 - protein, 521 aa, DROSOPHILA
MNNLADTVVVDPGFGGGDKQQQAGPAPQDASVVVPPPATKQSSALKKTSRYRSRSLSASSTDSFSSASYTGSSEDGDDVPPREKVQKNSKGSSDFCVRNIGAQHAFGRREIEIAEQEMPGIIALKKRAAEDKPLKDAKIVGCTHINAQTAVLIETLVELGASVRWAACNIYSTQNEVAAALAESGIPIFAWRGETEEDFWWCIDRCVNAENWQPNMILDDGGDATHLMLKKYPTMFKLVKGIVEESVTGVHRLYQLSKAGKLTVPAMNVNDSVTKTKFDNLYSCKESILDSLKRSTDVMFGGKQVVVCGYGDVGKGCAQALKGQGCIVYITEIDPICALQASMDGFRVVKLNEVIRNVDIVVTATGNKNVVVREHMDKMKSGCIVCNMGHSNTEIDVNGLRTPDLTWEKVRSQVDHIIWPEGKYIILLAEGRLVNLSCSSIPSFAVSITSATQALALIELFNAPPGRYKSDVYLLPKKMDEYVASLHLPTFDAHLTELSDEQAKYMGLNKAGPFKPNYYRY

SEQ ID NO: 2782 - DNA, 3300 bp, DROSOPHILA
gtgaaatatccttaaatcggaaattaagaaaactctatgaatgcaaattccagatacataaggctatatatagttttatatttaagcttcaagtttcatatgaatgctgatgcgaatcttattatgaaagcgcacgtcttgccagagtacagatggcatagttcttctgcagataaataatcagttaataaacaccaactggttattggcggatcaaatgataatcaaccgccgatgattaccttcacctttttcactccacgcccacaaattagccagatcgattattgtcaatcaagtggcgtgatctcgacgaagtgctctctacccatcaatttccataacattcataactaatggaaaccataattacccatacttggaatcaatttgaaagtgaatgtgttctgatcagaaatgccaatcaactaattaattgtaagataaaacagaataatcaaattaaagatcaatctatgttttcagttcctttctgtgcagtaaaaaaacgaaatatttgaatttttataattctctacattttgtatttatagcattgtcagccgtttcagcttcaaacttatagtatacacaaaattattataatacatgtgtttttttttattatttttttttacattttgttcgtttttcttcatcttttcaggttggttcttcttcgtgggcgtgtggcaggatgggcgtttgttcctcactcgatgttttcattatttacaattaaagagaaggttgattaacaaacaaaagagagaattgcgcgaaagctgagacagagacggcaatgtgtgtgtgtgtgtgtgagggagacagaggctgccgggaaagtccggggaatccacggcaggacatgatggacatgactgtggtactgagtattttagcaggcttcgtcagtggatcgatcagccgttttgtgaggtcgtcaacgtgcttaataaattacagaagagtggtgttagcggtgcaggtggtgcttcaggtggtgcatccagcggactgctccacttccttagtagtgggccacatgcgcgtgagcgttgtgggtggcgtatccgtaggcgggcacctgatgcgccagggatccggcgtagggcacggcgggagcggcggccacatggtgggcaatggctggggcataggccggagcggcatggaccacggcgggagcggcgtgggcaaccacagcgggagcggcgtggtgcacagtggggccggtcttgtggacgacggcgttgaagccattgtggtcatcggcggtgtactccacggtgcgcaccgaaccatcgggctccaccagagagtaggatcccttgacgacatcaccatcacgcacttcgtgctgcgacttcacgtctccggtgtgagagtcagccactccgtagttgtagtggtacttggggtaggcctgcggattggcgtaaagattccatgagaagagtacgggcctgctaggattgggtgctaattttatgtgcatgccacacgccactcgaagcagctggccatgctaatgaagctagcgtgggaaaatggctaaatggcaaatgccacagtgaccctgggccaccagcatccacagaggagtgggtgagaggttgtgcggactgatggtgtcagttttagggcatattaagtataattttatgattgcatgaacagccggtaggctgtataactttttcgggcttacaggtcgtatgagtaatgtttgcgggagggattacgtgtcgtataagtaatttttatgagtcaagatgcatgcatttcttagctctggatggtattgtagtcgtttgattttaaaagagcaataaactcatgatgcacattttcaattaagaggaagcttttcaaaatgtatgttttaaacaagtcaaatggattccaatagtaggacattgattttctttaagagttagtaatcctcatatgcgctactttgaaagttaatcctttttgggttatcttgcccacttacatggtaatcgattccctcgtcgtggtgaccatggccggcatagatggccggggcggcggcgtagagaccagcaccatgtccgtggaggactccggcggaggcggcgctcaggacggccaggcagatgagggactagatcacaggggataggggtttgttttattagtttgctatttcgattggatcacagggcacttttggctgtcacagggctgtcctgttcactcactttgaagaatgccattgtttggatttttgggattttgtttcttgcagacgcgagtgtgtgctgtacgttgagctggattcaactgataactagaaccaagaaggaagccgcttttatatacaagacaacgcccgagcggcccaaaccgagccgagtcacaaaaagccgaatgccagtcggtcagcaggggcaaaaacaaaactacaatgaaataccagccaaagccgagctttgcggagcgaagcccaagaagttgaggcccccacaacgcccctgcaacgcccccccttccccaccaacaattcacaattatttaatgcttttcagcgaaaaaaaacgagagtgaagttcagttcagatgtggagcgactgttggctggctgtggtttgtctttggaaattgtctgatttctgagataaccggcgatgtatgcaaatcgaagtcgaaataattgtgaaatggaagggaaaacctcacttaatgcgagttctatctgctgaaatcaatactcgtattaacatatcaaattggccattattaaggcgtattaattatgaaatcatgatcggaaaaaagttggctatctatatattaccatctcccatcacgatttaattgaaatggcctttgcaagctctaaactacctagcaaaaacaatcttcgcgcacgaataaaattagccgtaaacacaaatatttatgaaataaaaagacaatggctgaaataagttaaaattgcatttcggtgggcggcggtgttgcagccccctcctgaaaatccccatggtttttttctgttgcatgttgcaatttgttcgctcgtctgtttcgtgggcttcaagtcgaagttttctatgttctacgttttctgtgccttattttgcttgcagcgggcgtcgtctgtcaaatcttttggttaatgtgatagtacactgccaaaaatggtttgaggtattgtagattaatttcgaagtcttagtaaaacatcagtggtatcattccactaaaacgagctactgactcatgaaatcccataaatcttgagatatttttgcaatacttttaactaaa

SEQ ID NO: 2783 - DNA, 630 bp, DROSOPHILA
ctcaacgtacagcacacactcgcgtctgcaagaaacaaaatcccaaaaatccaaacaatggcattcttcaaatccctcatctgcctggccgtcctgagcgccgcctccgccggagtcctccacggacatggtgctggtctctacgccgccgccccggccatctatgccggccatggtcaccacgacgagggaatcgattaccatgcctaccccaagtaccactacaactacggagtggctgactctcacaccggagacgtgaagtcgcagcacgaagtgcgtgatggtgatgtcgtcaagggatcctactctctggtggagcccgatggttcggtgcgcaccgtggagtacaccgccgatgaccacaatggcttcaacgccgtcgtccacaagaccggccccactgtgcaccacgccgctcccgctgtggttgcccacgccgctcccgccgtggtccatgccgctccggcctatgccccagccattgcccaccatgtggccgccgctcccgccgtgccctacgccggatccctggcgcatcaggtgcccgcctacggatacgccacccacaacgctcacgcgcatgtggcccactactaaggaagtggagcagtccgctggatgcaccac

SEQ ID NO: 2784 - protein, 180 aa, DROSOPHILA
MAFFKSLICLAVLSAASAGVLHGHGAGLYAAAPAIYAGHGHHDEGIDYHAYPKYHYNYGVADSHTGDVKSQHEVRDGDVVKGSYSLVEPDGSVRTVEYTADDHNGFNAVVHKTGPTVHHAAPAVVAHAAPAVVHAAPAYAPAIAHHVAAAPAVPYAGSLAHQVPAYGYATHNAHAHVAHY

SEQ ID NO: 2785 - DNA, 26097 bp, DROSOPHILA
tcctatagaacctagaaccaagatatgttctaggtacctataaaccatccacgtatgcctaagcaaatatatttattctgtttcggtgcttttgtgttttattgaaagaaaattgaaataaatttcaagatttacttgagaaaatacataaatgtttttcattgtagctgaaagcctgaaatccagacagcacagcgtgactaaaaatagcgtaacggatttcgaacgctaatctattggaaattagttctcgaaagccaaacattcacattctccaaaaagaaattgaaaatagaacacccgctgggcgtacgtatgtcttaatatgtctgagaaaattcggttggcagctgaaaggctttcgatattttctgttttttctacaaactgactgcttgctgctatctgaacgattcgtgctagtttttgcgcacgttcgaagggggaaattgaagatgaaaaatagaatatgggaaatgtgtatctggcagatacaagatagcgcaccactggcatcgccacgaagcccgcggtgtgtgtgcgctagatgtgtcatccataatattttatgctaatattcaaatgaaaaatacaactttcacgctcgagcggaggcgggacaaatgtgcgttttgcacacggacccaaaactatcctactcatagatggggcacataatacctatgtgcatggctatattggtatatttaagtatatttacggacgacggctcgggtactgaaaatattattatgtgtgcttaaagtggccagctgtacataagcagccttatttataactcaactcgaggggctagagatcttctatacgatatgctacatttggttttgagtcacttccactttcactcaactcgctacagaaaatttttaaattttatttaatgcctgctgttgttgttgttgcttctgttgtcttggctgtgccagaaagaaaaatggtctataaatatttatgttgcaaaatacttgtaatgatttttattatttttcaattaaaaattgttttcatatttttgtgctgctttttcggttacgttttcgtgttagatatctttaatttaatcctttttttgtttattgtttttgctgcatttcactttttacattttgcaatggttagtaaatataactcgttcgtttgatagtttagaaaaatccttgaaagtttcgacaggctcgctctaaaatattcttcactcaaacttttacgactagtagttgatcatatatgtatatatagataggttgaggggtagtagtaactgtatgtaatacgtcagtaactcggggattaatagttaaagttcttctcggtcgttgttttgtttttgttcatttcatatattcttttttgagcattctttggagttggtttgttgatgttggttggtttgtttgtttgaacacggttcgcttacgtttggttttgctaggtttcgaactctggtttcggttttggcttagttttagtttaatccttacttttaacagtcagtttggctgaggattcaacctggccggtggacgaggttacgcgcacagtaaagatgcccgaatcctcctcgtaggtggtgccaatcaggagtacagcgctattgccatcgaagatcatctgaaagtatggaagaagggcatcagttttaagggcacgtacatatgtatatacaactctaccctgaccttgcaccctgctgaaagaaaaaggttgagaattgagaagcgcaacccacctggaagtccggtgtttcgggaatcagctgaccctcgcggaaccattggacgctggtggctttcactttgccggtcaccgtcgtcttaaactgagcgggcatgccctcggtgacagagacatccttgagggctgtgatagtgggcggggcgtcaaggttctcgattggtcgaaccttgagctgagcgctggtctgaatgctgcccagtttgttctcagccacgcacttgtaggtaccctcgtcctcggggaaggcctccgagatgaccaactggtagtactcgccttgccggctcatctggaagtagcgtgatggcttcacaaagttctcgccacgcatccagcgggcggtgggagtgggcttgccatccactcgacagcggaagataaccttgcttccctcctccacggtctggctcttaagctgctccacaatatgtggcgccttctcgctgcccggagtcgtaggtttctccggtttgctgggcgattgcacgatgcagtcaccatcgcagcgggcctctccagcggcattgacggccacacactcatagcgaccggaatcctcggcgaacggctcgatgataagtagagtgtgaacactgtcctcctccagcatcttgaacttgatgctcggctgaatcttcatgccgttcttaagccagtacacatccagtgggcgagtgcctgtaaccttggcatcgaagcgagccaactggccggtggccacagtagtgctctgtatggtggtcacgaaactaggtggctgaatgccaccctttccggcgcgacgacgttcctcgacaacaagattggcactgcactttgcagttcctccacggttttcggccacacacgagaagactgcggagtcctcgacgaacacttggcggatgatcagaattgacttgccgctgaaggtgtgaatctgcagatccggagagttttggatggggaaactctcacggtaccatttaaccgtaggattgggctctccttcgaattccacttcaaatttggcttgctcgttctcaaagacgcggcatggctggatctttttggtgaagaccggagccttggccggtttcacgggtccctgaacgacacgctcctgaatggttcccttatgctcaacctcggttgtttcggtggcggttatcttgcgggtaatctcaaggtcaccctggatctccttctgcacctgctgttgcttgttcatgtgaacttcgcgaccatggacggatgattcggatggttgggcaatacccttgggtggagcagcctgcacttcagtggtgctcgttttctcttgactagaatggatgcagtcattttgatccgttttagcttttaaggaatgtagtaggtactcacagattttcttcgtaagactgggccattcccttggcttgagaactgctcacaaccttctctccgggaatggcgtactgatgggtatcccttcgcaggttggtctccttcagcagctgttcagtttccagagtctgcagcttgttgtagtagtcctcgctcttcttggccttgacattttgctgccagtccggagtgggtggcttgtattgcttgggcttcaggtgctccacgcccttcaacgtgtgggagctctgttcggaaaggacctgcttacgctcatcgaataccttttccaactcgttctcctggcgctccttctgataggcagctagttcgtaatcgtaccaagctaaacaaaaatgcggtcattattaagtgccgaccagaactcattcatacaataattcttggtaaaggcagttatagctcaaacacatgcactttcggatgatccataagcgttagcaaataaactagcatgcattaagaacttaaaaattatttacaagtgggcgacttaagaaaaataatgctttataggcttagaaatgaaaggggctttcacagaggttcacaagctcttttggtttcttcagagggaacagcaaatgagtagagacagagagaaggtcaatgactagctggatgataaccagagtttaaaacagacggaaagtgcacacgcaaaactacgtcataaccatattaccccgggtccggcaatacttagggagccaacttccttggtttcctttgcgtgatttcctcttctgaagcctctcgctgactggagttcgacaatcggttcttttggaggatttttggggacttgggacatatcgggattgtttttttggaacttgggtatacttgtgcttgttgtttaaaatgttcaaactacttggaatgtggttatagtgaaataaacttgggtgctacggctacttaaacttgtgtggcgtattgtgtgttggaatgtttatatttacaatgcgtttttgtttgtgaaatagcatgtagtgtccatatttagtttttctcagttaaagactactgcattaaaaaatggttaacgctctaatagctgataaataagtagtgtttccagaatttctggggtgtcttcaaaattaaacttacgacgtggcgaattcttcagcacattgcgataatcgtccgatcgtgctacaaccttcagttcagtggtggcaatcgattcgcccacagagttgcgagcaatcacctctaccttgccagtgtcgtactgacgtgtcttcgggacatccaaatggaacataccatcgtttgtcagcttgtaacgagagccctgaaataacgattacctagtttcaagattgtttcaaaacgaaattccattaaaacttacatgaacgacagtgtgaccgttgataagccacataaccctcggacgtgggtggccggtgacacgaacacagaatctagctgggtcaccctcctccacagtctggggctccagtttgctcacaaacactggcttggttctgggcttggcatcgggatcaacctcatcgggtaccctaaagcgaaagaaaaataataataatgggtttataagaggacaatgtttattctcccgaaaatctgtgcgacattcggttttggttcatacttacacttgccatgaggcttccatttcgcggatgcggtcaatgctctgcatgtgagcgggcagctgggagtcatagacaattcctggctttccagaaaccttaatgatggcacgagtctcgtccttgccatacaagttggtggcacggcacacgtactctccgctgtcttcgggataaacccagccaaagttcattgccacataaccaaaatcgtaaatgggctggaagcggttctctgcagagagttacaaactgcttagacaacgttcgagttaagcaataaacaatcgtaatgcttactgtgcagcaatggcttgccattgaagaaccactcgaccttcatgttaggatctcccacgggagccaactggcattcgaatttggtgacggccatctcggtaagagtaagctgctccttgatttgggtgacaaagcgaggaggctgcttgcgatcaggatcgaatagatcatcctctgtcaaatggacttcggatgtatatttcttgatggtagcttccatttgggttagagcatctgaacgcttcatgccgcgaggaacttggttctggagtaagatggtagggagttctgaaaaaaaaaaacaaatattatattgaatgcgttaaatacaatgtctgtgtatcctaacttactcttgcaagacactgtagctctggtgcgatcctcgccgtagttgttaatggcacggcacacgtactctccagagtcctctccatagacatacagaatatccagggaaacaaagcccatgtcgaaaatatttctataacgatgtccagaaggcaagggcttgccattgcggtaccattcgacgcgcaggctgggatccgtcttgggttccacctggcattcaaagcgaacggcctcggcttcatcgacagtcacagaagtgatctgtgtggtgaactttggtggtccaaacacttcctcaaccacctttggcgcttctgggatgcgtcctcgctccagctccttcaacttttcggaggtcatgccctctggcaactgcgactcgtacacaatattgtgctttcccttgcaagtgacctttgcgctagttgtggcagtgccccacttgttggttgcccggcaagtatactcgcctgaatccctggcatagatgtagtccacatccaaagcaataaagccaaagtcgttgagctgatggaccctagatccagtagccataacatgaccattatagaaccactcaatgcgcatggttggatcgccgacaggctccacacggcagtcaaagtgaattggaccaccctcaggaacatccaaattgtcctttatttcctcggtgaatttcgggggattgggctgctcgtcttcagtcacaagctcctcacgcttatgcatggtctcctcaagtttctgcagactctcagtgccggtgcggaagttggagggcaactggggctccataacgatgccttggcgacccttaacctgcaatttgcaagagaccgtggcctcaccatgcttgttcgtggccttgcaagtgtacaatcccgaatcacgctgatagcaaccagcaatttcgaggattacaaagccaaaatcattgatggtcttgatacgagaaccagcccacaaggccttgccattgtggaaccaatccacacgcatcgatgggtcattaatcggctgcagacggcattcgaagtgagccagagcgttctcgccgataaccatatcgaagggagaggtgataaactctggtggcttgccagtatcatcatctggtacgaactcggtgctgcgggagcccaagccctccagttcggcaatgcgatcgatagttccctccatgcccttgggcagctgagattccatgatgatgctgcgcttaccctggatcttcatggtggccgtggtcaccgcctcaccatactcgttgattgcgcggcaagagtactcgccggagtcctcaggatacacaggagaaatctccaggatgacaaagccaaagtcgcagaaagtgcggaaacgagaaccggccttcaatggacgaccgttccagtaccactcgaccttcagtttgggatcatcggccggggtaatcctagcttcaaagtgggcattttcaccctcacgcagattttcgatgttttccagtggtacagtaaagacgggagccttgcccttggtctcttcggtggtctcttcgcgagtgcggaccatgctgtactccaggttggcgatcttctccaagccaccttccattcctcgaggcaactgggagtccaaaatgaggcttgacttcgaggcgcacttgagcgaagccctagtaacatcctctccatacttgttacgagccctggcctcgtatacaccagagttctcttcgtagcagtacagaatgtccagaataacaataccgaagtcgtggaaggtgcggaagcggtgaccatggggtagtttcttgccgttgaagtaccattccaccaccaaatcaggatcggtgattggagtcaaacgtgcctcgaaatgagcagactgtccctccaccagcttagttacatcgacgatctgggtgatgaacttggggggctcagcgaccagaggagccgaggtatctgcctgttgtccttgtgggcactcaagctccctaatcctctgcagtgaatccggctgcaagctatcatagaacactccgccacgtcctccacaattgagggtggtacgggtaaagtcctcaccgtacttgttccaggctctgcaaacgtactctccactgtcatgatcctgcagataggaaatatccaaaacgacgtatccaaaatcggaaaccgtcttgatgcggttggagtgacgcatcagcttgccattgtgataccactccaccttcagatccggatcgttgactggaatcagagtgcactcgaagtgagcggactgtccgtccttcaggccctccagcggctgaatgtgggacgtgaagcgcggcttctggcccctcggcttgtccacgcactccagattgcagcttatttcagcagttccatgcttgttggtggcgcggcaagtgtaggtgccggtgtcttcgatcttggtgccaagaacctccagggcaaccgtgccaaaagcgtagatggtacgcacacgatggctggcctccaaaaccttgccgttgtagaaccattctatgaccatgctctggtcaccaacaggaatgagattggcctcaaagtgagccaattcaccctccccgatgtctgcaatattaacgaattcagtggtgaagcgtggtgggatgccaagatctggctgttctggcttagagccgtccttgcgcagggagtcttcaaggtcctggatttgctcaaggccttcagctcccttcgggtgctgagttgactcgatgatgttctccttgctcgaacagaagatggtggtggaggtaaaggcctctccagccttgttgtacgctttgcaagtgtagataccctgatcgcgcgcatatacctcgatcatatccatggtaacgaaaccaaattcactggtcatcttgaagcgagaaccatggttcagcattttgccattaaagtaccactctataaacaggttgggatcctccttgggctccacgttggcttccaaatgaatgggttgggcctccgacaaatggaactcggcctgcagtggcttcgtccatactggtggtggatactgtgtctcgggctttgtcgttttgctggtgtagcgattggccagctcctcctcggtttcctgcacagcctcaagaccagcctctccctgcggatgctgggtgtctaggaacatggtcttgccaccagtgcacttaagagtgccagaggtagttgcagatcccttgctgttagtagccttacatgtgtaaacaccgctgttctcagcataagaattggtcagatccaaagcgcagtagccaaaatcgtagatggacttaaatttggcagcggcctgcagcggttgtccattgtagaaccactcgatggacatggtaggatcacgagccggttccacgttgcactcgaagcgtacattgtcgctctccttgcactcaatgttgttaagatgagtaataaacacaggagtctcataagtgggctctggagcctctggtcgtccctccttgggcgcctcaagctctccaatgcgaggcaacgaatctgggtgcagagactcggcctgaagccaatggcgatcttcgatcttaagagatgaggttgagacagcctcgccaacctggttagtagccttgcaggtgtaaatagcggagtcatcagcacgcaatccgttgatggacagtgtaactagtccaaagtcaaaggtactgcgaattcgggagccagtggttagagaaataccattcttaaaccactcaatgcggaggttgggatccgcgcggggttcaacttgggcttccaaaaggacgtgctgaccctcatgcagcttgtcgtagctctgcagatgcgtggtgaagaccggagcttgttggggtgtcgagtcaacaaacatctctggtacacgattcatggcagcctccttcagtcgaatagcctcccaagactccggaatcaaaggctgaccatcaatattcgacttggtcttaaccttcatggcagtagaagatacagcctcaccggcggcgttgtaagcacggcacatgtagacaccggcatcctctggtaccactgcagtaatgtccagggtgacgaatccaaagtcgtgtgtggtgcgcaggcgagagcccatttgaagctccacgccgttgataaaccactcaaacttcagagaaggatctcccacaggcacgactcgtgcttcgaagtgtgcatgagtaccctcccacaactccgaaggtccagtgagcagttgagtgaagatgggcttctcaaacaggcgctctggttcagtggggcgtggtgccagtggtttctccagttgatggatgcgactgatactgtccggatgctgagtatccatttggatgctggcctcagataccacgcgcatagaggcggtggttactgcctcacccagtggattgacggcgcggcacatgtacacgccctcatcctccttgcgaatatgtgagatgtcgagggacacaaaaccgaaatcgtgctgcttggtgatacgggagctatcttcaatgatcttttcgttgcggtaccactcgaccttcagattgggatctcccactggaatcaagcgcgcctcgaagtgagccgtctgatgttcattgattctgtcgatgttctgaagaggttgggtgaacactgggcgctggcgagtgccgggggtttcaggctcctggcgctgatgcggcgcagtcgattccagcttgcgaatcttctccagtccctcgggatgctgggtgtccgaaatgatggtgccacgcggaatgacgcgcagattcgtggaggacacagcttggcccaaagcgttaacagcacgcacagaatattctccggcgtcctcggccacagcatgagtaatatccaaagacacgtatccaaaatcgaaggtgatgtggaagcgagaagcagacggcagaggcttgccattgtgatagaactcaatgcgcaagttaggatcgtgaactggagcgacctgggcctcgaagtgagcggtctgaccctcgtagatctcagtggaaccgcgaagttcggcggtgaaatgaggtggactgatcggagcgtctccaacctcggtacgtgcattcggcaccttagactccagcttttgaatcttttccagagcatcgggatgctgggtatccaggatcatgctgcgtcggtttaacacgcgcacattgcaggtgtttacagcctcacccagctgattggtggccttacaaatgtaggtgccggtatcctcgccatagacgtaaagaatgtccaaagcgacgtaaccaaagtcgtgggtagtgcggtaacggtgaccggtgggcagctgcttgccattgcagaaccattcaatctttaggttggggtcgttgatcggttccactcggcactccaagtgggcgtgctcgccctccttcaagtgttctaggttgcttagcggtgtgaggaaaatgggtttctggcccttctcctccacgacgggcttaggaggaggcgcatatgtttccagttgtcggatcttctctaaacgctgagcatccaaggtgtccagatcgagtgtcttgtttgctgttaaagaaaaaaagtttgaaagtgggttagtgaattacgaacaggttatttttattttttttttttttttgcattacctgttacgtttacagcacaagtcgtgacagcttctccaatagcgttcttggccttgcacatgtaggtgccggtgtcttcggcatgggcatacaaaatatctaatgccacgaagccaaaatcgtaggtggtcttgaagcggtgaccagtctgtatgggcctaccgttgcagtaccactccaccttcatggtaggatcattcacaggaattaatgtggcctccaggtggacgggagctccctcgttgaccttggcattacgcagagggcggccgaactgaggacgctcggcatggaactgttcctcgtccgttttcctctggaatcgcgaagtatcttccagatgctggatcttagtcagagcctcctcgtgctgagtctcgtgaatgatggaagagcgtgaggtgacgttgagcacaatcgagttgatggcttcaccgaggttgttggtgactcggcaagtgtactcgccgctgtcctcagcatagacagtgaggatgtctaaagccgcaaatccaaagtcgtacgtggtgcggaagcgatgaccagtgctaagtggcttaccattatggaaccactccaccttgaggttgggatctgggtagggttcaatgcggcactcgtagtgggcactttgaccctcaactaggttgctgggtccaataagcttggtaacaaataccggggcggtggtcaccgtgtactcctcctcctccctgcgctggtacctgctgtgatcctccaactgatggatcttgtgcatggcggcttcgtgctgggtctccagttgaatggaggtcttagattgcacaatgagcgaggcagaggtaaccgcttgacccagctcgttgacggcccgacaggtgtaggttccagagtcttcgggattcacatacttcatgttgagagccacataaccaaaatcatgcatggtggtagtgcggttggaggcttcaataggttgcccgtttcgcaaccactcaaccgttaatttcggatctcccactggaatcaagcgagcctcaaagtgcacagcttggttttcagccacacgcacatcccttaccggcatggtgaagacaggtgcctgggacacgaattcgtcctgaacgctgatgcgctgacgcttggagccatcctccaaatgctgcagacgtggcagagctgtttcatgctgggactccaggtagatggacttctttgtgtgcacaacagctacagcagaggtaatggcctcacccacagcgttataggcgcggcatgtataagttccggcatcttcgggcagagtggacataatatccaaggccacaaagccgaagttattggtctcagtgaaacgagaaccagacttaagtggaagattgttatggtaccattccacacgcattgagggatcagaaacaggaatcagacggcattcaaagtgggccctctggttctccttgatctcaacatttttcagtgatgtagtgaacaccggagcctgcttggtactttcatcgatttcctcacgtcgggtatagcgcgaacgatcctccaggtaatggatctgctcaagaccggcctcgttctgggtgacagtaacaatctgctcaccactgcggcactgcagttccacttgggtttcgtcagagccaatcaggttaacggccctgcaagtgtagacacccgagtcctccgcaatcaaatggacaatatccaaggccacataaccgaagtcatgaatgggacggaagcggtgacccacagtgatgggacgtccgttcttaaaccactccactttgaggttcgggtcagtcaccggctcgatcttgcactcgaagtgagcgtgaccaccctctcgggtgttggtcaagcttttgggatgggtaaggaatcgtggacgaatgttaacaacctcgtcgacgaactcgctgcggcgatggcgtgtcgagtcctccaagtattggattttctgaagacccgactcgttttgggtctccaaaatcaaatcattcttagcgataattcgcacggaacaggaggttacggcttcacccaattggttcctggcctggcaggtgtagacgcccgaatcgatggcgtagcagccaagcaggtccaaagccacataatcgaattcgtacgctggacggaatcgatgtcctgtcttaacaggctttccatttacgaaccactcgatgcgcatactaggatctcccacgggctgaaggcggcactccaagtgcacgttggtaccctcaatagtttcaatgttgtgcaggcccctggtaaactggggcgcttgcatgatggtaatatcctcctcctggtgatggcggcgcctagagtcctcgagcaattgaatctgctccagcgattgttcgttctgagtctcagtcacaacgtccgtgtggtcgattacacgcacgcaggctgaagtgtgggcagtacccaaatggttggtggccctcacagtgtattcgccagaatcggcggccgtggccttgataatatccaaagctacgaaaccaaagtcgtagtaagtgcggaatcgggaacccacagtaacggggcgaccgttgtggaaccactcgacgcgcatggtgggatcgcccatcggttcaaggcggcactccagatggatgttcttgccatcgtggataggctttggatcactcagtggtgtcacaaacactggcttggacttcgagatctcttcgatgtcatactgaggctccacgaacggcttgttttccaagttttgagtcttctcgtacagaccgcggtgcatgctagatgtgtcgatactggaacgagctatcaagataaaagtcaattgacattggttctcagaaggattagtactgggttttgaacttactttccactatcatcgttgcttgctgctgagcttcacctagcttgttcctagccaccacgaggtagacgccagcatcttcagcgcgcacctgggaaatgtccagggcgacataaccgaaatcgtagtatgtctggatgcgattagcggctgtgatggagcgaccgttgtggtaccactcaatcaccagacccaaatcgctctggggctcaacacgggcctcaaagtgagcgcgctggccttcgaggattttggttgttcccttgagggggccgaggaaacggggagcctgggtgatgtaggtctcctcctcctcgcgacgtccgtagcgcgacgagtcctcgagatgctggatcttctgcagaccacctgggtgttgcgactccgaaacgatttcgttcttggagataaccgtaagctgagccacggtggtatcctgacccatcgcattgtaggcgcggcaggtgtaggtgccggcgtcatagatggtcagctgcttgatggtcagtgccacgtagccaaagttatggtaggtggtgatcctggaactggcttccagaggctgtccatccttcagccactcgacgcgcatggttgaatctccaacgggttcaagtcttgcctcgaagtgcgcatgcgcgtgctcgcgcagatccaactggttttggatcggtgtcttgaattggggcggggcaatagcctcggcagcctcttggacatgacgacgctgctgggactttcggtaatcctccagttcctccaccttttcgatgtatcgctgctgctcgggtatacccagatcagcagttacttgggaacgtgagtggacacgaatagaggactgactgatggcttctccaatgcggttcactgcccgcacggtgtaggtgccagcatcctcggctctcaggtgcaagatgttcagggagacatagccgaagttgaagatggcagtgatgcgggagctagccgtgatgggtagtccgtccttgtaccattccactctcatggagggatcattcacaggtgtaacctgagcctcaaagtgcacgttcttgccctcctcgaattcgccgagatcgcggagtgggcggatgaattgaggcgcctggttgagctgctcatcgatgctctctgtgcgctggtagcgcgagtagtcctccaactggttgatgtactgcagactgttggggttctgcgaagattgttcaatggaggggcgctgcacaacggacagaatagcgcgagattcagccactccgctggcgttggtcacgcggcacatatactcgccggagtcgtgacccataatgctcagaagatccagagcgataaagccgaacttgaaaacggatgtggcgcgggcacctagcgatcaaaatggaataatttagataatattcttaatttccgtgaatgagaaaacttactggctgccagcggacgtccattgaggtaccattcgacgaccatggtcggatcgccaactggttcgatgcgggcctccatgtgaacacggccaccttcggtctgctgcacattctgcagcgggatgatgaactgaggcggtggatagacgcgatcctcctcaccagggcgcagatggggcttggcgcgctccacatggcgaaggtagatgatttcagggccaggaatgggtctaatatggaaaagataaatttttagataatttgtaatttgtaacaatgggttagtaaaacgtactctggctctatgactttcgttggtctcgggagattgagacgacgctgctcgtaatttggttgttctctgggaacctcgacatacagcctggccctattggctgtggatccagcgatgttctgggcggtgcactggtaccatccagcgtcgttggcagtgacgcgtggaatttccaggcaggtggctcctccgtcgatgcccacaaagcgctcggcggtggacgagatctggacgccgtccttctgccaggtgatacgtggctgcggagttccaatggcattggcactcatggtgatcggttcgccttcgcgcacagtcatggtgctaaaacgttgaacaaattgtggtgcgacaacttgttccttttccaacacgttcaactgtgcctcgatggccacttcaccggccttgttgcgagccagacattggacagctccggcatccaatcgggtcacattggtgatcatcagcgaatggctgcccgattcgttgactagaatcttgtgcgaggcatcgtcgcgcacttgccggccgttgataagccaaaagacctcgggataaggattgccagtaacgcggcaatcaaacctggtcatacgaccctcggtaatctcgcgatctccgaaagccttcacaaaggctggcggcaatgctttgccggcctccaattgctcggccattacgtccacgggcttcggttcgtaggcggtttccgcagcgggttccacggccaacacggcggatgaaaccacgcagccctgcaaattctcggcaagcagggtgtaatgaccgccatcgcgagccgtggcgttcttcacgcgaagcgtagccactccactcgaataggagatctcgtacttctgcgaggccaccaatcgctggccattatggaaccaggtgagccggggcttggggttggagccgacgcgtgcggtgaacacggcatcagatccctcgattagcttggagctacgcggtttctgcgagatctgcggcgcctgcgcaggaccctgattgcggtccagctcctgggagagctgggagtcctgctcgtagccagatcgacgggtgatggcctcacggaaggaaacctcgcgtaacagcctgtactcgaacgtgtccacacggaactcctcctcaatggaggtgtacgagtatccgttcgagtagatgttcttctccaaattctggatgggctgcagggcgggcatcggtgctccctccggctggatgtagacgctacagatggcctcgccatactgattgcgggcagtgcacgtgtactcgccctcgtcgccgggtccgatctgattgatcagcagggacacatcgccggtggcctcgttgtagctcatccggaacttctgcgactcgagaaggggtgcgccttttcgggtccaggtcacgaatggcttcgggttgccacgcaggcgtccctcgaacagggcattgccgccctgggcgaagcgagcgttcttgaagatctgctcgaagacgggcggcgagatgtcgccctgggcgtacacgtgtgtcagcgaagggggcacgtaggcgcctccgatgctgccaccatgatgttgttgcactgtaagatcaaagcactctcattaggatcgataggttgtatgtgtagggtggatatggatggtagcggaagtggcgaaaaaaaaaaaaacaaatttaaaggacattaaaattttcttacggttttaatttaccttcaaatgtattaaatttaaaagaaaagtcggcgagtaaagaacctaacccattcgttattgtcagcttaattttcatatcgtattttgtaaataataagttttgtaataagatataaaaatatataaaaaaaagtattaaatgctttttatttatgaataacttgaaacacaagcgaaatataaagttcaagtggcaaatttctctaagctaataaaaaatatgtgttgcacagtcatatttcaattgttcaatgattttatttttaatttaatagttcatatccaagccaatctgaaatctaactcatagtccaaaagtatgtcaaacttgcactatctttatgatttattctttaaccaaaacgtttatttattttgttgcgtatatttagtttgcacacgtacgtaactatttatagttgtagtcgcccagaagtaaacaactctaattatatatctatattcgcatcagtacctgtatatttataatatatatatatatatatgcatttgtttatcacttgcggatctctaagtgtgtcatgaatgtaaagtacatatatataggttcatgacttttaaaacagctgatcggaagcaaataataacaatatcagcttcggcttttcacttcgggaattcatcttcgtgttcttgagtataagagattctcttcattctcttctacaaaaagagaacatttttctcatctttagttttaaagcatagaatttgagaagagaaaattttaagcagcctgttcgctattttcgcttttcttttctcacgcacagtgttgtaaagcgtcgttttttgaaatgttgtattttgacacttggttttaaattgaactgaataaattcactcgacgaaaacagtaaacaaatgacgaggtatacaaactcttatacgatttatatatagcatcgacatatgtatgtcagtgcaatcgtgggagatgaatagataaacttataaatacaccacattttccctgtatccgtcaattaagatttaaatgatgaaatataagttgacacatgaattatatttttggaaaaaatgtcggacattcggaatgtaagattttatcaggaagatattaataaaatattgttgttttcaaaattttcaatagacttggaacttggtagataaacataaaccagatttatctgaattataagccaattgaaatgaacaaatgtatttcaattgctagaatcttttaaatagttattttcaattaatagtttcctgtttacttcagaactgtgtaaaccatttttggcctagatttatattaggcttagtgaaagatggataaagttttacatctttcttaaattcttccgtttggatcatatctaaacaaatatgatacgcgattaatcaattatagggcttgttcggggaagaaaataaagaaagttcttgttgtaatttataatttatatttcctttcttaataaataaataaatagtcaagtttatgtttgagttttatgatttatattttaagttatttcaactgcaacaccagcaccacgacctactcacagcaaaaaacgtacaagaaggaaagaaggaataaaaagagtggtattctcttacaatatgttttatggcataaaaggtgtggccattcatatcaaatataaagtagtgttgtttaacgttatttttgtaggttgaatagtatattccaacacgccccctcaaaaataacgtctataattaaaaacataacaataatattcattagtaactatcaaatgtgggtggtgtgcattctgggaagtgttaactgatccagcatttgctgcgaggatacggggaaaacccagaaaaacccgatcagatcattgtaacaaaatatgtttacaggaatttaaatttgaaaaatatatataaaaaatttcattcagcattcgattggtcgtcttgcagcaaacccaatttgtctcgtaactccacaaatctcgcagcaggcaacggttttgtaaatatgtcagccagttgattctctgtaggaatatactcaagacaaatcacattattctgaacttgctctctggcaaaatgatatttaatatcaatatgtttagctcgtttatgacatgaggggttgtttgctatgctaatacagccttgattgtcttcgtaaattttaatggggttttcttttaatggggttgtactttttctatcaatttcactaccagcccaatcagaatccacataaccaataattttattttcaaatgccaagttctttttaaaaatcaatttcatatcgatagtgcccttcaaatatctaagaactctttttaagttctgccataattcggagttatttttgctactatatctgctcaagatatttactgcagtagttaaatctgggcgtgtacaaagcattatgtacattaaacatcctatgaggctacggcatggggtattgcagtcttcatctgaattaagtaattcataatttattttactaggtaaaggagtactaactgcattacaattttccatgttaaatttacttaaaatttttttaacatatgcagattggcttaaatagattttatcttcatgcatctctatcctaattccaataaaatgttttatttcatttaggtcagtcatcctaaacttttccattaaataccttttgaagttattcattcttgtcatatctcctgtagctataaccacatcatctacaatatttttgttttcaggcctttttgtaattgtccaagtattattaattttatgagcatttaactctgtattgatggcttcttcccaagaagatttatcatccctatattgaatttcatcaaatgaatttgggacatcattaaatatagtgtgagcatttagaacaactttatttagactattatcctcttcattataggatatctgaggcttagtctttaatctctcacttcttctattaataatttctatgccatcatttttagttggattatcaattccaatttcttttaagtgctctgctgtttcactttccctactctcattcggggttgcctgatcccttactttcattcaggtgatcatctcgctttcttttcttactctcaattcagaaaatatttattactttcccttactatctttcaggaattgtatgttgtcgcattccttactctcaattcgggaattctgtttgtattattttcctactgtcattcggaaaatttttattttcactttccttactatctttcaggaattgtatgttgtcgcattccttactctcattcgggaactctgtttgtattattttcctactgtcattcggaaaatttttattttcactttccttactatctttcaggaacactgtttcaaatttaacagctctagaattaaccatattggtttcatcgacaacaacatctcttgcgacaataaatttttcatttacagcatcccacaacttaaaaccattgggttcatagcccacaaaaatacttttaaatgatttatcatcaaactttccttgtttgtttttaatatgcacataaacagttgcaccaaacactctcaaatgttttaagtatggcttcttattgtgccacatctcatatggggtctttgaactatcaacaagtgctctgctaggaattcttttgattaaataagtagcagttaatactgcttcgccccaaaagcttttatctagctttgcaccactaaccatggttcgagctttttccgtaatggttcttatcattctctcagaaacaccatttaactgaggtgtatgtggcactgttaagtgataagaaattcctttcttaacacaaaattgtctcatctcatgtcataaacgaaaattatttttatgcttagcatttatagaatatgcttgaaaattgatcacaggtacattgtttaacatacctgaattttttgacaaccattaacccatttttcgaaatggttacaccgcttttgtcaaattcgatcgacattcctgcctcttggagacgctttacggacatcaaattaccagcagcttccttacaaaagagtacatcctccagtgtaatctcatggtcattccgtagtcggacaataccacgcttagtggcataaataaattcgccttgcttggccactgcaatcttaagtggaggcacaatctccacactgtcggtatacagcgactcatcatttataagatggtcactagcaccagaatcaaggacaaacccgcagttgtccatcactgaagtattattcacttcttttaccataaacgcaatgccgtgtgatgttgcagtttgaacttgtttttcattttctttatttttattatttaatattcttttataatggaaacaatcttttttaatgtggccttctctgccacagtggtgacacttgactttatactttgaatttcccttgaatattttctttggtttagttacccgatttttaaacaaattatttttataagtgttattattgttgtgcacgatcgcgttcataactttcttgcttgtatcgttgtggtcatttttaattttaatttcttgatccagcaatctatttttcacaaacgccaatgtcaaattttcttcagataatgtctctatcgctgtaataattccatcgtaacacgaaggcaatgtgatcagtagatgagaaattttatccatctcttctatttttgcaccagctgccaacaattcacttataagttcgtcaaaaatatgaaaatggcttaatagtgacatctcactcgatagcttcagagaaagcaaacgttttcgcagcgccagttgcgacgccaaactttttcgttcataaacggcgtccaaatactcaagaatctgacgcgccgtaatgtcgcttgttgcgaaatttaaaaacgagtcgcttaggtactctattattgtactttttgcacaacgctctgcctttttccaggagtcatctacctcgttaggcattaaaccatcaactactttaagcacatcttgctcggctaaaagagccctaattctaaatttccaaatcgcgtacttctcgccatcaaacggcttaatattacgtttagccttgtccatttttcactcaaattctgagaaggaaataatttcacaagaatgtgaaaaaaaaaactattttcacaagaatgtgaaaaaatgctatttcacaatttattttcacaatctttaattcacaatttaattgtttattaggcatggactgggcccataacctgttgtaatttataatttatatttcctttcttaataaataaataaatagtcaagtttatgtttgagttttatgatttatattttaagttatttcaactgcaacaccagcaccacgacctactcacagcaaaaaacgtacaagaaggaaagaaggaataaaaagagtggtattctcttacaatatgttttatggcataaaaggtgtggccattcatatcaaatataaagtagtgttgtttaacgttatttttgtaggttgaatagtatattccaacagttctaaaagcataagtaaataaagttagttcataatatctgcaacaataacctcaatagcttataacaatttaacaatctctgacgcaggtgcaacataaaacagtcttttgattttttcccaagaaactttcgactgattcaataaaatcaatcttttaagttttccaatacggagcttcggttaaacagaaagtaaaatcctatggaatatattcttactaagataaaattgacggaatactggactagactactggactaggaatactagcaattggtccatagcgacttattgaaaaaaaaaactacacgaccttaaccataaatctattagcaaaacttttagacaaaaatccactttaaatcaagttatacccattaaaagaccataacataaaacccaaaggattaggtatgtgcttatgttttttgaaagaacttttagattcgccctgcaagaaatgaatgatatcaaggccaaagcagtaaaggaacgagcttgatgattaaatgctttgtcctggatccttcggccattcagcggaaattgcttggggacagtggggattctaaatccacggtgtgaatcccaccgagcctcgcaaacttccctgagatcggccgtctccctcaacgggggacatccaaggacacatgggacgaggactgaccttgccgctgggtggtgacctggctgcgctggacgtgctgctcggtgcggctaatcctttgctcctggtgctgctcctggctggagtgcgagtactcctggctggagaactgctgcacctgctggtgctgctggttttgctgctggtacgggttcggattttgtcgttgcattttgcttcgttatatatcactatatatcatttaaaatgacaaccaaatcgttgcagaatgaactgcactgtagaattgaacacctcgcgatcactctttctttgatttgcttcttcacttgatatacttctatatatatttatatctctttggtcgcttctttaaattgctgaaatagaaataataattggtaggaactttcactttaattaggcaacgaaaattcacggcacttgttatttatcactgcgatttcggccaacatttatattcattttattgccttgcatctttgaatttctttaatgtttggctgtcacacattttgtttaatggctttgaaatttccttctcgatatacgagtagatataaatcaggcgagatcggagatcttcgcatgacgttcatatcagccatccttcttcatattcattttcatattctttcgcctgtgaggcatttccaactatttttagccccgagaatacactgcgacacacagatacgcactcacacacacacacacacttgttctcatacacacaaagaaacacagtcggtggtagcttcttatttttcacggggctattaataaacatttttctggtttctcctataggaaaaccttgcattggcccagtgatctccgtttaagaatgttcacaatttttcagacactatcttggctgctccagcgtataatccttgccgggatcagccaggataatgcatatcgcacacatggcacagccgcgtatacgtgatcttttgatttgtgcaggttcgactatatatatatagattgcttgatatctgtttgcacacgatttcacagtccattcgttgaattgggtgcggacccacgaagtggagccaccgaagcaccgatccgatacgatacgatccgaatcggaatcggaatcggaatccgaaacgaagcacccgatcgggcgatatttttagatatttagcgcactgaaaaattctttcggcatttttctcaaagtggtttcgtaaccagagaaaattttcatgaacactttttgcattcacaattcctgcaggatttgcataattttcacactttacactgatccttactcgaaattgcgatatcctttcgacgttctatatatatatttgcgtttgtgcggggctctaagcgaacgaaatggctgcgaacgtatacatatatctgtaccgtgtggtgcgtttagatatagatatatgtatattcttttaaaaaatatctattttcaaactgtttcaagtcataatccccgagactgaaaccaagacgtcgatcgtttctgaggtgcgagcgaagaatgacaaaatctctcggaaaatgcgatcaagtagctgtgcctgcccagccgaatctcgcccgaatcgacacgattccaaacgatctcccgccgagagagaaaatcttgctccacatgagatatttttgcattttcctcgggaaaacagtctcacagcttttaatgcactacacagcacgatggggtgtataggttttccgggcatgtttgatatattattccaaatctgctgtagatattctatttcaaatttttccttatcctgtgaatctcaataactccgtactccgttttcttattgggatatttatcaaaactaaattgctgggtgtccagtagttcgatggaaaatcgtcccagagtcttggccattctcgttgaatcgacaatgagagatatctctgaggattttgaaaagtgttcgggctttgagtaagttggctaaaaatatatgccgatttatttttgacacgtatttttcaacattgtgtgcacgaaaacgaagacatcctacagaaattctagatactgttagagtcaaatgcatacacacggcacagatagatccctatctattgattccagctaaagattcgtttagaatgctgccctccaaaccgaaaccgaaaatcagaaggaaatatctatcagagttgaacttgtataaataaataagacagcaattgcaattggatcttggaattatcatttgcacaatacaatcaaatttggctcatgtttgctttgccttcgcgtttatttttttttcacattttccacataatttattttgtttgtctaaatttaaaaccacataagatgtatagatatgtataaaatttggctcgtccgcccgcctcttgatacatataacttgattattcattctgtctcttaatcatcagcaccgagatgtatttcagtgaccaattggcgaaaaaatgtcgcaactttctatttctttttcgccatttcagaaaatccgaaaata

SEQ ID NO: 2786 - DNA, 15272 bp, DROSOPHILA
gcacctcagaaacgatcgacgtcttggtttcagtctcggggattatgacttgaaacagtttgaaaatagatattttttaaaagaatatacatatatctatatctaaacgcaccacacggtacagatatatgtatacgttcgcagccatttcgttcgcttagagccccgcacaaacgcaaatatatatatagaacgtcgaaaggatatcgcaatttcgacaatttaaagaagcgaccaaagagatataaatatatatagaagtatatcaagtgaagaagcaaatcaaagaaagagtgatcgcgaggtgttcaattctacagtgcagttcattctgcaacgatttggttgtcattttaaatgatatatagtgatatataacgaagcaaaatgcaacgacaaaatccgaacccgtaccagcagcaaaaccagcagcaccagcaggtgcagcagttctccagccaggagtactcgcactccagccaggagcagcaccaggagcaaaggattagccgcaccgagcagcacgtccagcgcagccaggtcaccacccagcggcaagtgcaacaacatcatggtggcagcatcggaggcgcctacgtgcccccttcgctgacacacgtgtacgcccagggcgacatctcgccgcccgtcttcgagcagatcttcaagaacgctcgcttcgcccagggcggcaatgccctgttcgagggacgcctgcgtggcaacccgaagccattcgtgacctggacccgaaaaggcgcaccccttctcgagtcgcagaagttccggatgagctacaacgaggccaccggcgatgtgtccctgctgatcaatcagatcggacccggcgacgagggcgagtacacgtgcactgcccgcaatcagtatggcgaggccatctgtagcgtctacatccagccggagggagcaccgatgcccgccctgcagcccatccagaatttggagaagaacatctactcgaacggatactcgtacacctccattgaggaggagttccgtgtggacacgttcgagtacaggctgttacgcgaggtttccttccgtgaggccatcacccgtcgatctggctacgagcaggactcccagctctcccaggagctggaccgcaatcagggtcctgcgcaggcgccgcagatctcgcagaaaccgcgtagctccaagctaatcgagggatctgatgccgtgttcaccgcacgcgtcggctccaaccccaagccccggctcacctggttccataatggccagcgattggtggcctcgcagaagtacgagatctcctattcgagtggagtggctacgcttcgcgtgaagaacgccacggctcgcgatggcggtcattacaccctgcttgccgagaatttgcagggctgcgtggtttcatccgccgtgttggccgtggaacccgctgcggaaaccgcctacgaaccgaagcccgtggacgtaatggccgagcaattggaggccggcaaagcattgccgccagcctttgtgaaggctttcggagatcgcgagattaccgagggtcgtatgaccaggtttgattgccgcgttactggcaatccttatcccgaggtcttttggcttatcaacggccggcaagtgcgcgacgatgcctcgcacaagattctagtcaacgaatcgggcagccattcgctgatgatcaccaatgtgacccgattggatgccggagctgtccaatgtctggctcgcaacaaggccggtgaagtggccatcgaggcacagttgaacgtgttggaaaaggaacaagttgtcgcaccacaatttgttcaacgttttagcaccatgactgtgcgcgaaggcgaaccgatcaccatgagtgccaatgccattggaactccgcagccacgtatcacctggcagaaggacggcgtccagatctcgtccaccgccgagcgctttgtgggcatcgacggaggagccacctgcctggaaattccacgcgtcactgccaacgacgctggatggtaccagtgcaccgcccagaacatcgctggatccacagccaatagggccaggctgtatgtcgaggttcccagagaacaaccaaattacgagcagcgtcgtctcaatctcccgagaccaacgaaagtcatagagccagaacccattcctggccctgaaatcatctaccttcgccatgtggagcgcgccaagccccatctgcgccctggtgaggaggatcgcgtctatccaccgcctcagttcatcatcccgctgcagaatgtgcagcagaccgaaggtggccgtgttcacatggaggcccgcatcgaaccagttggcgatccgaccatggtcgtcgaatggtacctcaatggacgtccgctggcagccagtgcccgcgccacatccgttttcaagttcggctttatcgctctggatcttctgagcattatgggtcacgactccggcgagtatatgtgccgcgtgaccaacgccagcggagtggctgaatctcgcgctattctgtccgttgtgcagcgcccctccattgaacaatcttcgcagaaccccaacagtctgcagtacatcaaccagttggaggactactcgcgctaccagcgcacagagagcatcgatgagcagctcaaccaggcgcctcaattcatccgcccactccgcgatctcggcgaattcgaggagggcaagaacgtgcactttgaggctcaggttacacctgtgaatgatccctccatgagagtggaatggtacaaggacggactacccatcacggctagctcccgcatcactgccatcttcaacttcggctatgtctccctgaacatcttgcacctgagagccgaggatgctggcacctacaccgtgcgggcagtgaaccgcattggagaagccatcagtcagtcctctattcgtgtccactcacgttcccaagtaactgctgatctgggtatacccgagcagcagcgatacatcgaaaaggtggaggaactggaggattaccgaaagtcccagcagcgtcgtcatgtccaagaggctgccgaggctattgccccgccccaattcaagacaccgatccaaaaccagttggatctgcgcgagcacgcgcatgcgcacttcgaggcaagacttgaacccgttggagattcaaccatgcgcgtcgagtggctgaaggatggacagcctctggaagccagttccaggatcaccacctaccataactttggctacgtggcactgaccatcaagcagctgaccatctatgacgccggcacctacacctgccgcgcctacaatgcgatgggtcaggataccaccgtggctcagcttacggttatctccaagaacgaaatcgtttcggagtcgcaacacccaggtggtctgcagaagatccagcatctcgaggactcgtcgcgctacggacgtcgcgaggaggaggagacctacatcacccaggctccccgtttcctcggccccctcaagggaacaaccaaaatcctcgaaggccagcgcgctcactttgaggcccgtgttgagccccagagcgatttgggtctggtgattgagtggtaccacaacggtcgctccatcacagccgctaatcgcatccagacatactacgatttcggttatgtcgccctggacatttcccaggtgcgcgctgaagatgctggcgtctacctcgtggtggctaggaacaagctaggtgaagctcagcagcaagcaacgatgatagtggaaactcgttccagtatcgacacatctagcatgcaccgcggtctgtacgagaagactcaaaacttggaaaacaagccgttcgtggagcctcagtatgacatcgaagagatctcgaagtccaagccagtgtttgtgacaccactgagtgatccaaagcctatccacgatggcaagaacatccatctggagtgccgccttgaaccgatgggcgatcccaccatgcgcgtcgagtggttccacaacggtcgccccgttactgtgggttcccgattccgcacttactacgactttggtttcgtagctttggatattatcaaggccacggccgccgattctggcgaatacactgtgagggccaccaaccatttgggtactgcccacacttcagcctgcgtgcgtgtaatcgaccacacggacgttgtgactgagactcagaacgaacaatcgctggagcagattcaattgctcgaggactctaggcgccgccatcaccaggaggaggatattaccatcatgcaagcgccccagtttaccaggggcctgcacaacattgaaactattgagggtaccaacgtgcacttggagtgccgccttcagcccgtgggagatcctagtatgcgcatcgagtggttcgtaaatggaaagcctgttaagacaggacatcgattccgtccagcgtacgaattcgattatgtggctttggacctgcttggctgctacgccatcgattcgggcgtctacacctgccaggccaggaaccaattgggtgaagccgtaacctcctgttccgtgcgaattatcgctaagaatgatttgattttggagacccaaaacgagtcgggtcttcagaaaatccaatacttggaggactcgacacgccatcgccgcagcgagttcgtcgacgaggttgttaacattcgtccacgattccttacccatcccaaaagcttgaccaacacccgagagggtggtcacgctcacttcgagtgcaagatcgagccggtgactgacccgaacctcaaagtggagtggtttaagaacggacgtcccatcactgtgggtcaccgcttccgtcccattcatgacttcggttatgtggccttggatattgtccatttgattgcggaggactcgggtgtctacacttgcagggccgttaacctgattggctctgacgaaacccaagtggaactgcagtgccgcagtggtgagcagattgttactgtcacccagaacgaggccggtcttgagcagatccattacctggaggatcgttcgcgctatacccgacgtgaggaaatcgatgaaagtaccaagcaggctccggtgttcactacatcactgaaaaatgttgagatcaaggagaaccagagggcccactttgaatgccgtctgattcctgtttctgatccctcaatgcgtgtggaatggtaccataacaatcttccacttaagtctggttctcgtttcactgagaccaataacttcggctttgtggccttggatattatgtccactctgcccgaagatgccggaacttatacatgccgcgcctataacgctgtgggtgaggccattacctctgctgtagctgttgtgcacacaaagaagtccatctacctggagtcccagcatgaaacagctctgccacgtctgcagcatttggaggatggctccaagcgtcagcgcatcagcgttcaggacgaattcgtgtcccaggcacctgtcttcaccatgccggtaagggatgtgcgtgtggctgaaaaccaagctgtgcactttgaggctcgcttgattccagtgggagatccgaaattaacggttgagtggttgcgaaacgggcaacctattgaagcctccaaccgcactaccaccatgcatgattttggttatgtggctctcaacatgaagtatgtgaatcccgaagactctggaacctacacctgtcgggccgtcaacgagctgggtcaagcggttacctctgcctcgctcattgtgcaatctaagacctccattcaactggagacccagcacgaagccgccatgcacaagatccatcagttggaggatcacagcaggtaccagcgcagggaggaggaggagtacacggtgaccaccgccccggtatttgttaccaagcttattggacccagcaacctagttgagggtcaaagtgcccactacgagtgccgcattgaaccctacccagatcccaacctcaaggtggagtggttccataatggtaagccacttagcactggtcatcgcttccgcaccacgtacgactttggatttgcggctttagacatcctcactgtctatgctgaggacagcggcgagtacacttgccgagtcaccaacaacctcggtgaagccatcaactcgattgtgctcaacgtcacctcacgctcttccatcattcacgagactcagcacgaggaggctctgactaagatccagcatctggaagatacttcgcgattccagaggaaaacggacgaggaacagttccatgccgagcgtcctcagttcggccgccctctgcgtaatgccaaggtcaacgagggagctcccgtccacctggaggccacattaattcctgtgaatgatcctaccatgaaggtggagtggtactgcaacggtaggcccatacagactggtcaccgcttcaagaccacctacgattttggcttcgtggcattagatattttgtatgcccatgccgaagacaccggcacctacatgtgcaaggccaagaacgctattggagaagctgtcacgacttgtgctgtaaacgtaacagcaaacaagacactcgatctggacaccttggatgctcagcgtttagagaagatccgacaactggaaacatatgcgcctcctcctaagcccgtcgtggaggagaagggccagaaacccattttcctcacaccgctaagcaacctagaacacttgaaggagggcgagcacgcccacttggagtgccgagtggaaccgatcaacgaccccaacctaaagattgaatggttctgcaatggcaagcagctgcccaccggtcaccgttaccgcactacccacgactttggttacgtcgctttggacattctttacgtctatggcgaggataccggcacctacatttgtaaggccaccaatcagctgggtgaggctgtaaacacctgcaatgtgcgcgtgttaaaccgacgcagcatgatcctggatacccagcatcccgatgctctggaaaagattcaaaagctggagtctaaggtgccgaatgcacgtaccgaggttggagacgctccgatcagtccacctcatttcaccgccgaacttcgcggttccactgagatctacgagggtcagaccgctcacttcgaggcccaggtcgctccagttcacgatcctaacttgcgcattgagttctatcacaatggcaagcctctgccgtctgcttctcgcttccacatcaccttcgattttggatacgtgtctttggatattactcatgctgtggccgaggacgccggagaatattctgtgcgtgctgttaacgctttgggccaagctgtgtcctccacgaatctgcgcgtcattccgcgtggcaccatcatttcggacacccagcatcccgagggactggagaagattcgcaagctggaatcgactgcgccgcatcagcgccaggagcctgaaacccccggcactcgccagcgcccagtgttcacccaacctcttcagaacatcgacagaatcaatgaacatcagacggctcacttcgaggcgcgcttgattccagtgggagatcccaatctgaaggtcgagtggtaccgcaacgaaaagatcattgaagatagctcccgtatcaccaagcagcacgatttcggttttgtgtccctcgacatctcacatattcgcaaggaggatgagggcgtgtacatgtgccgcgccgtcaatccactgggtgaggcagtaaccaccgcctctatgcgcgtggtatctgaggccagcatccaaatggatactcagcatccggacagtatcagtcgcatccatcaactggagaaaccactggcaccacgccccactgaaccagagcgcctgtttgagaagcccatcttcactcaactgctcactggaccttcggagttgtgggagggtactcatgcacacttcgaagcacgagtcgtgcctgtgggagatccttctctgaagtttgagtggtttatcaacggcgtggagcttcaaatgggctctcgcctgcgcaccacacacgactttggattcgtcaccctggacattactgcagtggtaccagaggatgccggtgtctacatgtgccgtgcttacaacgccgccggtgaggctgtatcttctactgccatgaaggttaagaccaagtcgaatattgatggtcagcctttgattccggagtcttgggaggctattcgactgaaggaggctgccatgaatcgtgtaccagagatgtttgttgactcgacaccccaacaagctccggtcttcaccacgcatctgcagagctacgacaagctgcatgagggtcagcacgtccttttggaagcccaagttgaaccccgcgcggatcccaacctccgcattgagtggtttaagaatggtatttctctaaccactggctcccgaattcgcagtacctttgactttggactagttacactgtccatcaacggattgcgtgctgatgactccgctatttacacctgcaaggctactaaccaggttggcgaggctgtctcaacctcatctcttaagatcgaagatcgccattggcttcaggccgagtctctgcacccagattcgttgcctcgcattggagagcttgaggcgcccaaggagggacgaccagaggctccagagcccacttatgagactcctgtgtttattactcatcttaacaacattgagtgcaaggagagcgacaatgtacgcttcgagtgcaacgtggaaccggctcgtgatcctaccatgtccatcgagtggttctacaatggacaaccgctgcaggccgctgccaaatttaagtccatctacgattttggctactgcgctttggatctgaccaattcttatgctgagaacagcggtgtttacacatgtaaggctactaacagcaagggatctgcaactacctctggcactcttaagtgcactggtggcaagaccatgttcctagacacccagcatccgcagggagaggctggtcttgaggctgtgcaggaaaccgaggaggagctggccaatcgctacaccagcaaaacgacaaagcccgagacacagtatccaccaccagtatggacgaagccactgcaggccgagttccatttgtcggaggcccaacccattcatttggaagccaacgtggagcccaaggaggatcccaacctgtttatagagtggtactttaatggcaaaatgctgaaccatggttctcgcttcaagatgaccagtgaatttggtttcgttaccatggatatgatcgaggtatatgcgcgcgatcagggtatctacacttgcaaagcgtacaacaaggctggagaggcctttacctccaccaccatcttctgttcgagcaaggagaacatcatcgagtcaactcagcacccgaagggagctgaaggccttgagcaaatccaggaccttgaagactccctgcgcaaggacggctctaagccagaacagccagatcttggcatcccaccacgcttcaccactgaattcgttaatattgcagacatcggggagggtgaattggctcactttgaggccaatctcattcctgttggtgaccagagcatggtcatagaatggttctacaacggcaaggttttggaggccagccatcgtgtgcgtaccatctacgcttttggcacggttgccctggaggttcttggcaccaagatcgaagacaccggcacctacacttgccgcgccaccaacaagcatggaactgctgaaataagctgcaatctggagtgcgtggacaagccgaggggccagaagccgcgcttcacgtcccacattcagccgctggagggcctgaaggacggacagtccgctcacttcgagtgcactctgattccagtcaacgatccggatctgaaggtggagtggtatcacaatggcaagctgatgcgtcactccaaccgcatcaagacggtttccgattttggatacgtcgttttggatatttcctatctgcaggatcatgacagtggagagtacgtttgcagagcctggaacaagtacggtgaggactttacccgtaccaccctcaattgtggaggacgtggcggagtgttctatgatagcttgcagccggattcactgcagaggattagggagcttgagtgcccacaaggacaacaggcagatacctcggctcctctggtcgctgagccccccaagttcatcacccagatcgtcgatgtaactaagctggtggagggacagtctgctcatttcgaggcacgtttgactccaatcaccgatcctgatttggtggtggaatggtacttcaacggcaagaaactaccccatggtcaccgcttccgcaccttccacgacttcggtattgttattctggacattctgtactgctacgaagagaactctggtgtatacgaggccagggctcgtaacaagtatggagaggatgttactagggcttcgctcaagtgcgcctcgaagtcaagcctcattttggactcccagttgcctcgaggaatggaaggtggcttggagaagatcgccaacctggagtacagcatggtccgcactcgcgaagagaccaccgaagagaccaagggcaaggctcccgtctttactgtaccactggaaaacatcgaaaatctgcgtgagggtgaaaatgcccactttgaagctaggattaccccggccgatgatcccaaactgaaggtcgagtggtactggaacggtcgtccattgaaggccggttctcgtttccgcactttctgcgactttggctttgtcatcctggagatttctcctgtgtatcctgaggactccggcgagtactcttgccgcgcaatcaacgagtatggtgaggcggtgaccacggccaccatgaagatccagggtaagcgcagcatcatcatggaatctcagctgcccaagggcatggagggaactatcgatcgcattgccgaactggagggcttgggctcccgcagcaccgagttcgtaccagatgatgatactggcaagccaccagagtttatcacctctcccttcgatatggttatcggcgagaacgctctggctcacttcgaatgccgtctgcagccgattaatgacccatcgatgcgtgtggattggttccacaatggcaaggccttgtgggctggttctcgtatcaagaccatcaatgattttggctttgtaatcctcgaaattgctggttgctatcagcgtgattcgggattgtacacttgcaaggccacgaacaagcatggtgaggccacggtctcttgcaaattgcaggttaagggtcgccaaggcatcgttatggagccccagttgccctccaacttccgcaccggcactgagagtctgcagaaacttgaggagaccatgcataagcgtgaggagcttgtgactgaagacgagcagcccaatcccccgaaattcaccgaggaaataaaggacaatttggatgttcctgagggtggtccaattcactttgactgccgtgtggagcctgtcggcgatccaaccatgcgcattgagtggttctataatggtcatgttatggctactggatctagggtccatcagctcaacgactttggctttattgctttggatgtggactacatctatgccagggattcaggcgagtatacttgccgggcaaccaacaagtggggcactgccacaactagcgcaaaggtcacttgcaagggaaagcacaatattgtgtacgagtcgcagttgccagagggcatgacctccgaaaagttgaaggagctggagcgaggacgcatcccagaagcgccaaaggtggttgaggaagtgtttggaccaccaaagttcaccacacagatcacttctgtgactgtcgatgaagccgaggccgttcgctttgaatgccaggtggaacccaagacggatcccagcctgcgcgtcgaatggtaccgcaatggcaagcccttgccttctggacatcgttatagaaatattttcgacatgggctttgtttccctggatattctgtatgtctatggagaggactctggagagtacgtgtgccgtgccattaacaactacggcgaggatcgcaccagagctacagtgtcttgcaagaaactccctaccatcttactccagaaccaagttcctcgcggcatgaagcgttcagatgctctaacccaaatggaagctaccatcaagaaatatacatccgaagtccatttgacagaggatgatctattcgatcctgatcgcaagcagcctcctcgctttgtcacccaaatcaaggagcagcttactcttaccgagatggccgtcaccaaattcgaatgccagttggctcccgtgggagatcctaacatgaaggtcgagtggttcttcaatggcaagccattgctgcacaagaaccgcttccagcccatttacgattttggttatgtggcaatgaactttggctgggtttatcccgaagacagcggagagtacgtgtgccgtgccaccaacttgtatggcaaggacgagactcgtgccatcattaaggtttctggaaagccaggaattgtctatgactcccagctgcccgctcacatgcagagcattgaccgcatccgcgaaatggaagcctcatggcaagtggtacccgatgaggttgatcccgatgccaagcccagaaccaagccagtgtttgtgagcaaactggagccccagactgtggaggagggtgacccagctagattctgtgttcgtgtcaccggccacccacgtccgagggttatgtggcttatcaacggtcacactgtcgttcatggctctcgttacaagctgacaaacgatggtatgttccatttggatgtcccgaagacacgtcagtacgacactggcaaggtagaggtgattgctcgcaactctgtgggcgaatcgattgccaccactgaactgaaggttgtagcacgatcggacgattatcgcaatgtgctgaagaattcgccacgtccttggtacgattacgaactagctgcctatcagaaggagcgccaggagaacgagttggaaaaggtattcgatgagcgtaagcaggtcctttccgaacagagctcccacacgttgaagggcgtggagcacctgaagcccaagcaatacaagccacccactccggactggcagcaaaatgtcaaggccaagaagagcgaggactactacaacaagctgcagactctggaaactgaacagctgctgaaggagaccaacctgcgaagggatacccatcagtacgccattcccggagagaaggttgtgagcagttctcaagccaagggaatggcccagtcttacgaagaaaatcttcaagagaaaacgagcaccactgaagtgcaggctgctccacccaagggtattgcccaaccatccgaatcatccgtccatggtcgcgaagttcacatgaacaagcaacagcaggtgcagaaggagatccagggtgaccttgagattacccgcaagataaccgccaccgaaacaaccgaggttgagcataagggaaccattcaggagcgtgtcgttcagggacccgtgaaaccggccaaggctccggtcttcaccaaaaagatccagccatgccgcgtctttgagaacgagcaagccaaatttgaagtggaattcgaaggagagcccaatcctacggttaaatggtaccgtgagagtttccccatccaaaactctccggatctgcagattcacaccttcagcggcaagtcaattctgatcatccgccaagtgttcgtcgaggactccgcagtcttctcgtgtgtggccgaaaaccgtggaggaactgcaaagtgcagtgccaatcttgttgtcgaggaacgtcgtcgcgccggaaagggtggcattcagccacctagtttcgtgaccaccatacagagcactactgtggccaccggccagttggctcgcttcgatgccaaggttacaggcactcgcccactggatgtgtactggcttaagaacggcatgaagattcagccgagcatcaagttcaagatgctggaggaggacagtgttcacactctacttatcatcgagccgttcgccgaggattccggtcgctatgagtgtgtggccgtcaatgccgctggagaggcccgctgcgatggtgactgcatcgtgcaatcgcccagcaaaccggagaaacctacgactccgggcagcgagaaggcgccacatattgtggagcagcttaagagccagaccgtggaggagggaagcaaggttatcttccgctgtcgagtggatggcaagcccactcccaccgcccgctggatgcgtggcgagaactttgtgaagccatcacgctacttccagatgagccggcaaggcgagtactaccagttggtcatctcggaggccttccccgaggacgagggtacctacaagtgcgtggctgagaacaaactgggcagcattcagaccagcgctcagctcaaggttcgaccaatcgagaaccttgacgccccgcccactatcacagccctcaaggatgtctctgtcaccgagggcatgcccgctcagtttaagacgacggtgaccggcaaagtgaaagccaccagcgtccaatggttccgcgagggtcagctgattcccgaaacaccggacttccagatgatcttcgatggcaatagcgctgtactcctgattggcaccacctacgaggaggattcgggcatctttactgtgcgcgtaacctcgtccaccggccaggttgaatcctcagccaaactgactgttaaaagtaaggattaaactaaaactaagccaaaaccgaaaccagagttcgaaacctagcaaaaccaaacgtaagcgaaccgtgttcaaacaaacaaaccaaccaacatcaacaaaccaactccaaagaatgctcaaaaaagaatatatgaaatgaacaaaaacaaaacaacgaccgagaagaactttaactattaatccccgagttactgacgtattacatacagttactactacccctcaacctatctatatatacatatatgatcaactactagtcgtaaaagtttgagtgaagaatattttagagcgagcctgtcgaaactttcaaggatttttctaaactatcaaacgaacgagttatatttactaaccattgcaaaatgtaaaaagtgaaatgcagcaaaaacaataaacaaaaaaaggattaaattaaagatatctaacacgaaaacgtaaccgaaaaagcagcacaaaaatatgaaaacaatttttaattgaaaaataataaa

SEQ ID NO: 2787 - protein, 4796 aa, DROSOPHILA
MQRQNPNPYQQQNQQHQQVQQFSSQEYSHSSQEQHQEQRISRTEQHVQRSQVTTQRQVQQHHGGSIGGAYVPPSLTHVYAQGDISPPVFEQIFKNARFAQGGNALFEGRLRGNPKPFVTWTRKGAPLLESQKFRMSYNEATGDVSLLINQIGPGDEGEYTCTARNQYGEAICSVYIQPEGAPMPALQPIQNLEKNIYSNGYSYTSIEEEFRVDTFEYRLLREVSFREAITRRSGYEQDSQLSQELDRNQGPAQAPQISQKPRSSKLIEGSDAVFTARVGSNPKPRLTWFHNGQRLVASQKYEISYSSGVATLRVKNATARDGGHYTLLAENLQGCVVSSAVLAVEPAAETAYEPKPVDVMAEQLEAGKALPPAFVKAFGDREITEGRMTRFDCRVTGNPYPEVFWLINGRQVRDDASHKILVNESGSHSLMITNVTRLDAGAVQCLARNKAGEVAIEAQLNVLEKEQVVAPQFVQRFSTMTVREGEPITMSANAIGTPQPRITWQKDGVQISSTAERFVGIDGGATCLEIPRVTANDAGWYQCTAQNIAGSTANRARLYVEVPREQPNYEQRRLNLPRPTKVIEPEPIPGPEIIYLRHVERAKPHLRPGEEDRVYPPPQFIIPLQNVQQTEGGRVHMEARIEPVGDPTMVVEWYLNGRPLAASARATSVFKFGFIALDLLSIMGHDSGEYMCRVTNASGVAESRAILSVVQRPSIEQSSQNPNSLQYINQLEDYSRYQRTESIDEQLNQAPQFIRPLRDLGEFEEGKNVHFEAQVTPVNDPSMRVEWYKDGLPITASSRITAIFNFGYVSLNILHLRAEDAGTYTVRAVNRIGEAISQSSIRVHSRSQVTADLGIPEQQRYIEKVEELEDYRKSQQRRHVQEAAEAIAPPQFKTPIQNQLDLREHAHAHFEARLEPVGDSTMRVEWLKDGQPLEASSRITTYHNFGYVALTIKQLTIYDAGTYTCRAYNAMGQDTTVAQLTVISKNEIVSESQHPGGLQKIQHLEDSSRYGRREEEETYITQAPRFLGPLKGTTKILEGQRAHFEARVEPQSDLGLVIEWYHNGRSITAANRIQTYYDFGYVALDISQVRAEDAGVYLVVARNKLGEAQQQATMIVETRSSIDTSSMHRGLYEKTQNLENKPFVEPQYDIEEISKSKPVFVTPLSDPKPIHDGKNIHLECRLEPMGDPTMRVEWFHNGRPVTVGSRFRTYYDFGFVALDIIKATAADSGEYTVRATNHLGTAHTSACVRVIDHTDVVTETQNEQSLEQIQLLEDSRRRHHQEEDITIMQAPQFTRGLHNIETIEGTNVHLECRLQPVGDPSMRIEWFVNGKPVKTGHRFRPAYEFDYVALDLLGCYAIDSGVYTCQARNQLGEAVTSCSVRIIAKNDLILETQNESGLQKIQYLEDSTRHRRSEFVDEVVNIRPRFLTHPKSLTNTREGGHAHFECKIEPVTDPNLKVEWFKNGRPITVGHRFRPIHDFGYVALDIVHLIAEDSGVYTCRAVNLIGSDETQVELQCRSGEQIVTVTQNEAGLEQIHYLEDRSRYTRREEIDESTKQAPVFTTSLKNVEIKENQRAHFECRLIPVSDPSMRVEWYHNNLPLKSGSRFTETNNFGFVALDIMSTLPEDAGTYTCRAYNAVGEAITSAVAVVHTKKSIYLESQHETALPRLQHLEDGSKRQRISVQDEFVSQAPVFTMPVRDVRVAENQAVHFEARLIPVGDPKLTVEWLRNGQPIEASNRTTTMHDFGYVALNMKYVNPEDSGTYTCRAVNELGQAVTSASLIVQSKTSIQLETQHEAAMHKIHQLEDHSRYQRREEEEYTVTTAPVFVTKLIGPSNLVEGQSAHYECRIEPYPDPNLKVEWFHNGKPLSTGHRFRTTYDFGFAALDILTVYAEDSGEYTCRVTNNLGEAINSIVLNVTSRSSIIHETQHEEALTKIQHLEDTSRFQRKTDEEQFHAERPQFGRPLRNAKVNEGAPVHLEATLIPVNDPTMKVEWYCNGRPIQTGHRFKTTYDFGFVALDILYAHAEDTGTYMCKAKNAIGEAVTTCAVNVTANKTLDLDTLDAQRLEKIRQLETYAPPPKPVVEEKGQKPIFLTPLSNLEHLKEGEHAHLECRVEPINDPNLKIEWFCNGKQLPTGHRYRTTHDFGYVALDILYVYGEDTGTYICKATNQLGEAVNTCNVRVLNRRSMILDTQHPDALEKIQKLESKVPNARTEVGDAPISPPHFTAELRGSTEIYEGQTAHFEAQVAPVHDPNLRIEFYHNGKPLPSASRFHITFDFGYVSLDITHAVAEDAGEYSVRAVNALGQAVSSTNLRVIPRGTIISDTQHPEGLEKIRKLESTAPHQRQEPETPGTRQRPVFTQPLQNIDRINEHQTAHFEARLIPVGDPNLKVEWYRNEKIIEDSSRITKQHDFGFVSLDISHIRKEDEGVYMCRAVNPLGEAVTTASMRVVSEASIQMDTQHPDSISRIHQLEKPLAPRPTEPERLFEKPIFTQLLTGPSELWEGTHAHFEARVVPVGDPSLKFEWFINGVELQMGSRLRTTHDFGFVTLDITAVVPEDAGVYMCRAYNAAGEAVSSTAMKVKTKSNIDGQPLIPESWEAIRLKEAAMNRVPEMFVDSTPQQAPVFTTHLQSYDKLHEGQHVLLEAQVEPRADPNLRIEWFKNGISLTTGSRIRSTFDFGLVTLSINGLRADDSAIYTCKATNQVGEAVSTSSLKIEDRHWLQAESLHPDSLPRIGELEAPKEGRPEAPEPTYETPVFITHLNNIECKESDNVRFECNVEPARDPTMSIEWFYNGQPLQAAAKFKSIYDFGYCALDLTNSYAENSGVYTCKATNSKGSATTSGTLKCTGGKTMFLDTQHPQGEAGLEAVQETEEELANRYTSKTTKPETQYPPPVWTKPLQAEFHLSEAQPIHLEANVEPKEDPNLFIEWYFNGKMLNHGSRFKMTSEFGFVTMDMIEVYARDQGIYTCKAYNKAGEAFTSTTIFCSSKENIIESTQHPKGAEGLEQIQDLEDSLRKDGSKPEQPDLGIPPRFTTEFVNIADIGEGELAHFEANLIPVGDQSMVIEWFYNGKVLEASHRVRTIYAFGTVALEVLGTKIEDTGTYTCRATNKHGTAEISCNLECVDKPRGQKPRFTSHIQPLEGLKDGQSAHFECTLIPVNDPDLKVEWYHNGKLMRHSNRIKTVSDFGYVVLDISYLQDHDSGEYVCRAWNKYGEDFTRTTLNCGGRGGVFYDSLQPDSLQRIRELECPQGQQADTSAPLVAEPPKFITQIVDVTKLVEGQSAHFEARLTPITDPDLVVEWYFNGKKLPHGHRFRTFHDFGIVILDILYCYEENSGVYEARARNKYGEDVTRASLKCASKSSLILDSQLPRGMEGGLEKIANLEYSMVRTREETTEETKGKAPVFTVPLENIENLREGENAHFEARITPADDPKLKVEWYWNGRPLKAGSRFRTFCDFGFVILEISPVYPEDSGEYSCRAINEYGEAVTTATMKIQGKRSIIMESQLPKGMEGTIDRIAELEGLGSRSTEFVPDDDTGKPPEFITSPFDMVIGENALAHFECRLQPINDPSMRVDWFHNGKALWAGSRIKTINDFGFVILEIAGCYQRDSGLYTCKATNKHGEATVSCKLQVKGRQGIVMEPQLPSNFRTGTESLQKLEETMHKREELVTEDEQPNPPKFTEEIKDNLDVPEGGPIHFDCRVEPVGDPTMRIEWFYNGHVMATGSRVHQLNDFGFIALDVDYIYARDSGEYTCRATNKWGTATTSAKVTCKGKHNIVYESQLPEGMTSEKLKELERGRIPEAPKVVEEVFGPPKFTTQITSVTVDEAEAVRFECQVEPKTDPSLRVEWYRNGKPLPSGHRYRNIFDMGFVSLDILYVYGEDSGEYVCRAINNYGEDRTRATVSCKKLPTILLQNQVPRGMKRSDALTQMEATIKKYTSEVHLTEDDLFDPDRKQPPRFVTQIKEQLTLTEMAVTKFECQLAPVGDPNMKVEWFFNGKPLLHKNRFQPIYDFGYVAMNFGWVYPEDSGEYVCRATNLYGKDETRAIIKVSGKPGIVYDSQLPAHMQSIDRIREMEASWQVVPDEVDPDAKPRTKPVFVSKLEPQTVEEGDPARFCVRVTGHPRPRVMWLINGHTVVHGSRYKLTNDGMFHLDVPKTRQYDTGKVEVIARNSVGESIATTELKVVARSDDYRNVLKNSPRPWYDYELAAYQKERQENELEKVFDERKQVLSEQSSHTLKGVEHLKPKQYKPPTPDWQQNVKAKKSEDYYNKLQTLETEQLLKETNLRRDTHQYAIPGEKVVSSSQAKGMAQSYEENLQEKTSTTEVQAAPPKGIAQPSESSVHGREVHMNKQQQVQKEIQGDLEITRKITATETTEVEHKGTIQERVVQGPVKPAKAPVFTKKIQPCRVFENEQAKFEVEFEGEPNPTVKWYRESFPIQNSPDLQIHTFSGKSILIIRQVFVEDSAVFSCVAENRGGTAKCSANLVVEERRRAGKGGIQPPSFVTTIQSTTVATGQLARFDAKVTGTRPLDVYWLKNGMKIQPSIKFKMLEEDSVHTLLIIEPFAEDSGRYECVAVNAAGEARCDGDCIVQSPSKPEKPTTPGSEKAPHIVEQLKSQTVEEGSKVIFRCRVDGKPTPTARWMRGENFVKPSRYFQMSRQGEYYQLVISEAFPEDEGTYKCVAENKLGSIQTSAQLKVRPIENLDAPPTITALKDVSVTEGMPAQFKTTVTGKVKATSVQWFREGQLIPETPDFQMIFDGNSAVLLIGTTYEEDSGIFTVRVTSSTGQVESSAKLTVKSKD

SEQ ID NO: 2788 - DNA, 5768 bp, DROSOPHILA
catcaaaatcttcaacgctggatccaaaaacaacaacaacaagtcaccagtaaaacgcatacagacatacagacacacacacacacagtcagctcctgttcgaaaaaagaaggaaagtgggatcaggtgcagtgtgtccagagttttgaacgcaaaggtaaaaactaatctaataacaagtacaaaattgagtaatgcattattattcccatgttttgtagttttcgatcctaaaattattgtaagatttgttattatttccctatttaacattcgagtgcatcaaatgtgctactttaaagttgacgcacttcaaatatgaaactatttatacttgtactttaaatatttgatgttgtgttagagaatttttgaaaatttgtttctcatttgagagttattagattactttttacgctggtcacactgaacaggtgtcgtcaactatattctttgcattttatttattaagtgaaatgaaaggggctaaaccgatttagatatatagtatctttaaaatatttagtcaagtggccgtatacccacccacctttgttccctcatttccaatacttccctcctgcccgcaaagagtccatttcgatttcgaatcgcccagcctgtttgcttcctcttcaaagcgtactactactacttcaaaaacttggatatatcgaaagctgctgaatgcagaaaatctacaaacaacaaaaacaataagaacagaaaacaaaaattcaaaactgaacgtgacccgaattcgaatgcgaaatcgttcggcgttccctttcgaaatctgagagtgcatatacttatatagaaatacatatacataaacatataaacaatataccgttagcttatttatatatgtacacacaacacacacacacacacacagacatagagaacatatacacccacacaaatccagacctgttcccaaattcgaatcgggtttaaattgagcgaaaccggaaattcagttgttttcactcaccagcgaagccaagaaattgttaagttcttcgatggggtcaaaatcgccgctattcccgagttcgttaaattcaagatcaaatgcgaaaacgagaacagaactgatattgaaaacaaacaagaacaacaacaaacaaaacaaaacggaaaccaacaaaatattttatgtatttttttaatgtatttaagaataattaagattaaaacaagaaaaaacaaaaatgagagaaagcagttggcgtaagatgatgataatgcagttatcgcaggaattatatagcaaaaagcagagataaggttgataatgttgagcaaggaaatgaaatgataatgaatttcgatgccagcgaatgaggagaaaacaataaagatgaagaaaaacgaaaagtgttgttatttatttgggaaatctaatgtcattagctctgatgaaatctggagaagtaaaacaaaaccccattttccatgccccaattcaaacaagcagatataattttttcaattttttttttattttatttttaaataaattagaaaattcttcgtaaaatcgaagaacccatttatgaagcctggccgatgttgtgtgccgctgctctctagtggtttccgtatgatttcgtggtttatctcttgctcttctgccgttcccattcctcatcgacctattctcctcctccgcacgacccgcagctccctggctcctctctctctctctttcttctatatctcatcaatacaatacagtccgattccccgatatattcgcatatatcgcaggaattgggaccacattattcgcttatacatataacatttgtctgtttcttgctaccgctttacatatccgtaggctaacctattgatttgcgactcctcggggatttcggggcttacagtcgtcacatttatgtgtatacatatataaaaaaaaatttacagttttacataattatgcagctaacgtgagggaagtgggcggaagggcgtgagaaatgcgaggaacactcgaataaatcgttattacattctctcatattttttgccgacaaaaaaaaaaatactttaaatttaagtgtagaaaaaaaaaaaatgtataaaaaaaggattgttttttttcttgtgttttgttttcatgtttttcgaatgaatttctttctggaaattttgccttaaaggtcgaatggatggggggatggctgctgagggctgtaaagtagtattatcttttgctgttgtgatctttctccatctttctcttcttcttgttgttgttgttgttgttgtggctactgcgtttgcaattaagttataattgttttttttttcagtctgaattccaacactatgatctcgaatggatgcaggctgggctgtgtgtaagttatgtgaggggggggtggccatcttacagctcgtccttgagatcggcatcatcgccgccctctggaggaggagcaccgccagcaccctggtacagcttagcaatcacgggctgaacgatggcctccagatccttcttctgcttcttgtactcctcgggatcggcatcgggattctgttccagccacttgatcgactcatcgatggccgactccagcttgttcttctcatcgtcgctcagcttggcacccagcttgtccttgtcaccgatctggttcttcaggctgtaggcatacgattccagttcgttgcgggactccacacgctccttcagcttcttgtcctcatcggcgaatttctcggcatcgcggatcatgcgatcgatatcctcgggcgtcaggcggttctggtcgttggtgatgacgatcttttccttgttaccggtacccttgtcctcggcactgacctgcaggatgccgttggcgtcgatctcgaacgaaacctcaatctggggaatgccacggggtgctggtgggatgccagtcagatcgaacttgcccaacagatggttgtccttggtcatgggacgctcgccctcgtacacctggatggtgacggtgtgctggttatcggaggcagtggagaacacctgcgacttcttggtggggatgacggtgttgcggggaatcagcttggtcatcacaccgccgacggtctcaatacccatggtcagtgggttcacatcgagcaggacaatagcatcggtatcttgttcgccagagagcacgccagcctgcacagcagcaccgtaggccacagcctcatcgggattgatgcctcgggatggttccttgccgccgaagaagtccttgaccagctgctgcaccttggggatacgagtggagccaccgaccagcacaatctcgtgcacgtccttcttgttcatgtcagcatcctcgagcaccttctgcactggcttcagggtggaacggaatagatccaggttgagctcctcgaacttggcacgggtcagggtctcggagaagtcatcgccctcgaagaaggattcaatttcgatgcgcacctggtgggaaccagacagggcacgcttggccttctcaacctcacgacgcagcttctgaacagcgcggttgtccttgcgaatgtccttgcccttcttcttcttgtacagcttgatgaagtgatccatcacacgctgatcgaagtcctcacctcccaaatgagtatcaccgttggtggccaccacctcgaacactccgttatcgatggtcagcagggagacatcgaaggtgccgccgcccaaatcgaacacaagcacgttcttctccccctccttcttgtccagaccgtaggcaatagccgcagcagtgggttcgttgatgatgcgcatcacctgcagaccggcaataacaccagcatccttggtggcctgacgctgggcatcgttgaagtaggctggcacggtaacgacggcatgggtgaccttcttgcccagataagcttcagcggtttccttcatcttgcccagaaccatggcggagatctcctcgggtgcgaacaccttggcgccctgtgacgtgtccacgctgatgtggggcttcgagttcttctcgacaaccttgaatgggaagaacttgatgtcgtgttgcacattggtgtcggaccattcgcgaccgatcagacgcttggcatcgaagaccgtgttctcgggattggtggtcaactgattcttggcggcatctccaatgagacgctcaccgtcagcggtgaaagcgacgtaggagggagtgatgcggttaccctgatcgttggcgatgatctcaacgcgtccgttcttgtacacaccaacgctgtaagagaatttgggtaagaaatatttagattaataacgaatcgtaaatgaaagcagtggtagagatacctatctacaagttgagtactgataaacttgaatttgaggcgcttaactacagcaaaaatttcttattataatgcgcacgtggaagtgtgtcagctaaaattacaagtatgggagtatagataaagtcacctattttttaagaagtaaaatcttatacattctttttacgttattttaaggtcaaatctactttacaaatattttgttataaatgtgatcaatttgaaatgtacacgtctaaagcataaaaacttggtattacgaaaatcaacagtagaatttatgaccactgtatactttatgatcaagatatctcaagtaagcattaatgggttttagagccgaaggacgagcatatctaacttaccaggaatacgtggtgcccaaatcaatgccgatcactgtgcccagctccttgtccttttccttcttctcctcgcccagcgagaggccaacgaaggccacgacggccagtaatatgcataacttcatattgaagatctctcaggaaaactgcaaataagaaagggattgcgttaattttcgcccaattatttcaacctcggctttttgtacacgtcaacacaatcacacacacgcaaacataaatggccagtgttctttttggctctcgctctccctctgcgagagaaccagtactgatgacgtcggccagattgtcaactgttaacatgtaccgttagctgtgccactttggcaacattattattttaaacacgattctaccagattcagtaccttataaatcttactagtagtcaagatcggataaagaacacgtctactccaatggctaactgcccggcaactgctaagcggtgcgctcatctccgttctgctgacattgaccgacgccgacgtcgccggaaagcgagagagagagagcagcgaaatttgtatacgtgtaacatttttctggttctttctttgctgctgccggtgagagagcggccaaataactggtttaattcttttcgttatttcacgcaccgcaagaaagtccccctcccaacgcacaattccagaaggaaagctggatttgcacagctgtttgtggcttaaccacttaggtattttattcttttttctatgccacactgacgtgtactttgcgaccatcggagagagacacacagagagagcaaagcgagtgcttataaatcagccaaataaatgacgtgtaccaagcggattgaacgcagacaaacgcacacagataggcctactcccactcacacagacggcaaaatgcgcaggcgcttcgcggtcttttaaaaaaaagaagtaaatgtaagcaaaattaaccgtaaattactgtaaaaggaaaacaagaacttcacctaaatgcaagcttaggctgtaagaaactaatacgaagaagaagacaaagttcattcaccgaacttgtcacttgtcacgacca

SEQ ID NO: 2789 - DNA, 3378 bp, DROSOPHILA
atgaagttatgcatattactggccgtcgtggccttcgttggcctctcgctgggcgaggagaagaaggaaaaggacaaggagctgggcacagtgatcggcattgatttgggcaccacgtattcctgcgttggtgtgtacaagaacggacgcgttgagatcatcgccaacgatcagggtaaccgcatcactccctcctacgtcgctttcaccgctgacggtgagcgtctcattggagatgccgccaagaatcagttgaccaccaatcccgagaacacggtcttcgatgccaagcgtctgatcggtcgcgaatggtccgacaccaatgtgcaacacgacatcaagttcttcccattcaaggttgtcgagaagaactcgaagccccacatcagcgtggacacgtcacagggcgccaaggtgttcgcacccgaggagatctccgccatggttctgggcaagatgaaggaaaccgctgaagcttatctgggcaagaaggtcacccatgccgtcgttaccgtgccagcctacttcaacgatgcccagcgtcaggccaccaaggatgctggtgttattgccggtctgcaggtgatgcgcatcatcaacgaacccactgctgcggctattgcctacggtctggacaagaaggagggggagaagaacgtgcttgtgttcgatttgggcggcggcaccttcgatgtctccctgctgaccatcgataacggagtgttcgaggtggtggccaccaacggtgatactcatttgggaggtgaggacttcgatcagcgtgtgatggatcacttcatcaagctgtacaagaagaagaagggcaaggacattcgcaaggacaaccgcgctgttcagaagctgcgtcgtgaggttgagaaggccaagcgtgccctgtctggttcccaccaggtgcgcatcgaaattgaatccttcttcgagggcgatgacttctccgagaccctgacccgtgccaagttcgaggagctcaacctggatctattccgttccaccctgaagccagtgcagaaggtgctcgaggatgctgacatgaacaagaaggacgtgcacgagattgtgctggtcggtggctccactcgtatccccaaggtgcagcagctggtcaaggacttcttcggcggcaaggaaccatcccgaggcatcaatcccgatgaggctgtggcctacggtgctgctgtgcaggctggcgtgctctctggcgaacaagataccgatgctattgtcctgctcgatgtgaacccactgaccatgggtattgagaccgtcggcggtgtgatgaccaagctgattccccgcaacaccgtcatccccaccaagaagtcgcaggtgttctccactgcctccgataaccagcacaccgtcaccatccaggtgtacgagggcgagcgtcccatgaccaaggacaaccatctgttgggcaagttcgatctgactggcatcccaccagcaccccgtggcattccccagattgaggtttcgttcgagatcgacgccaacggcatcctgcaggtcagtgccgaggacaagggtaccggtaacaaggaaaagatcgtcatcaccaacgaccagaaccgcctgacgcccgaggatatcgatcgcatgatccgcgatgccgagaaattcgccgatgaggacaagaagctgaaggagcgtgtggagtcccgcaacgaactggaatcgtatgcctacagcctgaagaaccagatcggtgacaaggacaagctgggtgccaagctgagcgacgatgagaagaacaagctggagtcggccatcgatgagtcgatcaagtggctggaacagaatcccgatgccgatcccgaggagtacaagaagcagaagaaggatctggaggccatcgttcagcccgtgattgctaagctgtaccagggtgctggcggtgctcctcctccagagggcggcgatgatgccgatctcaaggacgagctgtaagatggccacccccccctcacataacttacacacagcccagcctgcatccattcgagatcatagtgttggaattcagactgaaaaaaaaaacaattataacttaattgcaaacgcagtagccacaacaacaacaacaacaacaagaagaagagaaagatggagaaagatcacaacagcaaaagataatactactttacagccctcagcagccatccccccatccattcgacctttaaggcaaaatttccagaaagaaattcattcgaaaaacatgaaaacaaaacacaagaaaaaaaacaatcctttttttatacattttttttttttctacacttaaatttaaagtatttttttttttgtcggcaaaaaatatgagagaatgtaataacgatttattcgagtgttcctcgcatttctcacgcccttccgcccacttccctcacgttagctgcataattatgtaaaactgtaaatttttttttatatatgtatacacataaatgtgacgactgtaagccccgaaatccccgaggagtcgcaaatcaataggttagcctacggatatgtaaagcggtagcaagaaacagacaaatgttatatgtataagcgaataatgtggtcccaattcctgcgatatatgcgaatatatcggggaatcggactgtattgtattgatgagatatagaagaaagagagagagagaggagccagggagctgcgggtcgtgcggaggaggagaataggtcgatgaggaatgggaacggcagaagagcaagagataaaccacgaaatcatacggaaaccactagagagcagcggcacacaacatcggccaggcttcataaatgggttcttcgattttacgaagaattttctaatttatttaaaaataaaataaaaaaaaaattgaaaaaattatatctgcttgtttgaattggggcatggaaaatggggttttgttttacttctccagatttcatcagagctaatgacattagatttcccaaataaataacaacacttttcgtttttcttcatctttattgttttctcctcattcgctggcatcgaaattcattatcatttcatttccttgctcaacattatcaaccttatctctgctttttgctatataattcctgcgataactgcattatcatcatcttacgccaactgctttctctcatttttgttttttcttgttttaatcttaattattcttaaatacattaaaaaaatacataaaatattttgttggtttccgttttgttttgtttgttgttgttcttgtttgttttcaatatcagttctgttctcgttttcgcatttgatcttgaatttaacgaactcgggaatagcggcgattttgaccccatcgaagaacttaacaatttcttggcttcgctg

SEQ ID NO: 2790 - protein, 656 aa, DROSOPHILA
MKLCILLAVVAFVGLSLGEEKKEKDKELGTVIGIDLGTTYSCVGVYKNGRVEIIANDQGNRITPSYVAFTADGERLIGDAAKNQLTTNPENTVFDAKRLIGREWSDTNVQHDIKFFPFKVVEKNSKPHISVDTSQGAKVFAPEEISAMVLGKMKETAEAYLGKKVTHAVVTVPAYFNDAQRQATKDAGVIAGLQVMRIINEPTAAAIAYGLDKKEGEKNVLVFDLGGGTFDVSLLTIDNGVFEVVATNGDTHLGGEDFDQRVMDHFIKLYKKKKGKDIRKDNRAVQKLRREVEKAKRALSGSHQVRIEIESFFEGDDFSETLTRAKFEELNLDLFRSTLKPVQKVLEDADMNKKDVHEIVLVGGSTRIPKVQQLVKDFFGGKEPSRGINPDEAVAYGAAVQAGVLSGEQDTDAIVLLDVNPLTMGIETVGGVMTKLIPRNTVIPTKKSQVFSTASDNQHTVTIQVYEGERPMTKDNHLLGKFDLTGIPPAPRGIPQIEVSFEIDANGILQVSAEDKGTGNKEKIVITNDQNRLTPEDIDRMIRDAEKFADEDKKLKERVESRNELESYAYSLKNQIGDKDKLGAKLSDDEKNKLESAIDESIKWLEQNPDADPEEYKKQKKDLEAIVQPVIAKLYQGAGGAPPPEGGDDADLKDEL

SEQ ID NO: 2791 - DNA, 10019 bp, DROSOPHILA
ctcgatttgcttttaactcgcttttttcgcactttttgcaggaaatcacttttctgtatccagggagcagcctctagcgctagtgctgccattcacgcacactcactcactcgcacacatacacacacactaacggggactttatgcatttgatcgaagcacttttcgccagtcaatggaattttctcgcgctattctttcacttttctccgctgcgaatgcaattaagttggacttttcttggccttatacatttctcggccagatacatatactgcgcgtgtgtgtatgtgtgtgtgcatgcgggagtgtattggtattcgtgtctatgtgtgttcctaacccaaaaatgtattgtgcggcagctgaggtggcccgttttcggcaacgccgttgtccaactaactaccctcaaagaactgagcacggctcgtgcaagccagttgctaatatagtcgccgattcgctggcaagtggtgagttttccaacttttccttaccgaccaccctctgctttcctcctggcctaggcatagggagagctagccggagagcgcgcgattgcaatcaatgaattttcctttcggcgctcgcgcagttcagtgagtgctggcatctcgagctgccagcttaatggattccggaattccaataccaaaatatggagccagcgcattgcgttacgctaaacgaatgtgggtcttacgtattgctccacattcagcgttggcaatgctgcgcgccaactattcaaaccgccctcaaaattagactatgaactcgttggttttaggaacagttttctataagaacagattatagattcttaaagatttggatttcattattttggaaactatttttaaggaataagaaatctgaaacagcagactgaatgtatcagctcacctagattagcttttttgcagaaggttcttttctaagaaaacttaaatacttatttgaattatacgaacttaataataagacagtattcgttggggatgttaacttgttacgtttattctggaatgtgtctgtatggtggcgcggtgcgtatctgcggttgtaatacatttctcataatacttaatcaacgcatttcctatgacatagccctagttctagcgatatgctcccgctacccgtctatttacaggtgaactcctcgtagctctcgtcgcactcgtcacacttgacctcgcagcaccagcggaattggcagcggcactgcgtggtccttcgaatgtgctgcgtgttgtggccacgcccacagcagagcagatcgcagctctgggggccgtggccggtccgctggcaggtccgacctgaggtgccctggctgcccgtctgcagacttcgctcgcagtagttgggcgacgcctccaggtagatcagctccatgcgcttcggccaatcgaggaccggtttctgggcacgagcggtgccggcatgcttctttctgcaagaaattaaaagtggaaagaggtatgtgttaatatgtgggatcgaaaatgtgttgatattataccgtgctacagaaggcacagcaaacatattgcatttaaaaaggacttaatgactactatgtgttttattctttttagaagaatacttatttagccattagattattgcctacatatcatgcaacatcttgcaagattcccatttctcacctgcttaatactaatctcagtccacgtttgcctttgacggcttgaacagttttggctttttgatacttcagcatgagtctatcgccaaccagtcgaaagggcggcaggctcttccagcaggtcttcatcacgcaggagccactgacgccatggcacttgcagtccgtgcgcagcatcttcttgaccagctgataagagaaaaacataactattaactaggccatatttattattaaattttatgcatgcgcaccgttctccctgctcggttattgtgcaggttcatcagcgtgcgggagtcgcgctccaattcgcgggcatccatgaatctgcgcgcataccgcatcccaaagtccacgtccgccgagcagccgccccacttccagggctcgtcgggcgtaccgccgccagtgggcgtggctttgtgccgcacatcacagccgcaggtggagatgttgccgcgggcacaggcggcggtcaccgcgtacgccgctccggcacttgctatcgcataggtgtaggcagcctcacgagaagctggaatatgatatttggttatttaggtactagagtaacgggtttcgagtctgtatagaatatacagtatagcagatggtaaccaattaccaatcaattgttccacaacataaagaaataggttgttcaagtatattgtaaacggcagtaccttttggaacgatttttcataagttaagaaggtctgatttaaattaatacgaagaaattgacacaaaactacatctaaatttataaaatgaatatcaaattaaaccaatttaccgatttggttgtaaaaaatatgggttgcgctccagatggaaactaatatatatgacaccctgcaagggcgttagcatcgaaatgggattgctatgcagatgcagatgtagatgcactcacctgtgggtatgacatgggcgaagacgttgcgctgccacacctccgagcagttccagcggtgtcctcggaactggtgctggcactcctgggcgcccaattggtggccctcgcccagggcaatcagtgcgtcgggcatctcgcggcacatatttcgctggcccggggtcaggcccggaatccggccacagagcatgacggatgtaaagctggacactaatctgacaagaaggcaaaacaaacagaaccataaataacaccctgtagagccacaataggcaaataaataaataaataaatgacaaacaaacgccgatcgatcgatcgatcgatcccaatccaaatcgatcgttcgattggcaatggctggctgcaaagctgaaaagtcgtgccaagcaaacgccgacggctcttttgggctggctgaatgcatttccatttcgtttgccattggaggcttcagtttctgctccgagctgtgagctccaagccgcgaaccgcagctccagatctcagccaatcgagtcgagtctgtccgagattaatgcgctgcagttgtctgccgcacagggacaaatttatttgtaatttattaatcaaactgtatgggtttttcttgaaaaattaagtgaatatggaattcatatttttcggttcttggtctgaactatattttgacctttttctttaaaatggcaaagcatttctatgggtatatattacatacaaattcgaatttctgatatatacaatttcatggttttttccctaataattgattgattaaaaagggttaagatgactttcatttatgactccaagtttcctctatacactcattgaggtttttaaatatttttatatttatttgctataccccaagttcttttcttcctgtgcatttgtggcaggtggctgtgggcttgggcgttgtactgtcagctttagtcaaatcccagccgccagctgtattattagccataattgcgcggagatgcagatggagatggagaagcttggccatccgtcgtgactcgctggagtgtctaatcaagtcgcgttttctcgagcttcggctgcagctccacttgagttgtcgggttaaatggcggaattaatgctggcagtcaaaaatggcaaatgggattaatgagttttgacaatgcgttgcaaattgccaatttcagatatttctctcccccaatcgagctgcactgccacccacctgccgcccacctgccacccactcccgaaaagtgtcggctgtctaacctgtcgactcgcggctgccaaaccaatcagcatcaaacagctgcggcaataatcatgcgatcgatcgatcgcctgctcgccttttgtccatgtaccgggttacagccaggaaaagcctgagaaacacatcccggggccaaacaactggcgcacgggtgggcaaccccgatattaaaatacaaatgcaacgtaaactccgattgccagccacatggctacaccggaaaatatatacatctattgaaataagatatggtagcaagccatgtacaggtgcgaataggaaaactaaagggtttgacttagaaattcagcaactaaatgtgtgattttcattgttatggaagcctgaatatttaacattcaacaaacatacaaaagaactcagctttatctagaaatttcataacacttcttaagaatcgtgttaaaattgaaaaataagctagtaacattacaattcctgatatattttagtttcttctgtaggagtccacatccaacatatatttctctaggtgtccacaaatgtaaatgcctttcgatacctgccactcgagtgtctccaactccagctcttactctgccccaagtggagctggagctccagcttacgaggcactcttaaacgcagcaattaaatcaatttacagaaattacacattttaccaaccgcagaggagcacgaagacatgagctcaaaccctcggcaaaacgtcgatggtcgaacgttgatttctgatatgagatcgcttttgttgttgcagttttgtcgaacacgctgttaacatggctcaaactggagtcgagcgtcgacgacgatcgtcggcgaaattggtggttaaactaataattaggcccgtttaacagggaaaaaagcatggcaccgcagaccttcaaccgactctgtggccaaagttagcccgaaatatgcgatcgatctgtcagcgcatccgctcggccagtcagtcaaccaatcagtcagtcagtcagccagtcaggcagtcgctcattcagtcaatagcttttacgtgcgttcgcccagcgtgaccgtcacgtcccccgcaccccaccacgataaatattgtggagggtatatagtactccaaaactccgaagccggcaatcaaggcggccatctccagctcctcgcaacccttttgtttttagctgctttatttaatttgtcgcttggcccgcccgtctgctgtttgcctgttgcatgtcaacgccgacaatttcatcatcatcatcatcgccattaccagaacagatttcagttccagacccatgcacagcgagaaaattggacgaactgcacgcttttataatactaatttcaattgagattcgactagtatctgcttatacatattgtgttgcttaaccaagataatgagatcatttcttactatataaattattatgaatggaaattgagatcacatgcaatgacgctattagctgtataaatcataaggtatttagtgtaactaggcaatcaataaaaataattactaactttccagcaagctacaggtgttttattttcacagtattgccgtactaagttattgctttctcatctcttccatttatgaacgtgcttgggacatcgtctttcctttttttctctctgtgtaaagcctatcccaatccacaccatgatcttcaggccctcaaagaatccgagtcacgtgtgcttgatttgcgctttgtttgctggagtacccctttattgtcgcagtccttggactgctttacttcttcatttatctctggttctatatcggggttcccactcgcatcgcgaccctttgtgctgcgtaagagcaaggacctgccctgaacttgataccacttccgcctccgccaggcacccccttccagcgaatcacaaatagagctggcatttacaaaatgccaaactagttccattgacagtcttatggcttctgctgtccgacaaattggtgattcctctggcactaatttgcgcaaaaatatttgccacgacgatgtggactcattaaaaatggattaagcctggtgcataattcagcggcagccgaagcgcagccacttatgagttggccgcaagcagcataaatggccaataacaagctccaagccaacagcatcggcagcagcagcagcagcaaggaaaactaaaaacccagaaacgctaacttaatgcgcacttcggagcctcataaaaatatgactttaatattttcacgcgcaggcgtagcagcctgctccccactgcagcactgcagcactgcagcactgcagcaaccaacggtgatccccgatagccgcaataccccggctttatccacggacgtggggctagggccctgtcataattgtgcgaatctagtcgaccaaatagtttcgacccaccgctgcgcaggcggctgttgtttgggcctggctatccatggaaacgcgagacttggtcttgaccagtagcgcctccaatagcaggcagatatatatggccggcgctccgtctggtaattacatggcttgctgacatgttcatggccctcctcggactcttttactactcctcctcctccatggccataaccggcacacagccaaagttgggccaacagccaagcgccaattggaggcggaagcaacaaaggcgccttaatccggccaaaacaatgcgttggtccagggaaaaaatgttcattgcggtccctcgatccctctgtccctctctccatccctctgaccctcggttttcggggcatttgaaagttttgtgtgcgctgataaaacagctttactctacagctgcatgtaaagtgggcggggttgggaaggagtggtcggcggtgggagcggacaaaccgaaaacccataaaggctgttcaacatgccatcaataaaacacaaatattcccaaggggggcggaggagccggtcggtggcagcaaggagcagcggagcggagctgggcaaaccatggtcatggccaagaaaaatgtcgctgccacgctcagacaaacggccggcaacaattgctggccatcctggccacaaaaacgacgacgtaattgaccagagaaagacatatgtacgacactgcgagaaaaggtgagtgcagtctgggaaaataccatcattgatggaaggtcatactttaagagtagttccaatcattccaagttcttatgggtttagaacgtttctaccattgtaatggattacttaaaatagggttgaagataattccaattttatctttaatttttcgatatatttacagaatgtgtaaatttgtgcgtaagtcgatcccacactatttcactcagtgtgcgcatgccgtggccatgtaacaggtaaaagccaaaacggatcgttcgtcatggacaattggcagagaccaagtggtcgaatggccactcaggcagttagccagtcgggcagccgctcccgcccttgccatccaattccctcccattccgtccaatcccatcccatcccatcccatcacgccctggcaaacagatcaacgcagatagttttgtttgggctttgaggtttgcagtcgatcactcatccatagccgcagaaaaatggtaagagcaaaatgcgccaacaatgccagccgaccagtgaccagaccaggcacagattcctcgaccaccgcgccgacggctcccgcacagagactcaattctgcaggttggcctgggaaacgtggaaatcttgcaacctggcagccgggcaacttgcaactggcaacaggcaagagtttatgccattttgggcttgtaaatgcagccacaactggcgcagagtgatcttgatcgcaatttgagcgtttgtctgcacgttcatgcgttccaattgtccacgtaagagcacgagtacgagtacgagtacgagaacgagatgtatctgaaggatgcagctggtttcctgccttgaaattgcagtaacctcaattacacgagctaagcatttctgggttaagaccctttgaaggttttcggtttttttttcggtgaacttcaggttctgttcggcgaagctctgcccacaagaccagcccactgacaggaagggaatgaaagccagaagaggagctaaattggtcaatcggaagtttatatgcccttgcagttacaaaactcgtttaataatatgtatctttctactacttctatagagttagctcaaaattaactaagttttaccttaaatggattgaacttttgtattatgaaattgaatgcaatacttaaagtggaatataacaagaaataccttatttatataaagaaaacagaccaagtaattgttgaatttaagatcacggatccttttcaagcatttcaccaaaatcaaaataccttcatcgagggtataaaacacagaaattggttgggggaacacatcgcgtatctttgagatacactcaacttattgcaactgcaactgcatcaaggcaattagatagcagttgaagcacacacacagagacacacacatagcggcagaggcacgttgatgagtttatggcaaaaattgatttccagttgtcgcagccccgcctaccgccccaatccgattttagacgcggctcttagctgctcctcgctacaaatgagagaccgctgtctttctgtcagttttgtgctttacttgctgcctgccatttaattgccaattttaatgagattttttccagcattttccagcgccccccgtaactttcgatcggccagcaacaactatatagaacgaggcgtttactgtttgggcgttcgataaggatttaacatacatcgcgccgtggcttcgcagataaaattagcgatcgtgtccggcgatgtgcgcgatatggcggcgaaaggtaacgaaagagttgtcaactcgtgcagatctgtcagcgataaaaggaaaggccgcaggaaatgcaaagaaaaccgaatgaaaaacccaacccaacccaacagcgcctgtggatcatggcataagcatggcataactgtgttcggccgttaaagttaatgggcataccgtttatggggctactataccttatttccataatccagagtatgtagattaagagcttgttatgtattttccacatgacgatgcaaatccgaggcacacaacacgaattcgagcccagcagctggcactatcatcatattctattcgcactaaaaaagtctcaatacccaatgcattcgaggcttaatttcccttcctttgccgtttctgctgagcttagcaggctccgatttccacagttccacagttccacaattccgcagggcctttgttttcagccataaaacgccgccattggagccgagaatcgaactattagaagtgaatcgtacgatcggctctgttgttattaatgaaccgaaaacgcagacggcagcattcaatacactctgcgaatatgaccaaatccaaaaccgaagccaagaccgacgatcgaataccgaaatacaatatacggagtatacaaaatacacgcgagcttttgtccatttgttcgtatgctaattaacaccttcttctgctccagccaacggcgtttcaattaagtcatcgcgagatcggatcaccaaacagttttcgggcaacgcgtgcgtttcattcatgcaaatctccggcttggcccgacttggccataactcagagccgaaactgccatcagcggcaacatcatccatcaatggatatcagggggcggggctgtccatcggtccaactgtccaactgtccagtggtccagcggtccagcggtccctcgccgactacacgattttttaatttatgataaagcgcctccgactgtcacaacggaattgcggcaataaccataaacggctcagcaggtgaaaactaccaaaaaagaaaagcacaagaagtgccgaatgccgaatgctgcgaagatcccaaatcttgggatcgtgtagcgcttagacgtcccgggtgcggagattaacataaatgcagctcattagtgacgcaattaaagagccgagccgacaatcggagtggtccaggaacggcgagatggatgtgaatcgttccgactttgtcgagtggagaggaactaagtaatcgctcgaccgacgggtgcgagtgtcgtataagaac

SEQ ID NO: 2792 - DNA, 1236 bp, DROSOPHILA
gtgttgtgtgcctcggatttgcatcgtcatgtggaaaatacataacaagctcttaatctacatactctggattatggaaataagattagtgtccagctttacatccgtcatgctctgtggccggattccgggcctgaccccgggccagcgaaatatgtgccgcgagatgcccgacgcactgattgccctgggcgagggccaccaattgggcgcccaggagtgccagcaccagttccgaggacaccgctggaactgctcggaggtgtggcagcgcaacgtcttcgcccatgtcatacccacagcttctcgtgaggctgcctacacctatgcgatagcaagtgccggagcggcgtacgcggtgaccgccgcctgtgcccgcggcaacatctccacctgcggctgtgatgtgcggcacaaagccacgcccactggcggcggtacgcccgacgagccctggaagtggggcggctgctcggcggacgtggactttgggatgcggtatgcgcgcagattcatggatgcccgcgaattggagcgcgactcccgcacgctgatgaacctgcacaataaccgagcagggagaacgctggtcaagaagatgctgcgcacggactgcaagtgccatggcgtcagtggctcctgcgtgatgaagacctgctggaagagcctgccgccctttcgactggttggcgatagactcatgctgaagtatcaaaaagccaaaactgttcaagccgtcaaaggcaaacgtggactgagattagtattaagcagaaagaagcatgccggcaccgctcgtgcccagaaaccggtcctcgattggccgaagcgcatggagctgatctacctggaggcgtcgcccaactactgcgagcgaagtctgcagacgggcagccagggcacctcaggtcggacctgccagcggaccggccacggcccccagagctgcgatctgctctgctgtgggcgtggccacaacacgcagcacattcgaaggaccacgcagtgccgctgccaattccgctggtgctgcgaggtcaagtgtgacgagtgcgacgagagctacgaggagttcacctgtaaatagacgggtagcgggagcatatcgctagaactagggctatgtcataggaaatgcgttgattaagtattatgagaaatgtattacaaccgcagatacgcaccgcgccaccatacagacacattccagaataaacgtaacaagttaacatcccc

SEQ ID NO: 2793 - protein, 352 aa, DROSOPHILA
MWKIHNKLLIYILWIMEIRLVSSFTSVMLCGRIPGLTPGQRNMCREMPDALIALGEGHQLGAQECQHQFRGHRWNCSEVWQRNVFAHVIPTASREAAYTYAIASAGAAYAVTAACARGNISTCGCDVRHKATPTGGGTPDEPWKWGGCSADVDFGMRYARRFMDARELERDSRTLMNLHNNRAGRTLVKKMLRTDCKCHGVSGSCVMKTCWKSLPPFRLVGDRLMLKYQKAKTVQAVKGKRGLRLVLSRKKHAGTARAQKPVLDWPKRMELIYLEASPNYCERSLQTGSQGTSGRTCQRTGHGPQSCDLLCCGRGHNTQHIRRTTQCRCQFRWCCEVKCDECDESYEEFTCK

SEQ ID NO: 2794 - DNA, 3935 bp, DROSOPHILA
acgttgagtgcctatcgcccccaaaaataaaaaaattaaaacaaagcaaaagctaaagaaaactataaaaaacctagtaattataaagtgcatctagatcttaaatacccttccaaaaaaaaaaaataatagcaaatcatctatcgcaatcaaagcaaccacaactattgtaaatattgtagtgcctgcataatatattcatgtatgcttcaacttagccaatttaaagtaatataaatgccattaaaattgcataattagtatacccataaaaatgatattcgcaaatggcgaaaaggcggaaaagttgcagcagaagaagcggaatatcagtccgacaattaaccaacttaagtgtaattacgaaattttctttttccttcgcttcagtttctacttttgtggctttccccacccgcgctcggtacatttggcgacttttgcggttcccattggggtgaaaagtgccgaaatggggggaaaactgtgggaaaagtgtgggaaaagtgggccggttgggagtctggagtggtgtaaagtgcatccacatcagggttaaaacatttcattagcgtaatttgccttttaactgggcccagacacattcgaattcgaccaggccaatttggtctcattacaggcaaggcgattttttatttcgagtatttcaatccattgaaaagactttattgtttaatatgtttaatttaaatttcaaactgttggtccaacaaattccccaatttctgctacttttctattttgtagtttttttttctcatttcctctacgatgttatttaatttcttaatagagcgatttttggccgctcctttcttaatttcgctcacacttgctattcatgaattaatttcattattaatgtacgaaatgtgtttcaatccaaaaaaggattccgttgcgcgagagaatgaaaagcagagcgacgttaaaaggctcttacattttatttgagcaacacattttaatttgcttggctttaatgggccaaaagttgcacggttggaaagtgtcggcggtggcggatggagagagtcctgaaaggtcctgaatttcctgctgctcctgcctggctggctgttgaattgaaaagctcagccagacacaggctcagacattgacgggctttgtcttcgtgcaggtgttgtgcttggtagttagacggtaagaagacttttacctgcaccatcgcaccatcgcatcatcttaacacccactgaccatttatcagtctggcagttaaacgaggagctgagcaccttttggccattatcaaaatagacaggcgacgttccgatgcgaaatgctgaaagcagttgccattcgaacggcagcaaaaaaaaaacaacttgcaacacccacgccagcagcaacaacggtatattcttaacgcagagtgcggtaaaaaaaaaaaccaacacattgttgtggcaagaaaaaattgaagaagaacactacacaatcgattgttagtttcttggtttgcatggcatgctgcacaatttttctcataacccttcccccaaaaaaccaaaaaaccaactatccaacccacttttctgtgggaaaatcccgaacgaaactcaacaaagaggttttttttttcgtttttggccaaggctttttcgcacacctgtccaggtggtaaatttgtagcttatgttgacttttgcatggcaacattaaaatgaataatatctagttaagctccacacgatttgttaaatattgttttaaagttaaataataggatatgcagacttaccagtgggcttcgactaatcacagattgttgtttcagctgcggaggagttggtggcagtgggttgcttccataatccgtgacctgctgctccggtgcaatgccaaagatgaagggtcctccacctactcctagtgccactcctgatcctgatcctgttccgcctccacaaccaccggcaatgatgggcgatgaactttcctggacggcaggacgacgcatgcaaaagtcatcctcgaagcgggaggcaaaaagaccagtggcatgaccgggattatccggataatatctagtgggcgaggaggtggacgtggtgtgcgaactgctgcagttgctcgaactgctcgagctgacctggccacccgcggtgccgggcagcatgaccaaaccagtttggcgatcaaagcaaaaatcactggattgagccgttggcgacggtggactgccatagggatagccaatgtgtggactctgaaggtgttgattatattgctgggacagggcatcgaagtcattgaatccatgcaatcccttcgcgctatcccgtttctgttgctgcacatatggtgagatgtatgtccttagtggcggcaatggtggcagattctgcacttgcatcccagactttgcaccctttttacccacactcatcacagtgagttgcggtcgcctgtcgcccaaaagcggtctctgcgaattgttatacggatggttgcgctgcatacaggtgtcctcgtagtcatcctgatcctggtcatgatccatcagatcgtgacagtcgtaggtggcctgcaggtgctcataatacttgagactcttcatattcgcatttggtggcggcagaggtggtggttgctgttgcatatgttgttgcggtgctgttagtggttgctgttgctgttgctgcagatgctgttgctcctgatgctgttgcggattgcccggggagtccagaatctcaatgccacccgttgtcacgcccccaaacagcttggccaatttcacagtcatctctcctgcgtgccagagttggcaaaactttttcaattaaaatgttgcccaatgccaaagacaatgacagttggctggggagaacgacgacgatggcgatgacgacacaagtttgccacaattttccaccagtttgcgttgctgcaggagagtcaaagaacgagaatttgtacatatatatttgaaaaagattcgcatttattggcagtaaaattcatatatacatataggaaatagcctagtatttcgcaactcttttgcatgttgcagctgttgtacttctgattgcacctcctttgagccaagaaccagtaacggaaactgtaatgggatatgtcagccacaattgcaactttagtcaccagagcaacatcagttgatgcaattgttgcagccacagcggaagcaagaggaggagctcttagcaacttatgttattatagatacagtaactgtaacaggaaccacaaacaacaggaactataacaaccagaatctctgtcagcagcagaaaaatgaacaaaaaagaaatgcagtcgaattgttacaaagaagtgtcacagcttgctgttgtgttcacagtttaactagaatcgatgatcatcggaaatcagctaaaattacttttggaaacgttttgatattaatatttgatattttcatcatagaatagctaaaaaatgatcttgaagcaaaaagaacgattgttttatacagctaattatcaattctaacgatccctattattttttgaaaaatttaggaaaattaccgaaattaaagaaaaaacaaataggcatttttatcataacttgcttaaaaattatcataaagatgaaagaataacagttttgagcagctaattgccaatgctaaacatccctatcactttctggaggattttggaaaattaatttttgggtcaatttttgcattttttgtaaggggtaacatcgtcaaaatttgcaaaaaatggccaaaaaaataaatttccatttgtggatacagttcgattaggaatttaaatacaagctcaacgatgtatgacattccatattccgacaattatttttaaagttgttgcaaaaaaaccgattatttgatgtctgaaattcggaaaaacggattttgctaaaatctt

SEQ ID NO: 2795 - DNA, 1246 bp, DROSOPHILA
caacgcaaactggtggaaaattgtggcaaacttgtgtcgtcatcgccatcgtcgtcgttctccccagccaactgtcattgtctttggcattgggcaacattttaattgaaaaagttttgccaactctggcacgcaggagagatgactgtgaaattggccaagctgtttgggggcgtgacaacgggtggcattgagattctggactccccgggcaatccgcaacagcatgaagagtctcaagtattatgagcacctgcaggccacctacgactgtcacgatctgatggatcatgaccaggatcaggatgactacgaggacacctgtatgcagcgcaaccatccgtataacaattcgcagagaccgcttttgggcgacaggcgaccgcaactcactgtgatgagtgtgggtaaaaagggtgcaaagtctgggatgcaagtgcagaatctgccaccattgccgccactaaggacatacatctcaccatatgtgcagcaacagaaacgggatagcgcgaagggattgcatggattcaatgacttcgatgccctgtcccagcaatataatcaacaccttcagagtccacacattggctatccctatggcagtccaccgtcgccaacggctcaatccagtgatttttgctttgatcgccaaactggtttggtcatgctgcccggcaccgcgggtggccaggtcagctcgagcagttcgagcaactgcagcagttcgcacaccacgtccacctcctcgcccactagatattatccggataatcccggtcatgccactggtctttttgcctcccgcttcgaggatgacttttgcatgcgtcgtcctgccgtccaggaaagttcatcgcccatcattgccggtggttgtggaggcggaacaggatcaggatcaggagtggcactaggagtaggtggaggacccttcatctttggcattgcaccggagcagcaggtcacggattatggaagcaacccactgccaccaactcctccgcagctgaaacaacaatctgtgattagtcgaagcccactggtaaaagtcttcttaccgtctaactaccaagcacaacacctgcacgaagacaaagcccgtcaatgtctgagcctgtgtctggctgagcttttcaattcaacagccagccaggcaggagcagcaggaaattcaggacctttcaggactctctccatccgccaccgccgacactttccaaccgtgcaacttttggcccattaa

SEQ ID NO: 2796 - protein, 339 aa, DROSOPHILA
MKSLKYYEHLQATYDCHDLMDHDQDQDDYEDTCMQRNHPYNNSQRPLLGDRRPQLTVMSVGKKGAKSGMQVQNLPPLPPLRTYISPYVQQQKRDSAKGLHGFNDFDALSQQYNQHLQSPHIGYPYGSPPSPTAQSSDFCFDRQTGLVMLPGTAGGQVSSSSSSNCSSSHTTSTSSPTRYYPDNPGHATGLFASRFEDDFCMRRPAVQESSSPIIAGGCGGGTGSGSGVALGVGGGPFIFGIAPEQQVTDYGSNPLPPTPPQLKQQSVISRSPLVKVFLPSNYQAQHLHEDKARQCLSLCLAELFNSTASQAGAAGNSGPFRTLSIRHRRHFPTVQLLAH

SEQ ID NO: 2797 - DNA, 9675 bp, DROSOPHILA
aaacccgtttcgttttcagtttcgtttgctgccggccaattgccgtgggacgagtttcgtcgagcgggctttcgaggaggcagcagctgcaggatgggtctttagaggcttctctgctcgcggaatttcagccaacgtccttaaaggtcatttgagttgtagggcaacttcttgccacctcttgccacttgttgcacggcaggctggcaaccgccctgccaccttaccgccttgccgacttggcaccttgctgctttcggccgtccggttatcgcggccgcaatcgatggccagttggccgagatgcggctgccactgccgccgtcttaacggaatttaaaggttaactggtacagtgtcgcttaaccgtatctctcgcacgattgccccacagcactcaagttcaaatcgcccgcgatagatcggctatctgatccgcaaaggtgaacaaaccttccgccgagagtgaaaactcattgggatgccgggcgtgagttcggacgttcagtagctggccagaatcactcgaatcgctcgaatcgcggctatatctgctgcggatattgcataagcgactgaccgaaaacggaaggcttagaacggaagccaaaattggtaacggaatgttaagagtacacatttctttggcggatatcaggcagtcaaatacccttcaataagtataagtatgtataagtatttaattaacctatattgggtacctcattcgggctagactagagtttattgatatggttatttgtttctcaatgttgctgctctcgattcgtactcactcacaggcattatgacttaatctggcattacctgaagggccatcgaggcaaggtagctatttggattggagtggtacccgcattagatgtaattatcgagatctttatccgaatggggaacagtagccgagcgaattcattaatcaaactgccgcatagcaggggccctgactctgaaactggctgtatggatacacttgcgattatatcgatgctatcgatggcatcgcctggcgcataacaatctctgacgtggggtccgatgacgggcattcgaattccgaatgacgtggctcgagttctggctaaaagtgcgcgggtgttggcattactggcatcacgatgctaccaaaacggctggcattgcggccaaggatgaggctgatcaactgtagtggcacgaagcggcttagaatgcgaattggatgagcatttggccgggctaatgagctgagggcagaaaacatctgaagccatgcaaatagctctgcgaacttgatacagtttggccagtcgactattcaattttcgttgggcttgccgacctcgggctgcaacttagctcgagctgcaattagtcagggcattaatcatacgcctcgttggcccggccagctcataattatctctgcaagcggctgtcgatctaaatacggctatcatttcgaaacacacttgacccgagctttgctaatggggatgtatttcatttgatccaatcggagcaaatccaaggtccatcacttattaaagcttatcctcacaccaaaaggattaatcatgtgtataattggctttctccatcagggattaaccctttactgaatccattttaacaagcctttaattaatctttttgagaatcaatttcggtttcagtttgattaattcagtgaacggaagtggattttgttcgcatagaatcccattgaaatgcaaattgaattaaattatcattaagcaattcgctcgttacggactgaattgaatcgaggaattattatgcgattgcatgaaccgcaaccaaagtaatgtgaatgctccttcaccaaattaaccgtggggatgaattttatttattgaattgctgagataaatatttatggaatcgggcactagaaatgcaatgcaagctaatagctcatttttttgatattttttacgtagttcaagaactttcatatttaaagaaataaactttatagatcctttctattcaattggttttggtttaaaaaaaagtagtttaattaaatgaaatcaatatatgtaggtaaataatagaaatgtagtgatctcttcgaattaacttcattatcaatttcattacctttcagttcaacaggatattcatatactatactctacttaaaccccaatactcacataggacagagtgggctgggcactgctgatgaccagttcgcctccacctcgctgcttcccgaggagcgactgatggagccgattggtgccgtagtacatctcccagatgctgggcttcttgcggtgccactcggcgaggctttcccgctcccgatcccgctcggccttattgccgccagctccgtccaccgtcacatttccacctccaggattgctgttggacaccgcgagaatgggcttgtggaaggtgaggttgcgctgcatttgcgtaactattgtggtcgtagctaggcctggatgcaatgcctcgagctccaactgcggcgttgaggcgggcgagggcgtggcactgcgcgagagactggtggtggtgacctccgattccacatagcattcggcggcgggaaagatctccgctatggacttgcgcttcatcttgaagttgggatcgctggcacaacgaatggtcatgatctgctcgcgaacgctgagaggtcggccattggcggagatgagtactccatcccgtactgcctcgtaggcattcagttgaagatcggcgcaactgcgtctgcgttccagggcgttttgcatgcggaccacgtgctgctggcgtcccaagccgctgcacaactgccggagttccagctcactgtgctggttcatgcgctgcaggtacgactctagttcgtgcttcagcgtgtggatcatcccttccagttccttgggcacatcggagggcggggtgctggcgggtgtgggcgtgcccgaagtcgggggtgtggcacgcgataggaggcggatcttatcacggacgtcctccaacagctcccgcgtgttctggaagtgcaactgatcctcataccgcttgacatatgtctcctctgccacgcccacaccaggtcctcccgctccgcccctttcgctctccaggcggtaggcatcttcgggacaggagttgatgtacttggcgcacttgtagttgttctccgccagctgctcgtcgttcagaaagctgggattgtcgatgccacgatgccccgcgttgggcgccaaaagaaaggcatctaggtcaatatccagcaatgaatcatccaccatctgctcctgttgctgctgctgctgctgctccatgatggtgggcaactggttgtagacccttagcttctctccaatatccagagcctggggtgggccttcgtttcttgcgccggccacttgcatgaagctcacaatatgctcttgggcatacagactgggaaaagtcttcaggtggcggtccagattctcgatgctcgtctccagaactcgcagctttttgctgtagtgatgcagcccctcggccgcctcggccttcgactgcgtttgatggctattcgatgcggcagctccggctgcatcttgcatgtccgagcgctgactcttcactgcggacaacttttccgatgagccttccggtgggtctatcgatggcgcctcctgcggagcgcccactttcgttggtagctggagcggtggtctttgccgctgtctggcggccacactcttgatcttctcctggacatcgatgactggttcgcaatagatgtgctcgtccagcgagtaagtggagcacacattggagctgtaataaccggacgagccgcttttgtccgtcgaatagtgtgagccgccaccatcacctcctccgccacgcgccgcctgtgctgctgctgccgctgctgcagcagatgttgctgcagtcgcagatgctgccgctgaagctgatgctgatgctgatactgctgctgctgcgactggcagtccggaatccgtggaatgcgtgctgctgacattggacgcaatcgagcacttcttgctgcgctcccccgcgctgccggtcgcctccagctgttggtcgtgaccaattgcattccccattccattggccagtccattcttcagtggcattgcaaccgctgccgtggatgtggacgatggcgaggctgatgctgtcgccgtgctgcaacgagagcgggaaagcgaaagaaagagccataaaaagctttgaaaaacagtcggatgaaagggaaacctggcgttggaaagcggtttttgttggtttttcgcaatcgccgttttgtttatacgtcgccaactgactgggaaacgagcaaagtactatgggccaataccctgattttttgcttacaaccaactttggtttatcgcatctttctaatcctaataattcataaatcttaatgaaaatgcctctcttcagctaatgcactttactgaactgaaactcatgccataacaccttgttttttttttttatttttgtcacacttgtctgtcaaatatttttaagcgacaaaaaaccaaaaaacctttgtggtttctttctttcccatggtgtaagctattaaaaagttcacagccgaaagcgaaaactggttaactgggttagttgctctgcttacgttttccatttctactcaaccggctgacatgcaaatatcgttggggaatcagactgggattccccagagaacatctcccggatgtccaggagatacttactctcggtaatcatatttggttcttgctctgcctgtactgtatgaataaacaaatagacataggtttgaaagcgtgttttagaaattcagcatcagcatcaacatacaaattcgatttcaattcaaataaactcgttctaaacaggatttcggcctcactaactgttgcaattcggttagctttcggtttgtttgatttttgcctgcttctcggttttatttcactgcctaactgtaaagttaggcatgcaagtgaagtctactgctttgagtcgcatttggccgagtttctgccgctctcggccagcgtgtgtgggtaagttcgggccaaatttttggtgaaccatgaaatccggcgctgcctgatgacttggggggcacaggatgaggagcggcggtgccggctaagtgcagcgaaatgaaatggaaacttaattgaatggaacggaacggaagcatcccactgcggagcgcactaaacttcaccgaactctttacagatggctaccgactgttttggtgcaaatttatggggttactttttaactttttgccaatatctttgtagccaagtcggataaatccaagttactacaaatcaaagtcctgtaatctgctatacagttttaaatgttaaagaaggagtgagcttgtgatatgctgttatctactgatatttacatcttaccaatttgtcctctttaactagcttgttggtatgacttactggctgaaacgcgcaactacatatcacattattcattctgatccttatctcttattgaatgaattaactttacccatcatcaatcagttgagcaatttttagcccatcccaaattgtgtaagcctttcgaattagccattcgttgtcttttgaagagttgtccattaatctgtttgttatcaaaaatcgaaggtaacatacatatattaactccacaagtcaacaacatcgactaaccccctaagggacttatttatttggccaagagctgcactgattgattgctccttcacgcaagtagaattattcgatattctaatcgcacggcatttgcattttctctgcggcggatttgcatttttgaccgcctggcgccagtggcactgctttaataactcacttacgatcggtaacaagttcgcgattttgggttccatatgcactagccgccgattggcactacgagtaggtcaacgttggcttttggccaagcggaatgagtgctgggagttgcgtaatagcgcccgttgctaccagatactgtggctgcagcttttcgtacgattcttgtacggcaagtcggtgcgttacgcgcccaaaaattgataagtggcggtcagtggtgttgttatatgtatgtatctgttttggtggcacggccagcgatgcgtagtggcagcgggccatagatatcgcaccaacagaagcggcaaggttaccttttttcgctcatgaaatattttgcaatcttggggcatatgtttattttgtttgttcgaactgtgttaattaaaatgttcagcctcgtttgcatgcacggaacactggctagcactggcgagctggacttgcagatcgagcggacaagctgatttggcggacaagggaacttgcggacatgcggacatgcggacgggcggacgattatagaccgttagcaaacaccatagtgtggctgctaattgttgttgactgcttgccaagacaaattacaggcgactggactgggtgacttattggtcatctaagccgcgatctgcccgtctgtctatcaattgctaatcaatcaatgggccaacgcgtttttattgcagcgattatatcggcgatttcgcacatgcttagcgctcgagatggatgtttaacgggctttggtcggttggactggctaagcgccgaccttggcataagccagagatataactatggcctaggcggtctcaaaaattgaatacaaattagcgacgagtattaacaattgatcgccgcgccgtctaactgcattgatgggggccaatgggacaatggaatcgcacttggccaaggtcgccatggaagagctactgtgcgaagtccactccccccccggggtttcagtttcaattttagttagcatgcgtgagtagtatgagtatatatgtagttccaacgccgggtgaatcgcaaatcgatttgggttcgccaaagggcggcgatgggtacgctgtgaccttgatgggaaactcggctctttccttgatccgctgcgaatcgtttgctattttgacagcatatctgccggattatcttatcatggctatcgtgtcattgcctgatttccataatctgcctcatgcaatgaccaaaatagctgaaacgagttggaaaccgaaactatccgccaattaattgaaattgctgtcaatacgcggcacgacttaatgcatatgcatactcatatatatccatctgtatatgcgcacatgtgtgtatccacaagtatttattttgtatttttgataaatatttcaaaccaaaacgggctctcagcttctgaccttcggtgattcgaagatcatgagctgctgctgctgcttctgctggtggcttctttaatttcaattaataaacgtaattgttgcagctgtctgcagttgctgctgctgctgttgctgctgttgttgctgctgttgttgctgctgctactgctgctgcgacgatgaccgccgtcaagtgtttgccaagcttctccaaaggcaacgagatatgtatgtatgtgcacttatatgtgtacatacaatcagaaaaagaggtgaaggctgacaacaggcgccaaaaaccgcattgctcgatgcagcagcagccacactgcagcggcaacttgaacttcgccgccgctgcagacatgatttacatacatggctgctgccgcagcaacaggttgcccatcgcatctggccgatctgggaagatggttctggcaatcataatccccatttagggcaacactccgccgccattgattgctatccggcttaatgccgcgctaattggctccgaacaacataattacaaaatatcgccgcctgttcaagtggctggaaccgtgaagtgttgcgtccgtaattgcattaccagcgagtggagtttccgatctgcaacggtcgtgccttttctgggtctgaggttttcttttcccccctcccactcccctttaccatgcaagtcaaggtcggagcgctgaaggtcgatgctcagcgatgggcatcaatggctaggaaatattacttaagttgtaaatgaggcgttggagaagtttctaaagattttagtatggcatagtaggtaggtattgtctaaaatatattatataagagatacattatttcaaattctaaattgttattttttgatggcctgcactttatgctcttcagttagtttgcatcctcacctttgatatttaagcatggctcgtggcagtagaaaattttcgctgcttcccttgggcgccgcgttggatgcacctcctccacttggagcagctataccagcagcttctcccgatcccgattcgcctgctccacctccgttgcgagcaaaaaaggcgcccaggcgttgcagataggcaaacttgtggccggcaacgggctccttggctgcggagtagctcctggtgctgctgctccggctgctgctgcttccgcaacgactttggctacggctctggctcctgctcctgctcctgctgtgactggtgcctcccgcctcgtcgtcctcctcctcgtagggcagcacctcgattgcatcgaagtcgtaggagttgaagtaggcctgctcccgcgtccgcttcacctgggccgcttccgtcacgtggtcggcggatatatccgtggctgttttgttgctcgccgtacccggtgaacttttgcaaatgggcatggttgtctgtaaaatgcaggcactttattaaaataacaaaattaatgggcaatattatctaatccctacactcaattggcttaaatgcttgttcatagatatgcagtttatttacacaattgaattgtgtaccatgaccacactatttgcaaagtttggtgcacatgtctttcggttttaatttatgaaaacagtttacaagcagtaaaattttaaagatactatcttatccagaactaactatattaattctgaacgctgggaacttggaaacatcatcgtggctgccttaaagagggttattatcttccaacaacacgagcgggagcttgcacaattttacgctccggcgtttacggctctttgccagcggcgtctccaatgcatccgctttggccaactggagctccaagtggagctgcgagtggtgcttcaagtggagttgtaagtggaagtggaacttgtttggcgctcgcaaagaatgcacttggtggccacgttgcagtcgcgtttcgttgatgcaagcgtttttgcctcgctcatgactttgcattaattagccaaaaagggttttgcgcgattgcataatttttgtgcagcgcgcgtgttgcctcccccagtcataatttatggtaacgtggtaaacgcccgccgatagtgcaaagcacacacacctacccccccccccccccaaaaccaaaccgctgatgcacccaactgcatttacggcaaggcgttccatggagtctggctgggatggtgcagttatgtgtgtgatcgatagataagtgcgccgtgctgacagcttcatcatcgccgcccaatgtggctggccagtgggctcatcatcgtgccataggttccgcattatcgactgaacgctgtccagactgctgtttctgcggtttaagttttagtcgttttagtcgccggtgcggcaatcagcagttttcaagccgcacagattgcagacctcgtcgaaagcattaagtgatacaag

SEQ ID NO: 2798 - DNA, 2592 bp, DROSOPHILA
atgcccatttgcaaaagttcaccgggtacggcgagcaacaaaacagccacggatatatccgccgaccacgtgacggaagcggcccaggtgaagcggacgcgggagcaggcctacttcaactcctacgacttcgatgcaatcgaggtgctgccctacgaggaggaggacgacgaggcgggaggcaccagtcacagcaggagcaggagcaggagccagagccgtagccaaagtcgttgcggaagcagcagcagccggagcagcagcaccaggagctactccgcagccaaggagcccgttgccggccacaagtttgcctatctgcaacgcctgggcgccttttttgctcgcaacggaggtggagcaggcgaatcgggatcgggagaagctgctggtatagctgctccaagtggaggaggtgcatccaacgcggcgcccaagggaagcagcgaaaattttctactgccacgagccatgcttaaatatcaaagcacggcgacagcatcagcctcgccatcgtccacatccacggcagcggttgcaatgccactgaagaatggactggccaatggaatggggaatgcaattggtcacgaccaacagctggaggcgaccggcagcgcgggggagcgcagcaagaagtgctcgattgcgtccaatgtcagcagcacgcattccacggattccggactgccagtcgcagcagcagcagtatcagcatcagcatcagcttcagcggcagcatctgcgactgcagcaacatctgctgcagcagcggcagcagcagcacaggcggcgcgtggcggaggaggtgatggtggcggctcacactattcgacggacaaaagcggctcgtccggttattacagctccaatgtgtgctccacttactcgctggacgagcacatctattgcgaaccagtcatcgatgtccaggagaagatcaagagtgtggccgccagacagcggcaaagaccaccgctccagctaccaacgaaagtgggcgctccgcaggaggcgccatcgatagacccaccggaaggctcatcggaaaagttgtccgcagtgaagagtcagcgctcggacatgcaagatgcagccggagctgccgcatcgaatagccatcaaacgcagtcgaaggccgaggcggccgaggggctgcatcactacagcaaaaagctgcgagttctggagacgagcatcgagaatctggaccgccacctgaagacttttcccagtctgtatgcccaagagcatattgtgagcttcatgcaagtggccggcgcaagaaacgaaggcccaccccaggctctggatattggagagaagctaagggtctacaaccagttgcccaccatcatggagcagcagcagcagcagcaacaggagcagatggtggatgattcattgctggatattgacctagatgcctttcttttggcgcccaacgcggggcatcgtggcatcgacaatcccagctttctgaacgacgagcagctggcggagaacaactacaagtgcgccaagtacatcaactcctgtcccgaagatgcctaccgcctggagagcgaaaggggcggagcgggaggacctggtgtgggcgtggcagaggagacatatgtcaagcggtatgaggatcagttgcacttccagaacacgcgggagctgttggaggacgtccgtgataagatccgcctcctatcgcgtgccacacccccgacttcgggcacgcccacacccgccagcaccccgccctccgatgtgcccaaggaactggaagggatgatccacacgctgaagcacgaactagagtcgtacctgcagcgcatgaaccagcacagtgagctggaactccggcagttgtgcagcggcttgggacgccagcagcacgtggtccgcatgcaaaacgccctggaacgcagacgcagttgcgccgatcttcaactgaatgcctacgaggcagtacgggatggagtactcatctccgccaatggccgacctctcagcgttcgcgagcagatcatgaccattcgttgtgccagcgatcccaacttcaagatgaagcgcaagtccatagcggagatctttcccgccgccgaatgctatgtggaatcggaggtcaccaccaccagtctctcgcgcagtgccacgccctcgcccgcctcaacgccgcagttggagctcgaggcattgcatccaggcctagctacgaccacaatagttacgcaaatgcagcgcaacctcaccttccacaagcccattctcgcggtgtccaacagcaatcctggaggtggaaatgtgacggtggacggagctggcggcaataaggccgagcgggatcgggagcgggaaagcctcgccgagtggcaccgcaagaagcccagcatctgggagatgtactacggcaccaatcggctccatcagtcgctcctcgggaagcagcgaggtggaggcgaactggtcatcagcagtgcccagcccactctgtcctatccagaactcgagccacgtcattcggaattcgaatgcccgtcatcggaccccacgtcagagattgttatgcgccaggcgatgccatcgatagcatcgatataa

SEQ ID NO: 2799 - protein, 863 aa, DROSOPHILA
MPICKSSPGTASNKTATDISADHVTEAAQVKRTREQAYFNSYDFDAIEVLPYEEEDDEAGGTSHSRSRSRSQSRSQSRCGSSSSRSSSTRSYSAAKEPVAGHKFAYLQRLGAFFARNGGGAGESGSGEAAGIAAPSGGGASNAAPKGSSENFLLPRAMLKYQSTATASASPSSTSTAAVAMPLKNGLANGMGNAIGHDQQLEATGSAGERSKKCSIASNVSSTHSTDSGLPVAAAAVSASASASAAASATAATSAAAAAAAAQAARGGGGDGGGSHYSTDKSGSSGYYSSNVCSTYSLDEHIYCEPVIDVQEKIKSVAARQRQRPPLQLPTKVGAPQEAPSIDPPEGSSEKLSAVKSQRSDMQDAAGAAASNSHQTQSKAEAAEGLHHYSKKLRVLETSIENLDRHLKTFPSLYAQEHIVSFMQVAGARNEGPPQALDIGEKLRVYNQLPTIMEQQQQQQQEQMVDDSLLDIDLDAFLLAPNAGHRGIDNPSFLNDEQLAENNYKCAKYINSCPEDAYRLESERGGAGGPGVGVAEETYVKRYEDQLHFQNTRELLEDVRDKIRLLSRATPPTSGTPTPASTPPSDVPKELEGMIHTLKHELESYLQRMNQHSELELRQLCSGLGRQQHVVRMQNALERRRSCADLQLNAYEAVRDGVLISANGRPLSVREQIMTIRCASDPNFKMKRKSIAEIFPAAECYVESEVTTTSLSRSATPSPASTPQLELEALHPGLATTTIVTQMQRNLTFHKPILAVSNSNPGGGNVTVDGAGGNKAERDRERESLAEWHRKKPSIWEMYYGTNRLHQSLLGKQRGGGELVISSAQPTLSYPELEPRHSEFECPSSDPTSEIVMRQAMPSIASI

SEQ ID NO: 2800 - DNA, 4122 bp, DROSOPHILA
tgaaagttattccatttatttttatggccctacgtaatacggagcggaaatacatactcatacgtgaaaagcgagaggagaacgctgaatggaatttcgaaaatacatttttgtttcaatataaccgccgaatcagattggcggggtgaaagcaattaaggcagataataggggttagcaaagtcgagggcgcaaacgcatgtagatcccaaaaaaaaaaaaaacaaaaaaacagaaacaaaaaacatatagtactacgaaacacgctctttcgactccagcataagtgagcaatttgatcttaaacatttggcgcttgggccgggcccagtttccctagaaactacgaaacacaatctccgaaacatcatgtcccgccgattccgttgaacccgcaagcattatgaaccgaaataataattataataataataatcataaagccagtgtgtgctgttgccctctatgttgcctctaaaagttacataaaagtcatgccgataaaaaggagtatacaaaaaaaatacggtctttatctggtatataacgtatacgtataataaatatgacgtgcgaccttctctcactttggtttgctagctgcggaattaattacaaacattaaaaacgtcgacgaagaaaagttcacttctagccatccacttttaatccaaacaaaagcatctggcactttggacccgaccaagaggcacgccctcgtgccgctcggaccacatctactatttctggtcactatttattttgagtttatccataagcatggcgaacccatctacgtgccatttcggtggctgtgaaaagtgcagtaaccaattcgtggcgttcttgcacttccatttggggggtcgataaataaacgtggattacttttaggcgttttttatcgctgttggatttgcctagaaatataaatacagcaatacagcgtgccaaaagaaataaatagctaattttcaatttcatttccctttacttgcagaaagcaatcgcagctgtctgaatctgcaaaaggatgaaggcaaatcaagctgagtccgggcgcagtaactacgatcgacggcattgaggatctcggatctcgaggtggaggagcgatctcgatctcgaggtggagcgaggagcggaggaggagtggaggagtgcagctgggggaggagtcctggttacaacactacatggatcgcagaaatggcggcgatcccttggcgccaccccggcccccgaagttattaccgcgcgtgcatcgaccaagggcgccggagccgacgttaagtggtgtcgaccataacgcaggagcaactgcatccgcactagcatcaggagcatcatctgcagcacccgtagcaatccataacaacaattcacagcagcaacttagtattagcgccgccgcgagcaacaacaatacgatatcgataatacccgcatcgccggacttcgacgactaccagatccaccacctgaccttcctgccccagcgacccagcagtctgagccggaacagcagtacggcatcatcgactacggcgacgggcattagtgtctccggttcgggatctgtttcgggttcgtcgtccagcttcacgagacgtcgaccgccggcacctgtaccgctgaacaacagcatcagcaacaacaacaacaacagcatcaacaacaacttccttagtcatttccaaagcgctgagccggcgagcaacgctctgggccagccgcccgcctcccccgtcacgctggcgcaaccgcgacccgaatccgaaaggctaaccaatgagtatgtggacacgccgctgcaacatgcgacgcgctcgcagcatccggctggccagcaggataatggccagacgaccacccaccacctgttgctgctgccccagcggaatcagcacctgcacctgcaacaacaccagcagcacctgcaacagcaacagcagcagcagcaacagcagcagcagcagcagcatctgcagcaccagcaaaaccagcaacatgcgcgactggcgacgacgacgcaggcgacgtccgttggaagcgaccacaccgatggcttactacattcgcacctgcaaaatagcaccactaaaccacccgcctcgaagcagccggcaccgcccagactgggaatgggcctgggtttgggattgggtctcggtctgaaccagcccatcatcaccaagcagccgacacccgccacgcaaaaggagcgcatgcacgcgctggaggagctgctgcaaccaggcggagccggcggcaacggaggacccctggtgatggccggcgatcccagcctgctgaatcccatcgtctgtccgcgatgcggtcgctgtcgctgcgagcagtgccagagccccaggccactgccccagacgtgggtgtgcaacaagacgtgtctgtgcagcgcggagtcggtcatcgactatgcctcctgcttgtgctgcgccaaggcgctgttctatcactgcgcccgggacaacgacctggactgcgatgatggcaacggcacaccctgcgtggataatccctgctcctgcggcccctacaagcgcacccagagatggggctggctgggagcactgtcgatcttcctgccctgcctgtggttctactggcccatgcggggctgcatgaagctatgcgagaaatgctacggcaggttcgccggtcggggatgccgctgtcagggcatcggcggaggaggggcaggttccggaggcggagtcggtagcattggatccaccagcagcatgctgcccatagtgccgcttggggtgaatggcagtgggctgggtggcggcgtgagcctctccggcggcgtgacggatggtggactcaaccaagccaatggcaaggccatggatcatggatgcagtgccgccaggagcatactgcgaaagggtgacctcaccccggagaagcggctcctggactccagtcccgactactaagggtccattccatgtgtccggttttttacccgagcaaaaagcctaaggcacaaatgggatgctggatcgtggacatatacacccatatatatacggaaaatatttaatatatgatttaaaaggatatataaaaaaagaggaaagaaagaaagaaagaaaaattaaataaccaaagactgcaaacagataattattaattattagaaatgttatttaaaaaataattttttgcttaaaacaaatcgagtggcgacgagtggaaaacaaaactgacgaaacgaaagcgattaggaattatttttcgaacgatttttttgtattatttgattttgttttacttgcttaattaactcttcagttcaacgttcaatttctaagtcaaattcttactttataaacataactataatagttgtatgcaaataattccaatgaattttccacaaatgtaaagtaaacggggcgaaagtttttattattttcatatacaaaactgaaaaaaactgaacaatttggggcaagcgtaacaaaacaccatattatatatacctatatacacacacgggagaacttttagagaaatattcaatggcgtaaattagtcaaatattatatataccaagtccagtccatttttgatgttgtagaaagaacagaaacaaaaaccgaaaactgaaaactgaaaattacacaaaaatattttagaactttacgaatttaaatcttaaaattgatatgtgtatgtgtgtgtatgttgagggcgacgaacttttcgataaatttagagcaacctatatagaccagtctaaatgtgcttagaaaccgatatagatgtactgcaaaccaaaagtcagttagtttactttaccaactacgaagccggaacaaatctgaggagcgaaaatatgggataacgaaatcgattgcttatgaacttattttatagttgaagatcgattggtgggttcgtagtgtttccagccagaagccccaaaaatgtgagcaagattgtatatatgatgaaatttttaagcgaaatgcgagatacaaaatgcaagcaaattccaaataatagaaaaacaaaaaacaacaaagcaaaacttaagtgtaacgataaacccacatgtaaatgcagcaaaatacaaacaaacaaata

SEQ ID NO: 2801 - DNA, 2122 bp, DROSOPHILA
aaagcaatcgcagctgtctgaatctgcaaaaggatgaaggcaaatcaagctgagtccgggcgcagtaactacgatcgacggcattgaggatctcggatctcgaggtggaggagcgatctcgatctcgaggtggagcgaggagcggaggaggagtggaggagtgcagctgggggaggagtcctggttacaacactacatggatcgcagaaatggcggcgatcccttggcgccaccccggcccccgaagttattaccgcgcgtgcatcgaccaagggcgccggagccgacgttaagtggtgtcgaccataacgcaggagcaactgcatccgcactagcatcaggagcatcatctgcagcacccgtagcaatccataacaacaattcacagcagcaacttagtattagcgccgccgcgagcaacaacaatacgatatcgataatacccgcatcgccggacttcgacgactaccagatccaccacctgaccttcctgccccagcgacccagcagtctgagccggaacagcagtacggcatcatcgactacggcgacgggcattagtgtctccggttcgggatctgtttcgggttcgtcgtccagcttcacgagacgtcgaccgccggcacctgtaccgctgaacaacagcatcagcaacaacaacaacaacagcatcaacaacaacttccttagtcatttccaaagcgctgagccggcgagcaacgctctgggccagccgcccgcctcccccgtcacgctggcgcaaccgcgacccgaatccgaaaggctaaccaatgagtatgtggacacgccgctgcaacatgcgacgcgctcgcagcatccggctggccagcaggataatggccagacgaccacccaccacctgttgctgctgccccagcggaatcagcacctgcacctgcaacaacaccagcagcacctgcaacagcaacagcagcagcagcaacagcagcagcagcagcagcatctgcagcaccagcaaaaccagcaacatgcgcgactggcgacgacgacgcaggcgacgtccgttggaagcgaccacaccgatggcttactacattcgcacctgcaaaatagcaccactaaaccacccgcctcgaagcagccggcaccgcccagactgggaatgggcctgggtttgggattgggtctcggtctgaaccagcccatcatcaccaagcagccgacacccgccacgcaaaaggagcgcatgcacgcgctggaggagctgctgcaaccaggcggagccggcggcaacggaggacccctggtgatggccggcgatcccagcctgctgaatcccatcgtctgtccgcgatgcggtcgctgtcgctgcgagcagtgccagagccccaggccactgccccagacgtgggtgtgcaacaagacgtgtctgtgcagcgcggagtcggtcatcgactatgcctcctgcttgtgctgcgccaaggcgctgttctatcactgcgcccgggacaacgacctggactgcgatgatggcaacggcacaccctgcgtggataatccctgctcctgcggcccctacaagcgcacccagagatggggctggctgggagcactgtcgatcttcctgccctgcctgtggttctactggcccatgcggggctgcatgaagctatgcgagaaatgctacggcaggttcgccggtcggggatgccgctgtcagggcatcggcggaggaggggcaggttccggaggcggagtcggtagcattggatccaccagcagcatgctgcccatagtgccgcttggggtgaatggcagtgggctgggtggcggcgtgagcctctccggcggcgtgacggatggtggactcaaccaagccaatggcaaggccatggatcatggatgcagtgccgccaggagcatactgcgaaagggtgacctcaccccggagaagcggctcctggactccagtcccgactactaagggtccattccatgtgtccggttttttacccgagcaaaaagcctaaggcacaaatgggatgctggatcgtggacatatacacccatatatatacggaaaatatttaatatatgatttaaaaggatatataaaaaaagaggaaagaaagaaagaaag

SEQ ID NO: 2802 - protein, 589 aa, DROSOPHILA
MDRRNGGDPLAPPRPPKLLPRVHRPRAPEPTLSGVDHNAGATASALASGASSAAPVAIHNNNSQQQLSISAAASNNNTISIIPASPDFDDYQIHHLTFLPQRPSSLSRNSSTASSTTATGISVSGSGSVSGSSSSFTRRRPPAPVPLNNSISNNNNNSINNNFLSHFQSAEPASNALGQPPASPVTLAQPRPESERLTNEYVDTPLQHATRSQHPAGQQDNGQTTTHHLLLLPQRNQHLHLQQHQQHLQQQQQQQQQQQQQQHLQHQQNQQHARLATTTQATSVGSDHTDGLLHSHLQNSTTKPPASKQPAPPRLGMGLGLGLGLGLNQPIITKQPTPATQKERMHALEELLQPGGAGGNGGPLVMAGDPSLLNPIVCPRCGRCRCEQCQSPRPLPQTWVCNKTCLCSAESVIDYASCLCCAKALFYHCARDNDLDCDDGNGTPCVDNPCSCGPYKRTQRWGWLGALSIFLPCLWFYWPMRGCMKLCEKCYGRFAGRGCRCQGIGGGGAGSGGGVGSIGSTSSMLPIVPLGVNGSGLGGGVSLSGGVTDGGLNQANGKAMDHGCSAARSILRKGDLTPEKRLLDSSPDY

SEQ ID NO: 2803 - DNA, 5332 bp, DROSOPHILA
acaaagctgccagaaacttcaatgcacccatgtgcagggctgccaaaatcaccgtggccgaagtggaggaaatcgtgcccatcggagccctttctcccgatgagatccatgtgcccggcatctacattaaccgcatcttcaagggcaccaactacaacaagcgtgtggaacgcttgcgcatcacggaacccaaggatcccagcaaacccgctcctccaccaaatcccgcccaggttttacgtgagcgcattgcccgtcgagtggctcttgagttccacgacggcatgtatgccaatctgggcattggcattcccgtgctctcctccaactacatccccaagggcatgaacgtgatgctgcagtcggagaacggaatcctgggcctgggacccttccccaccaaggataaagtggatccggacttgatcaacgccggaaaggagagtgttaccgtggtgcccggagcctcatactttggctccgatgacagctttgccatgatccgtggtggtcatgtggatatcaccattttgggcgccatggaggtgtcggccacaggcgatctggccaactggatgattcctgtaagttaatccattatcatccattaagcttaatcacttgcaaactcattctttttagggcaaactggttaagggaatgggtggagccatggatttggtggctgcgcctggcaccaaggtgatcatcaccatggagcacaatgcccgcgatggttcccccaagatcctggacacctgctcccttccgctcactggcaagggtgtgatcgacatgatcatctcggagaaggctgtcttcacggtggaaaagggcgtgggcctaacgctgatcgaggtggccgagggttacaccgtggacgacatcattgccagcactggagccaagttcacagtgtcgcccaatctgaagaaaatgggtcaaattccggtctgatgagccacgtgcttagtgcccagagaagctgcaatacctccggttgagtgataaacgagtgcatttattttttgttgaccgtgtgacaaaaacatttgtgttaaatatatggaccatatcaaatcgaatctctcccagcttatccaattgccttggccatgtccttcagcgcctcggagcgatgtgcgttgcgcatctgcttgttaaggatatcgaagatgcggttgtacttgctgtcggtttccgtgcggcagatggcgcagaactgcgaggacagcacgttgagtggactacggaagtacaggctcttctgcatggtgagaccgttcctgtggtgggacatcatgtgcaggacgatctcgatgagggccagcgtggctccaatgacgaagttgtagcagaagagcgtgggcaccaggaacagcaagtaggggttgcggttgtagcccaggattatgttctgcaaggaaaactcaattatttagcatactcataatcccagtttggaatggtaacctacgttgctcacgccatccatttgacaatagtcctcgcgttcgtagcccggagtgacctttttgggtgccctgttgggaatcgcggtggctgccccatatctcaccgtattggccagctcgtcgtctacctcatcgcatatggttccgcggagatagtgcttgggtacatggaaattcgtgtgtttgcggaagtgaaccttggtcacctggtcgtggatcggttcaccggtctcctcatcgaaggccggtctattaacgcggacggtgtctgtgtagaagtactccaactcacccgtttcgcagttctgtcggagattggatcgaatcagataatatagtgttaagagagtggtctaagagagcggtctaagagagagcgaaagagagcgctgggcggcactcaagaatcgcgtgatcgagattttgttggtaatttatgggccgaacctggtggaatttgcaagtcagatttataaagcaaacatgcctgaagttgattaaaggttttgaatctacatttctatcttcgaatgccatttaaagcagatgactctgttcatctattgtctggctttctaatgtgttttacgaacagcgggtatacaagatttaagagagcttcccttacacatttctcttgagctctctttgccacatttatattgtttatgaaatgttatcggaggtcggcgggcgacgaacaagaagcagacgccagtcacagaaatgtgtttatatatcccgaaaatagaatcacgtacgcctattctgataacatcgccagatcgtacaccagggcgtatgaataatgaaccgcttgcgacacctgagattaccactactattactaggcactaatgcatcccacccgacttcttaccacgaacatggctacttcggtactgaaaactagacccccaaaaacccacgaaggcgaacagagccagaaactcaagtatcacttatcagttgcggctggaagtcgggccgatcgacagacgccgccttcttatcggttctataaaatagggcgtggaaatcgaggggggggggcaactccgcccccttagtctattaaggtgcaattaatgcttatggacggcagaaaattgtaaattgcacatgcaattacagactttttcactcaatttcacagtcctttgtttttgccatagtgacactaataacttgagttgcataagcaccgaccggtttgcgtgtccaatgtgatttgatcagaacacatataatacaaactgatggggctaaattgataatctccctgatctctgattggcaatcgaataaattgagttattgagttatatcgaaactactttgtatcaaacagagactgacatttaatcgaaccttagcttgacaacctgtgggcattatgttcccaagatcacgaaggcaattaaacacaatcgctgtcgatttgtactaaaacgtatattcatattagattattattatattggcacagtgcaatacatttaattatcttgctgaacttgatggtgatcttcaaatttctgggaaagttaccaccaaaactacgtgcaaggcaaactaaactctttataactactcctaaaatatatagaagtacagatagcaaacctatgatgagttggtagcatgataagttggctactcccactcgagttcagattatttttaaagtcaaaacgcttatcgaacagcaagacaaaataaataaaataccttacaattgctagcttgataagtaaattgttatttgagcctgacaaatgccttcacttgtttcgttcccaagtcgcttgttaagttcataaactgtataatccacatttaaccgtgggttgtataacacattacatagaaaagggtggatttttattttctcagtgcttttcatgttttggtcaaaagcatgtatttgagcacccctcttgatgacgtccatcataaacaaagttgacttatgtcaactgaatgtactatgtacggtggtgagcccttttgaaaaaaagactgtaatggcagataagcggtcgaacataaaaacaaggccagctaatcaatgtgactagataatctacactatatttagtttatgaatttggctattgcgttctcttttcggcttactggagtcacagttggcttagtgctgtagtctgtaattaactgagtatgggatttggcccggcattttatggcaccttaattacaagcccgacatgagccgcaaaaaatcctacagatcccactcttctttgtatatatatatgtatatttgttttccaactaaccaagatggttaactggtttacagatcgcagctttcatagtacatctggctctcttttctcttttccgtttggcacttctctccgcttttggcacttaccttaatggaataacccatggctgctgtctggcttatggtttattttcacagttatgtcggcgtctggctttgtatttatttgtcaaaactatttttcacgcgaaccacaaacagaaactcacacaaacaacgtatatctgcgaatttatatgcgagtgtgtgtgtgtatattttgatccactgcaatcggaatattatatggacgaggaaactgtgctacgatggatatttcgaaaccggttaagcggttcgccagttgcctttgctgtttttgcccgtttcatttgcggctcgattgttgtgtttattttggttgaggggcgacctgttggcttttcgatgatttgggagatccgcaattaaatttgcatagccaatcggtataatgactaaaaaaaaaacgtagtttcgatatcggattttcacgcttctctcggcgaactcgaactttttccacacacgcacaccgaacaactgatttcaattcgttgggagagaaaatcggatggtgtgaccgctaatatgccaccagtatataccagttttcgaaagagctttttcaaagctcaacacactaaaaatactggaattaaactacaattcatttattaagctaccaaataacgtacatttttgaacaatattgttcatttttcaagagtaacgcagtctgctttatttaatcctttttgttgtcatcgccttcacactttccttcctccttcttttgttgctccttctttttgatgtcttcttccttcttttggcaccaagctttcagttcatcctcgctcatgtcctggactttcttctccttgggcgaggacttggcctccttcttttcctgctccttctttttgatgtcctcttcctttttctggcaccaagccttcagttcctcctcgctcatgtcctggattttcttctccttgggcgaggacttggcctccttcttttcctgctccttctttttgatgtcctcctcctttttcttgcaccactcctttagctcctcctcactcatctcctggagacacttctcctcggccgaagatttggccttctggattttcttggcttggttggagagtatcgcatcgcactcgctttccagcttcttcatggtctccagttgggcctcgccacactcggattcttcgtcggcttcgatggatgcctgtagtcctccgtccaatcgacgttcgtctcgtaactccacagccgtgaccgtgagttccataaatgagaatcgatgatagccaaagtaagttgggttcttgtagggcagcgctttgcctgctcctggtcccagcttctcatccggtccactgaactggcggaaggaagagggtctcacaaacggcggcacatcgatcccattgtgatcgacactggtcggttggtagccctcatccggtggatcctttggtgggcgaggggtgttcgatggcttgtt

SEQ ID NO: 2804 - DNA, 1176 bp, DROSOPHILA
tggaaaaagttcgagttcgccgagagaagcgtgaaaatccgatatcgaaactacgttttttttttagtcattataccgattggctatgcaaatttaattgcggatctcccaaatcatcgaaaagccaacaggtcgcccctcaaccaaaataaacacaacaatcgagccgcaaatgaaacgggcaaaaacagcaaaggcaactggcgaaccgcttaaccggtttcgaaatatccatcgtagcacagtttcctcgtccatataatattccgattgcagtggatcaaaatatacacacacacactcgcatataaattcgcagatatacgttgtttgtgtgagtttctgtttgtggttcgcgtgaaaaatagttttgacaaataaatacaaagccagacgccgacataactgtgaaaataaaccataagccagacagcagccatgggttattccattaagaactgcgaaacgggtgagttggagtacttctacacagacaccgtccgcgttaatagaccggccttcgatgaggagaccggtgaaccgatccacgaccaggtgaccaaggttcacttccgcaaacacacgaatttccatgtacccaagcactatctccgcggaaccatatgcgatgaggtagacgacgagctggccaatacggtgagatatggggcagccaccgcgattcccaacagggcacccaaaaaggtcactccgggctacgaacgcgaggactattgtcaaatggatggcgtgagcaacaacataatcctgggctacaaccgcaacccctacttgctgttcctggtgcccacgctcttctgctacaacttcgtcattggagccacgctggccctcatcgagatcgtcctgcacatgatgtcccaccacaggaacggtctcaccatgcagaagagcctgtacttccgtagtccactcaacgtgctgtcctcgcagttctgcgccatctgccgcacggaaaccgacagcaagtacaaccgcatcttcgatatccttaacaagcagatgcgcaacgcacatcgctccgaggcgctgaaggacatggccaaggcaattggataagctgggagagattcgatttgatatggtccatatatttaacacaaatgtttttgtcacacggtcaacaaaaaataaatgcactcgtttatcactcaa

SEQ ID NO: 2805 - protein, 213 aa, DROSOPHILA
MGYSIKNCETGELEYFYTDTVRVNRPAFDEETGEPIHDQVTKVHFRKHTNFHVPKHYLRGTICDEVDDELANTVRYGAATAIPNRAPKKVTPGYEREDYCQMDGVSNNIILGYNRNPYLLFLVPTLFCYNFVIGATLALIEIVLHMMSHHRNGLTMQKSLYFRSPLNVLSSQFCAICRTETDSKYNRIFDILNKQMRNAHRSEALKDMAKAIG

SEQ ID NO: 2806 - DNA, 3632 bp, DROSOPHILA
aaacactgggtttgttatttgaatgtttcttcatatttcagatatcattttgggttgtttgttcgtttgggtggtttatatcgctgatagttcataagcagaaagttgtggtggtggcgatggttaagttatataaattcgcattaaacaatttgagtgaatgaacttaatgtttctctgttattagcctaactctcgataacttgcaataatattgataactcataactgataaataagtaagtaacgaacgatagatatgtataacgataaatattttgtgatagtaggatatatatttggctctcagttaaatgatccctaacaatagtttgttatgggtttacctctctctctcctggtcctgcgagatttcttgaacgaaaaacattgtaactcacaaaactggctaaaattcatattcataatcaaattgaactcgcgggtgcagggctaacgaatacagcccggctacccatcaacatcgtcttcgtcctccctacatcataaatcatacatcatacatcctcatttcgattccgatctcgatctcgatctggtaatcatctctctctgggggttcttctctttagttcttcaacggacagcgatataaaaatagacacggcttgtttgttgtttttaagttttttttgttgattttataggtgttttaaataaaatagatagcatatgttttataaattttacgtgtaaaatttaacagtaaatcaactagaaaactacgcgtcagttcttgccgtgacagtgaacgtgatcgtaagtatccctaactatgatggacagatacatggtaaatggttctgatcgctaccaaatgttgctgaagaagttcttttgaggttcagtttgatcggatgttgctgatctggttggtggtgttgttcttggtacaaggtacttggtgatggttaacaaaagagattacaagatactgagaatctacatatgtaaacgagcgtttcttttaattacgtttattattactgatttgactgattgatttaacgttctgattctggctgtaaaatggatgttgagttagaagttaggatgtgatcggatgtgccttaggcggcctcctcctcctcctcttcacccttgccggtgagcatctcgatcagggcggcggtatcgatctggttcttgtcgtcgatcaccatctgatcgtaggcatcatcaacctccttcatggtgaacttgtcaccgaagttcatgagcatttcgcggaatttgtcaccgtcgatgagaccatcgttatcgaatgttttgaaggcagcaataacaacttcgtcttcatcgttggcaccggaggtggccatgcggttggcgaacagggtcagcaactgggtgaagttgatcggacccgaggcctcgcccagcatggcgtccaactccttgtcgttggcgatcttgccgacggagtcgaaggcagcgcgcagatcgttcttgccaataataccgtccttgtcggcatccatgagttggaaggcctatcgatcccgcacagagacagagagagatagaaagaaagagtgtgttggtgacttggtccttgacaagtgcgatagatggtaggatgacaggatgatgggatgggtctcgagtgatccgacatatgatgcgatatatgagtaacgcccaaaactcacctccttgaactcggcgatctgcttctgggagaacacagagaagaccgaggagccagcgcgcttcgacttcctggagccacgggatccgcccgacgctctcttcgaaccagtggcagatgcggccggggcaggagtggcagctggtgccggggttgctgcctcggatgcggcctcagaagcggtttcggaagtaccaccctcttccttggtcttcttcttcttaaccttcttcttctcatcggcctgaggagagaaaagagggatttattagtagggactcgtggcagaaagggggtatctactcggtcattagtcgttatagtccgtctttagctgtcacttgaaagttccgattccggaagttatactattcgttttagggatcttagtaagttatccgcgttgaaggatcttcaattggaattatatgggtagaaagttatcccttaatagggatttaagggatgtaaggtatgcttttcaaaaggcctacccgactaggccagaaaatatgtatctgcaggcgaaagttttccactcattctaaaaatataccggacgcatattacgtaagctctccgccgtgcgccactcgctgtctcgctcgctccccggcacggatatcagattacattactgacgcgtaacactcggatcggatcgatccatttatagaactttctgcactattctcactgcgtatgtgaagaaggtgaatcgggatcaccatgatttagagttatggttcacttcatattcatatcctcggggtcattctcgaatgcaaacgattcactgcactgatcggcattatccttgctgcatatatccaggcactggggtccagttcgattcggttcggttcagttcggttcagttggattgtagtgatattccgggacgagtccttaccatggtgctgaactttgatgtgttgtctaatcgagtcgagccgtcagagcacactgaatctctggctgattttatcgccaagacaatgatgttttaagagctcggaggagctcttcttcttccaagcattggggccgctcgtggaggttcggccaccttcggggatcttcgggcgccattcgctgtatccgtatctgcaatattcgtgctgccttttttagtatctgcaaggcgaggtccgcccaggagatcggcgggggcgggcagctacaactatatagatatagccatggctatagcctatagcctatggtgtagctgtatccgaggtgtttactcatccatcgggcgctgctctaatcaaaaatctaattttaaaggcagagaaattgctttggctttggcttttgggcagcagaagcctatacatatgttcggaatttatttcggggcgattcggattggttcatatagcggctctctgttgtggatacatttccccatcctcggattctgttttgttttcttttattttgctctgcttcactactcggtgcgtctctctgccagaggccacctccgaaaggtgtcctcttgcgctgaaatcacctacattttccttggcggcggacagcatacatatatgccaacatatagcatatgtatgtattctattcacgcctatatactcgatgttttgctcgcctacgttcctttttctgttttcgaaatgccccgcacattgtgcaatatgaagagcgccgagaattccaaatctatagatctgtatatacatacacggcgatcgggcggatttcgtgtcgcataaatatccaacgaacccgatattggaccagagttatttcggcaacaaatgtggaataaacatctgactttatctatatgctagtcatccatggacattgcataacaatgggaaggctgtaggatttccatttcagataaactttgggtaccacgtcatgatacattaaccttgttactaaaaatattaaacactgcagtattcaagctatttaagccatt

SEQ ID NO: 2807 - DNA, 804 bp, DROSOPHILA
ctgacggctcgactcgattagacaacacatcaaagttcagcaccatggccgatgagaagaagaaggttaagaagaagaagaccaaggaagagggtggtacttccgaaaccgcttctgaggccgcatccgaggcagcaaccccggcaccagctgccactcctgccccggccgcatctgccactggttcgaagagagcgtcgggcggatcccgtggctccaggaagtcgaagcgcgctggctcctcggtcttctctgtgttctcccagaagcagatcgccgagttcaaggaggccttccaactcatggatgccgacaaggacggtattattggcaagaacgatctgcgcgctgccttcgactccgtcggcaagatcgccaacgacaaggagttggacgccatgctgggcgaggcctcgggtccgatcaacttcacccagttgctgaccctgttcgccaaccgcatggccacctccggtgccaacgatgaagacgaagttgttattgctgccttcaaaacattcgataacgatggtctcatcgacggtgacaaattccgcgaaatgctcatgaacttcggtgacaagttcaccatgaaggaggttgatgatgcctacgatcagatggtgatcgacgacaagaaccagatcgataccgccgccctgatcgagatgctcaccggcaagggtgaagaggaggaggaggaggccgcctaaggcacatccgatcacatcctaacttctaactcaacatccattttacagccagaatcagaacgttaaatcaatcagtcaaatcagtaataat

SEQ ID NO: 2808 - protein, 222 aa, DROSOPHILA
MADEKKKVKKKKTKEEGGTSETASEAASEAATPAPAATPAPAASATGSKRASGGSRGSRKSKRAGSSVFSVFSQKQIAEFKEAFQLMDADKDGIIGKNDLRAAFDSVGKIANDKELDAMLGEASGPINFTQLLTLFANRMATSGANDEDEVVIAAFKTFDNDGLIDGDKFREMLMNFGDKFTMKEVDDAYDQMVIDDKNQIDTAALIEMLTGKGEEEEEEAA

SEQ ID NO: 2809 - DNA, 11992 bp, DROSOPHILA
cacggctaaaggctaggcaatataattttataattgtaataattttacatatggtactcgtatctatatcatacttgtattatctgtggtctatcaattattgctctacgtattgtatccgtatctgtatctatatttttccgttgcgaatgtcttatgtacagtgtgactgatgggcgaatgatgggcgtaggatgctcatgtttgactaactataacagaggctagcatacatatgtatatgcgatatatcgtcgataattgtaagtgcatgctgcactttgggtccaaagcagcactcaattaatgcaattactgctctgcctttcttctcgtttcaatttcaatgccatctcacatccgcgcagtgggagaactaatgggtgggtcttacagatggggatggcgatggggatgcagtgcccgaggacgtagtctacgtgttgcagctccgaccgacagagagaagaaagtgatggacagaaggactctcgagttggggtaattgggctaagaaggacttggtgttttggctaacgataaactttaagttgagttcgattttgagttcgaataggattgagttagtgagttagagagaaagttaagagagtttacaaagtacgctatacgagctgacttttaaatgcatccacaatttgagtatagcggcaacctaattacacaatacacataaatatcaaataatatgcatttcgcattgcatttacatggtgtcatttacaaatgtgtgtgtgtgtccctgtgtttatctgtgtgtgtaaagagtgtacatagtgtgtgtgagagtcgtagaaatactgcatagttggtattggtatcggcatcggtagtatacaaaatagtagacagtgcttttggtaacatcttgctgttggttggttttccattatcgctttgggtaagtagtacgtgtaaaatccttttgcctcatctgcatcccaagatgtgtgtatctgtggctttgcgagggcactgtttagaaaaagctcttcaagaagccagctggtccagcctaaaaaaagggataaggatcggttattatccttggttacctttaacttgattctaacttacatcctgctgttgctgttgctgcgtttgtgcttgtttgactttggcttgagcgatctttaaggctctgaaatagggataatacggaacgaattcactggttgtgttttcagcgataggataaccaatgagacactcactgttgcaaatccatgatggtcttctccttggcgttctgctcctcctgcgacatttgtaccaattgcagcaaacgctccgtttcggttgccgccttcttgtgctcctcctttgtattttgcagctccttgacgcatctaaaaatagagagttacaacaatatatcaatcaatatcattgttatatggtatgcgttgaaataaaaataagtcattcagatttgaaaaagctttgtcgccgatggcatctttccatgtcgaggtgtccgtatttagagattcgcaacttatcttttctctcatttgttttcgtaatactaaaatattggttgtttatgcaacacttacgcttccagctgccgctgcgtatccatgagcttcttgttcagctcgccggcggccgccgctccgcctccctgcgtctgtagggacttctccagctggtccatctgctccttgcgcttgcgcagctgtacgtcgaactcggccatcttcttctccttttcctcgatgtccttgcgcttggcgtcgatctgcttgcgctgctcgtcgatgatcttgcgctcgccctcggtggccttggcctggttgtcgatctgcttgcgcacctcctccagttgcttctgctgctgttccagctgctggcgctgcacgtcggtggcgcctgctcccgcactggcagcctgctgcagttgttgcatctgctgctgcagctgttgcacctgctgttgcagttgctgcacttgctgctgcgccgtttggagctgttttgcctgctcctggttggacatctggccgggataaatgcgattaatggttatatatttgtttggttccatggataagtcaccttgctcttctccaactctgtgaccaggagctccagctgctgctggaagcgatcccgctcggtgcacgccgcctggagttcgcccctgaccttctccaactctttggggtccgcaccgccggcacctgctgcggattgctgctgctgcgccgcctgttgcaccgcctgttgcgccgcctgctgctgctgttgcatctgctgctgcatcttctgcatctgggcgtgctgatccttgatgtgttggtccataagctaaaccatttaaatgcattagaatgttagtttatttagtttattgggaatatatacataagtgtaacatggaacttcaataaagattgtttcaacgcccattcaaagtaacgtaattttaaacgcaagaaccaaatgataatattaagtacttacatattgacataaaaaatgtgtggaaataagtgatttaatgtgttagaaagtatcagtatgtttagttgtgttaaggacaaactccttgtgctcattgtgtccacgtcgatcctcacctgaatgcgcttgtgcatctcctgggcggccttgtcggccatgtcggcgcgactcttctcctgctcgatgaccttgcgccattgctcgatctcctcgcgactcgctcctgccgccgctgcagcctgtgcctgttggggaccggcggcttgcagggcgcgctccgactcttggagcttctgctggagggtctggatctccttttgcatggcctggaattcggcgggagagggtccggcgggtggagcggcgactggcggcacttggtgaccgttgcgcagcttgcggttctcctcgcgcgtcttctgcaattccgcctctgcgttctggagttccttctggaagttcataagaatctcctggctcttctccagttgcaggaccagctgctcccgctccatggccagctgcttgacgtctgactccagcttctggacgtgcttctccagctgcggatggggggcagcgccagctccgccgctacggttcgcttgacgcagcgcttcccgttcggcctcggccttctcgaggcgatcgtgcaggcgaccgagctcagcgcccatgcgctcgaactcgatgcgcgtggactcggtgttctcctgctgcttggccagatgcatttgcgccttctccagttccttggccaagcgaccggcctccagctcggtggcgtcacgcgactgcagcgccttttcaaggcgatcccgcaggcggtcgatctcctgccgttcgccagcggacagagcggaagaggaggacgtcgacgctcggaccggatcgccggggctcaccgaggactgttgcaggcgcaaacgatcgacctccttcagtagcttctcatgcttgtcgcgtgccttctcccgctcgatgtgcgcccgttccagctcggatcgctgcttttcctgattggccagcattttggccacctcgcccttcgacagctccagctgcaggctggtctcgtgcagcttcgactccatgttctgcacctccatctcgatcttctcgtacttgtccttgtacttctcgaatgactccgactcgtattgcgatttgccgcgtatggtctccagttccatgagcgtcttgtccagcttctcgcgcagccgctcgttctcctccttgaggcgtcgcgtctcccgcccgaaggtgtccgtgtcctgcagcttgcgcagctccacctggctcttctcgtagcggtcgcgcatcttctcaagctctacggcatagtgggccgcctcctccttggccgcctccacgctggcgctcgccttggtctgggcggcatgtgcgcgctccagttcgtaggtgaccctctccagctcggactggaagtgctccttctcgccctgggcacgccgaatgtccgtttgtagcttgtcgaagcgatcgcgactgtgctccagttcgctgcgcgcattgtcctcgcactccttggcgcggctcaactggagcgccgcccgatcgcaggcctcctgcagccgagtgctctcgtcctgcagcttacgcagatcctcgcgggccttgctggcagccaggccagatcgctccgcctccacctccaagcgggctctatccgcttctgccgtatcgcaacgggactgaaggcgatagatctcgttctgggcccgatcgtacttctccagcatcttttcgaactccttgttggaggtgtccttctcgtcgatcagcttctggctggcgtacagcgccttgtccagtttctccttgaggatctcgacttcggtgaccgcatcgtcgcgctccatctgaaaggaagtgataggggaagacttaggggttaggtctgggaattcgggtttgcactggcatgtagctacggatttacacaaacagccaattgttttgatatcttagttcagttctcatgcggtttttcaaacaatatgcagtacagacaacgtattttagtatagagtttagtagggttgatagccaatggttttgggtttcgtttttcgaagaggatacctgaagcaattgccttcgctggtggggagttgggtgtcaattacctggagtttctgctgaatggcgtgcgatttctcgtagcgctccttgagaacttccagatccgtttgcatcgcctcccggtcgcgggcggccttcatgagaagggtctgcgccgattccgagcgctccttgagcgtctccagctcgtcggagaattgatcccgctccttctggatgcgacccagttgcacctggtatttcgaagttgtgtgtgtgttttagttgtgtgtgtgtgttgtggggtgtgacagtcgaaagatagttacgcatacgtagagatatatgttagggataaatagttttagttatgtacaaggcgggaggttaggggttaagggtgttctggattaagcaatagcaatcacatcgatctaagcgaggttttagtggcatgtcggttaatagtttatctctgggggttagcacaacacagttacggttacagtcacacattttcggttagctagtctcttcgaagatgggtgtgtggttcagagcgtgtgtggtgttggtgtagtggttctgggggctgggactgggacccgggcatacctgcgtcttctccagcttctcgcgaatgcgatccgtgtccaaagagagagtctcgcgctccttctgcatcctggccgcctggcccaaggccttgtccagctgcgactgcaggttgtcgtagtcgtaggtgagcttctccttctcgagcaccagacggcggttctccgtgcaggccttgtccagcttatcctgcagatgatcgacttcgttctgggccttgtccagcgagttctgcagcttctcgtgctgcagctgcgacttgcccaacgtggcctgggtgcgctccatctcctccttgatcttttccacctcggagaaggcctgtgcaacggatggtggttttgggtgagtgagtgaggatggttggttggttggttggttgggtcattcatggggttcattgggggttttatttcggttttgggtgctgagctattgctaagcggttttgcctacccgatcgcggtcggcgtggatgcgagagacaccgctctgcgccttctccagctcctggcgcagactctcctgctcgccctgggcgttctccagcttggccttgagtcggtacacctcgccctggctcttctccagcttctcctgcagggcggccgcctcctcgcgtgctctttccgcatccgactgttttcgggtttcggtttggtcggatttcattatcaatcgatcgttgggaatcgaagggtttgtcatgttgttgtcgggggggtagagtggatgttggataacggatattatttacaggcaattatgtgggacaaaggttcttaaatgactgattcgactgactgactgactgaatgtctgactgattagtagacacgaaacagagaggttaaggtgacaaacgacaaatataacgacaaaaagtacttaaattacgataacgattacgaacacgatcacaacttctagcgagcgatttagagcgatttatgctgcgagcgagcgactgactttgaggtagataaagagcaggaatcaaaatttaagaaggaaaatagataggagaacagaagagggcttggtgcgagcttagaaaagatttggccaagaaaagcttaacagaaagtgcatagaagcgtatgtgaacggaaacaacagtgggaatagcatggaaaacttttgaggaagaaatggataaagatatcttaggtaaaatgtattggaaacaaacggacaaataaagtttgtaaaagtttgccaaacaaatacgaagtttaaacaaaatgtaaagaagttcaatgggataagaagaaaggatgtagctgggtaatgggttggaacagacggacattaacggacacaggaccaacttgttatgggacacatggcgggcatttgttcgcatgagttcgcgatggattagacgaccacagatggctcattagtgcaagaggaaaattagggaaaattggcgaaagtgcgagagcaaagtaaggcaaagtgtgcgtaagaaatgctggcggatgtgtgggtgtcaatgtatgtatttgtgggcgtgagagagcatacgttaagtcaattagctggggatatcagcggccttccgcttcctttagtcctcgtacgtgtgtacgtgagtgcgtgtatgtgtgtgggtggaaagtccaaggaaaagcgctccaggagctgagctgctctaaggatactttgtcatactttgcttgcatccggttttcggggcaggttgctctcttttccaaacaaaccggaagagtgacagatgagcttgaggctatatcgtacaaggtcaatgatgtatgcgtagtatgtgttcgctatatgtatagataggtgtgtgtgtatgggtatgtgcgtatgtatatgctggtatggcaatgttagtacatcaggcaatgtaaattacattaaattgaacaagtgacagattgcaactagctttggttatcttttttttgttgggtttctttggattactttggcatagtcagatgcagttcaagtttgcaatcgaattcaattacggttagttgcgttactaaaaacttgtttgattgattgattgcttggaagcggtttactcacaaaacgtttttcagtttcgccctatatttagagaatgaatgtaagcacaacggtttagatagagtttggttttagtatacatggtctcaacggcggtatttgcaataaaatctttacaattacgattacatttacaatttactaatacatttacggttacgttagtgttaaagttacgaaagaagcaaacataaaaggagtttaaatcgagttgaacaactttatccctatcctttatccccgcaaaaaggactcagcgtgttttgccatagcaagtgctcgggtctgtgcgtatttgtgtttgtgtgtgtgtggttggggtggcatgttgcagcagagaaagttatagacaggcgggtgggtggtcgaagtcccttcgacttttgtatttgtattggtgttctgagtgggtgtgtgtagaatctcctcaatgccgggcgaaagttttcggtccatcaacaacaaagcacacgcacaccgagatatgtacatgtacagcatacatccacatatacatatatacacacacagacagttgtatgtgagaattgcacttgcaattgcgagttcggcgttcgagatttatacataaagtatacgtaaataatatatgtaaagctaactaaaagagcattcagatatgcatatcgatatatgtacgagtatatggctgtctcggattcgcaggcaagtgggggagcatttggaccatacctgtgtgactctcagctcggcctgggtgcgtcgcagctcggctgaggccttgtcggcccgctcctgggctcgatccagttcctgggacgtggtcatcgtggtcctgccaaaggttgtctttgggcgggaaacgggaaacattcaaattagttggttggccacggttggggcgatatggataacaagtgcaagacaacaatcaaaagcagttcaaggcattagcaaatgtgtttacagatatggttgcgaatacgggtgacttgacgtgatgatgagtccagcaggcaagctgtttacaatggataccaatccaatccatgaagctgtgaatgattcaatgagcgttttgacattttggatttcgacacacgattctctcatatttgggtgcatttgacgcttggttctctaaattcggtttgcattttatttgggcttctatggcggcgctaagtgggttaggctgggtcagcggctttggccgacttaccgatatcttgcccgtttcgaacattaacttttgtacattctgcaaagtacgatacgaacatatttatatcttaatcttagggtatgcatgttcggcggcaattcaacttgtttacacctccctctgtccgcacagcgattaaatcaaaacccaactatgtaggcgagtgctgctaatcctgtctaagtatctaagtgcgcaatatgttagggctttatcggatctgaaatattgtagttgctgctggtgggtggtggttggtggttggttgactaagttcgacttcagcctgctggctctaaatggcgagtgatagtcggttgagggcaggcaaaaaatagtactacgagtttttgggtgatgagtgatagttacatggttctaaattagatgcgatacaatactatatatgtgtcggcgatacatcaaaggtgcacttttgcataatagcgatattccatattcgttttcgatgaaactaattaccaataccaattttagtttgatctttgaacaaaaccaagttactttataacattaccaacatattactttgttcgatttaactttaaaagtttaaataagctgaacaatttgggctgacttatggtgagtgaaaggatttcaaactacgttattcgaaaactaagatactcgatattatgcaatctagttggtaagtggaagtttggaattcggatttttgggcttactttgtgtagtgtggtctgttcttctagctgcatctatatttggtttatgtcgggtgagtttataattcaggttgattggttgttgtagttattataattgtagttgttgtagttgggtagtagttggtagttggtagttgggatgcgtaatgtgtacatgtaaatacatattcagatacagatatatagatatagatgtagatacagatagcacatagatatgtatgtgttttatgcatatgggttcatagattatcgatagcagtatgtatgcaagtctctcgattatatgtacacagcgcaaacatacatacgaatagactgatgataagttattagggtaatgtcggggaaactggtcataatgcacgagtacctgcgaacgctccagatcgtgtttcagccgctcgttctccagctccagtcgggcgatcctctgcttggtggactcccagtcggcgctgctcctgcccatttcgcaggtggccttctccagttcggccttcgacttgcccagttcgctctgcgaggcctccagcttgatctccagtcgttcccgctctgtgaccgcccgctccagacgcgtctgtagcttctccacctcactctcggcggcccgcagcttgatcttgtagtcggccacctcgcgttcgtggagatcccgctcctcctgcttctcgtgctcggcgcgatcccgctgatcacgcagctgggccatctgcttctccttgtcgccgatggcctcctccaggctggtcaaggcgccctcggagctgctgtggtgcgcctgcatggccgacaaacgggcccgcgccatatccacctggttgtccttctccttcagcagatcctccaggttttcgatctatcgaaagagatcgggaggattgaggagcgaacagggaaagaatggtaaccccgtaatgacctatgctgtttttttgatctagaaaactttggtgagcaaagatatgttctatcacctttaaagaattctttaaaatgtttctaaaggtattaataaatgctgtttagaccaccttttacaagattgttgttgttgttgaaagaataccttagttatcgagaactttattaagatattttaaatggaagattcatatgtagagttcactaactatttataattttatagtttatttccagagatcacttgaaagcatttgaaattccccttttatggcgggtcaagattaatatctaagcataataatgatctttctagtcatagtaccccaatagaaatagattagtaacaaattgttgccgaaggatggggatatacaatagaatgtctaaccttgcgctgcagcacgctgatcttgcggtccttgatgtccatgtggtccttgagctcggtaagctcgctggtgaggcgattacgctcctggaccgtctgcagggtgccctgggtcttcttctcgatgaggcggttcttctcctcgaggcgggcgcgcatctcctcgacgtccgtctgcagcatgttgtagtgctcctctttggcacatagcgattccttgagcaccgctatgtgccgctggtagtcctgacggaaattactttactgtgcaaacggaaaacttgggcgctagcttttcaatttacctggtgctgctcctcgagcgttttcattttggccgccatcgccaggatctcttgatcccttctctgtatttcaagacggaattcgtccagctgaatttcgattcggatggggtttgggtggtggttatgggttggttggaaaggaacaagtacagataacattagatcagagagtgttgccacgcatggtaatgcctgggccggggactgatccttagccaggactacaattacttggtggttggtgttcttggtctgcttgttgtctcaaagtatcatttgctgttgcaactgagtgtgaatatgagcgatttgaaggtgcgtacagcgagcttacgctttgtatagaatgagagttggtggatatgggtaatgtcttgggcccccaatcccagttattgggtttggtttggtacttaaccttaacctaaccgccctcgttgcgtatcctgttcggtataatcgtgtagtgggatggtctgttttggttggtgtgtatgtctggtgttttcattcgagggatcggagttatggtgttctgaactagtaggtggggtgacttggctgcttttccgtacgatgctcgacgttcggttttcgaatgtaattttattgtttgctttcgaaaagtttccattttataatgcttacagcttaggttatgtttaacagatttcgagaatattcttgcttgtcggaattaagtctgaatgcaatcttaattaggtttacagttaaatcattgtataaatagtacatcccgtgggatcataaatgtatatgcgtataatagaatattaaccataattatttaaatacaatacaagtatatagagagttatgtataatgtgtatatcttatatcaatattcaaatgcctcgtttcttgttctgttcgtcgtcttgtagaaaagggttacaaatcaatctgagtcgaagaggagaatcaagtttggctgagcaacaagaacagaagtaggaaaagcaagtggatagtatctttgtatctttgtatctatttatctattcacacgctcgcacattgtgctatctttcgaattggctagtgataagcttttatctttcggttacgctcacattctttaatgtacatatatttgtatatatacgtatataaacaattgaaaaaagtttatctatgaacacaatttctgtttttcttttacgattgctg

SEQ ID NO: 2810 - DNA, 4402 bp, DROSOPHILA
gcattaccatgcgtggcaacactctctgatctaatgttatctgtacttgttcctttccaaccaacccataaccaccacccaaaccccatccgaatcgaaattcagctggacgaattccgtcttgaaatacagagaagggatcaagagatcctggcgatggcggccaaaatgaaaacgctcgaggagcagcaccaggactaccagcggcacatagcggtgctcaaggaatcgctatgtgccaaagaggagcactacaacatgctgcagacggacgtcgaggagatgcgcgcccgcctcgaggagaagaaccgcctcatcgagaagaagacccagggcaccctgcagacggtccaggagcgtaatcgcctcaccagcgagcttaccgagctcaaggaccacatggacatcaaggaccgcaagatcagcgtgctgcagcgcaagatcgaaaacctggaggatctgctgaaggagaaggacaaccaggtggatatggcgcgggcccgtttgtcggccatgcaggcgcaccacagcagctccgagggcgccttgaccagcctggaggaggccatcggcgacaaggagaagcagatggcccagctgcgtgatcagcgggatcgcgccgagcacgagaagcaggaggagcgggatctccacgaacgcgaggtggccgactacaagatcaagctgcgggccgccgagagtgaggtggagaagctacagacgcgtctggagcgggcggtcacagagcgggaacgactggagatcaagctggaggcctcgcagagcgaactgggcaagtcgaaggccgaactggagaaggccacctgcgaaatgggcaggagcagcgccgactgggagtccaccaagcagaggatcgcccgactggagctggagaacgagcggctgaaacacgatctggagcgttcgcagacaacctttggcaggaccacgatgaccacgtcccaggaactggatcgagcccaggagcgggccgacaaggcctcagccgagctgcgacgcacccaggccgagctgagagtcacacagtcggatgcggaaagagcacgcgaggaggcggccgccctgcaggagaagctggagaagagccagggcgaggtgtaccgactcaaggccaagctggagaacgcccagggcgagcaggagagtctgcgccaggagctggagaaggcgcagagcggtgtctctcgcatccacgccgaccgcgatcgggccttctccgaggtggaaaagatcaaggaggagatggagcgcacccaggccacgttgggcaagtcgcagctgcagcacgagaagctgcagaactcgctggacaaggcccagaacgaagtcgatcatctgcaggataagctggacaaggcctgcacggagaaccgccgtctggtgctcgagaaggagaagctcacctacgactacgacaacctgcagtcgcagctggacaaggccttgggccaggcggccaggatgcagaaggagcgcgagactctctctttggacacggatcgcattcgcgagaagctggagaagacgcaggtgcaactgggtcgcatccagaaggagcgggatcaattctccgacgagctggagacgctcaaggagcgctcggaatcggcgcagacccttctcatgaaggccgcccgcgaccgggaggcgatgcaaacggatctggaagttctcaaggagcgctacgagaaatcgcacgccattcagcagaaactccagatggagcgcgacgatgcggtcaccgaagtcgagatcctcaaggagaaactggacaaggcgctgtacgccagccagaagctgatcgacgagaaggacacctccaacaaggagttcgaaaagatgctggagaagtacgatcgggcccagaacgagatctatcgccttcagtcccgttgcgatacggcagaagcggatagagcccgcttggaggtggaggcggagcgatctggcctggctgccagcaaggcccgcgaggatctgcgtaagctgcaggacgagagcactcggctgcaggaggcctgcgatcgggcggcgctccagttgagccgcgccaaggagtgcgaggacaatgcgcgcagcgaactggagcacagtcgcgatcgcttcgacaagctacaaacggacattcggcgtgcccagggcgagaaggagcacttccagtccgagctggagagggtcacctacgaactggagcgcgcacatgccgcccagaccaaggcgagcgccagcgtggaggcggccaaggaggaggcggcccactatgccgtagagcttgagaagatgcgcgaccgctacgagaagagccaggtggagctgcgcaagctgcaggacacggacaccttcgggcgggagacgcgacgcctcaaggaggagaacgagcggctgcgcgagaagctggacaagacgctcatggaactggagaccatacgcggcaaatcgcaatacgagtcggagtcattcgagaagtacaaggacaagtacgagaagatcgagatggaggtgcagaacatggagtcgaagctgcacgagaccagcctgcagctggagctgtcgaagggcgaggtggccaaaatgctggccaatcaggaaaagcagcgatccgagctggaacgggcgcacatcgagcgggagaaggcacgcgacaagcatgagaagctactgaaggaggtcgatcgtttgcgcctgcaacagtcctcggagatcgaccgcctgcgggatcgccttgaaaaggcgctgcagtcgcgtgacgccaccgagctggaggccggtcgcttggccaaggaactggagaaggcgcaaatgcatctggccaagcagcaggagaacaccgagtccacgcgcatcgagttcgagcgcatgggcgctgagctcggtcgcctgcacgatcgcctcgagaaggccgaggccgaacgggaagcgctgcgtcaagcgaaccgtagcggcggagctggcgctgccccccatccgcagctggagaagcacgtccagaagctggagtcagacgtcaagcagctggccatggagcgggagcagctggtcctgcaactggagaagagccaggagattcttatgaacttccagaaggaactccagaacgcagaggcggaattgcagaagacgcgcgaggagaaccgcaagctgcgcaacggtcaccaagtgccgccagtcgccgctccacccgccggaccctctcccgccgaattccaggccatgcaaaaggagatccagaccctccagcagaagctccaagagtcggagcgcgccctgcaagccgccggtccccaacaggcacaggctgcagcggcggcaggagcgagtcgcgaggagatcgagcaatggcgcaaggtcatcgagcaggagaagagtcgcgccgacatggccgacaaggccgcccaggagatgcacaagcgcattcaggtgaggatcgacgtggacacaatgagcacaaggacttatggaccaacacatcaaggatcagcacgcccagatgcagaagatgcagcagcagatgcaacagcagcagcaggcggcgcaacaggcggtgcaacaggcggcgcagcagcagcaatccgcagcaggtgccggcggtgcggaccccaaagagttggagaaggtcaggggcgaactccaggcggcgtgcaccgagcgggatcgcttccagcagcagctggagctcctggtcacagagttggagaagagcaagatgtccaaccaggagcaggcaaaacagctccaaacggcgcagcagcaagtgcagcaactgcaacagcaggtgcaacagctgcagcagcagatgcaacaactgcagcaggctgccagtgcgggagcaggcgccaccgacgtgcagcgccagcagctggaacagcagcagaagcaactggaggaggtgcgcaagcagatcgacaaccaggccaaggccaccgagggcgagcgcaagatcatcgacgagcagcgcaagcagatcgacgccaagcgcaaggacatcgaggaaaaggagaagaagatggccgagttcgacgtacagctgcgcaagcgcaaggagcagatggaccagctggagaagtccctacagacgcagggaggcggagcggcggccgccggcgagctgaacaagaagctcatggatacgcagcggcagctggaagcatgcgtcaaggagctgcaaaatacaaaggaggagcacaagaaggcggcaaccgaaacggagcgtttgctgcaattggtacaaatgtcgcaggaggagcagaacgccaaggagaagaccatcatggatttgcaacaagccttaaagatcgctcaagccaaagtcaaacaagcacaaacgcagcaacagcaacagcaggatgctggaccagctggcttcttgaagagctttttctaa

SEQ ID NO: 2811 - protein, 1456 aa, DROSOPHILA
MLSVLVPFQPTHNHHPNPIRIEIQLDEFRLEIQRRDQEILAMAAKMKTLEEQHQDYQRHIAVLKESLCAKEEHYNMLQTDVEEMRARLEEKNRLIEKKTQGTLQTVQERNRLTSELTELKDHMDIKDRKISVLQRKIENLEDLLKEKDNQVDMARARLSAMQAHHSSSEGALTSLEEAIGDKEKQMAQLRDQRDRAEHEKQEERDLHEREVADYKIKLRAAESEVEKLQTRLERAVTERERLEIKLEASQSELGKSKAELEKATCEMGRSSADWESTKQRIARLELENERLKHDLERSQTTFGRTTMTTSQELDRAQERADKASAELRRTQAELRVTQSDAERAREEAAALQEKLEKSQGEVYRLKAKLENAQGEQESLRQELEKAQSGVSRIHADRDRAFSEVEKIKEEMERTQATLGKSQLQHEKLQNSLDKAQNEVDHLQDKLDKACTENRRLVLEKEKLTYDYDNLQSQLDKALGQAARMQKERETLSLDTDRIREKLEKTQVQLGRIQKERDQFSDELETLKERSESAQTLLMKAARDREAMQTDLEVLKERYEKSHAIQQKLQMERDDAVTEVEILKEKLDKALYASQKLIDEKDTSNKEFEKMLEKYDRAQNEIYRLQSRCDTAEADRARLEVEAERSGLAASKAREDLRKLQDESTRLQEACDRAALQLSRAKECEDNARSELEHSRDRFDKLQTDIRRAQGEKEHFQSELERVTYELERAHAAQTKASASVEAAKEEAAHYAVELEKMRDRYEKSQVELRKLQDTDTFGRETRRLKEENERLREKLDKTLMELETIRGKSQYESESFEKYKDKYEKIEMEVQNMESKLHETSLQLELSKGEVAKMLANQEKQRSELERAHIEREKARDKHEKLLKEVDRLRLQQSSEIDRLRDRLEKALQSRDATELEAGRLAKELEKAQMHLAKQQENTESTRIEFERMGAELGRLHDRLEKAEAEREALRQANRSGGAGAAPHPQLEKHVQKLESDVKQLAMEREQLVLQLEKSQEILMNFQKELQNAEAELQKTREENRKLRNGHQVPPVAAPPAGPSPAEFQAMQKEIQTLQQKLQESERALQAAGPQQAQAAAAAGASREEIEQWRKVIEQEKSRADMADKAAQEMHKRIQVRIDVDTMSTRTYGPTHQGSARPDAEDAAADATAAAGGATGGATGGAAAAIRSRCRRCGPQRVGEGQGRTPGGVHRAGSLPAAAGAPGHRVGEEQDVQPGAGKTAPNGAAASAATATAGATAAAADATTAAGCQCGSRRHRRAAPAAGTAAEATGGGAQADRQPGQGHRGRAQDHRRAAQADRRQAQGHRGKGEEDGRVRRTAAQAQGADGPAGEVPTDAGRRSGGRRRAEQEAHGYAAAAGSMRQGAAKYKGGAQEGGNRNGAFAAIGTNVAGGAERQGEDHHGFATSLKDRSSQSQTSTNAATATAGCWTSWLLEELFL

SEQ ID NO: 2812 - DNA, 3732 bp, DROSOPHILA
gacaaaatattaaattaaaaatacactaatgttcaaacatttttcctctctgtggccaatctgaaaactattgctggcataacccatttgtcacactcccttaaccctggggtcatatcaagtgggaaacaagtggggaacacggtattcgagtttcccaactgtgtaccaaaacaagaaaaaaaaacaaaacaaaaaaaactttaaaatacgctttccactccacatgcaaatcactcgccattccaaaaagtatggcaacaaatttgtttttcccgtcgcaggaccactaatttgccactaatatgttaacaattgaaatgatatacctgatttgtatgtacgacatacaatttatattttagagcagaataaaaattaaaatgttgtcaattgaaaaatacaatgctttatatatttatttcgaatttttattagagagcgtagtatatattttttttgtttataaaatatgatcctaattactattgttttacatgtgtgtttaccccgtattcaaacaaaagtgagagtatttcgccagcgtttgcttttaattcattaactaaactttgttttggccttttgttgtattgctgttgttgttattgtgcccgtatccggtgaatttgccataaaacagccggagaaatgtggcgaagaggtcttagtcgtagctacatatacatagcatgccaacagcgcgtatgagtaatgcacgtgtaaatttgttaaagtagtcgacaaaacgataaagtcagctaaagctgcgaaagctggcaaaacaacaacaatgttgttgtttcattagaatgttggtctgctccttgatcgtttacaaggattctcattagcagcccaggaaagtatgctacgatcagcgaaaagatcgcttttagcaagtagcttttaactggtagtgtgtgtgtagattgatttgcttgttaatttggttgttcgttttttgcaatcgctggcgaatctggttatgaatgcccgcttactcctcagtgttagattccttagtctgtgtgtgcttttgtttcttcgccgccttgaacttccattcgttgtcatctaatttctttttgggtggtaacggacagctatatgctcttcttggtggtatcgtcaacttccatttcttcgctctgctcatcctactcccccacggcctcggctcatggggctgaggatcgtcggtcttcttggactcggcagcagccgattcctgaatcttagtggtaccaaatctacagcatttagtgagggcaaccaacgccacaatggccaccaggccaatggcccaaatcgagggatagtccttgactagctcgactaccttattcacgattgagtcccgttcacgatcgatgtagcgacgcttgatgtcaaagctgttggccgcaaagtcacgggccacctccacgtcgtctgtgatgatcaggttgtcgaagagaatatcactggacatggaccacagctccagacccacagcgctgatgggcgtcatttgaaagggcttgagatcctcaaagaagtctggattggcaatctttctgggtgcccacttgccctggtagtttgggttatcgatcatcggtgcaatccacttgcccttgtagttgggattgcggatgatgccacaggtttggtccttcttgcacactgggttgtctaccattggagcctgccactcgccatcgatttcgtcatcccaatcttcaggtttcgtggcagttggatcaaaaatcatgtcggcatctggcagctttagtgtttcattctcgtcccaatcctcgggcttgtgaacagtggggtctgggatcttctctcgctcatcccacgaatctggcttatggtcattggggtcatcgatctctgccggcggattgactggtggcttgaaatcggttagcagggaaccctctttgatgatcttgtggtcaatgcgaatttcaaagctgttatctggacgaaccaccagctgatagagatggggtaacttatccttgaatggctcttcaaaactattatttggcttgttgcaatgcttctcggtgatggtgccattaattggattgacgtgcttgaatataaagtgaattgtcacatctttgccgcacttgtccggtccaaacataatggtatagggtgtcttgtcattgaaggtctgtagttgttccgtctcttttccggcggacaaaagctttagatacgagccgccgcactcctgacccttctgaatcgtaatctcatactgcaccaccagtggcttctccgacttgaaatcgaacggctgatgaaggtgggctgctatggccgcatgtttggccttcgacttgagcaccagacccagatcgtttgcccaaaccatgcgctgcggcggctcccaattccagatgccatcgtacttggagatctcatcggcgatgtcgtccttcttggcctgcgagagtacccacctccttgtggatgcctccatgtcgtcgaagtggtccgcgaagtggaatttcttggcatcgatcaccgggctcttataggtaggcttctcatcgacatcctcctgctgcacatcctctacatcaacgtcctcgaagtcatcccactctagatccgaatcgatggctttgaccgcactcagcaatagcaaactgctggcgaagagcatcgacagtgttgcgtactgatttcctccaattttccatgccattttcaatcactctttcgctggtttggatttagtatttagtatacctgtttttcaacagttttcccggaatgccgagtggcactacgatgataatttaaattatacattttctgcgctgcctactgtgagcgtgtgttattttctttttttttaattttatttttatcatgttttatatggagggttatgggtataaacaaaattttggtgtgaggggtgaaaatcccgaagtctctggggtactatgcttgcaacggctacgtttttcctacctgtaattctgttgcatgtgcgtgtgtgtgtgtgtgtttgagtgtgtctgtgtggaggctctgactgcaactcatgtatttatgaagtgtcaacagcgtcgtcatcatgatgcatggcacccggcactatcttccttgggttaagcccaactgcagccctttcacctcccacttttgccccctctttccaacccccccccccaccccctttgtcattgtacattcaaccacccaaccacccactcaaccagccccacaagcccgcgttttatccactcacctgaactgagctcttgtcgcattctttgcgttttctcgttcattcttttacgtctacagggggtcggatataaagtattttagaattatttttcatcgtatttataacttaacagatcgtattttagtaataaagagtccttctttgatattaacatattagataagagtttagatgtaattgtaaataatactacataatgctttggaaaccaaagtagtgtttaacttaaatgggcttattattttttggtaacttaagaacttttagaaccacccatggttggctgttaatttaggctttattacaacacatcaaacatagaaacagagacagccagccggagttatatttgtttgtttcacggttccggttttaatttgagagcttttttaaactacttttatttttgtcccactcatatcgcaactcaatttggaaagtgtaaaaagcagtggtacaaagta

SEQ ID NO: 2813 - DNA, 1693 bp, DROSOPHILA
agcgaaagagtgattgaaaatggcatggaaaattggaggaaatcagtacgcaacactgtcgatgctcttcgccagcagtttgctattgctgagtgcggtcaaagccatcgattcggatctagagtgggatgacttcgaggacgttgatgtagaggatgtgcagcaggaggatgtcgatgagaagcctacctataagagcccggtgatcgatgccaagaaattccacttcgcggaccacttcgacgacatggaggcatccacaaggaggtgggtactctcgcaggccaagaaggacgacatcgccgatgagatctccaagtacgatggcatctggaattgggagccgccgcagcgcatggtttgggcaaacgatctgggtctggtgctcaagtcgaaggccaaacatgcggccatagcagcccaccttcatcagccgttcgatttcaagtcggagaagccactggtggtgcagtatgagattacgattcagaagggtcaggagtgcggcggctcgtatctaaagcttttgtccgccggaaaagagacggaacaactacagaccttcaatgacaagacaccctataccattatgtttggaccggacaagtgcggcaaagatgtgacaattcactttatattcaagcacgtcaatccaattaatggcaccatcaccgagaagcattgcaacaagccaaataatagttttgaagagccattcaaggataagttaccccatctctatcagctggtggttcgtccagataacagctttgaaattcgcattgaccacaagatcatcaaagagggttccctgctaaccgatttcaagccaccagtcaatccgccggcagagatcgatgaccccaatgaccataagccagattcgtgggatgagcgagagaagatcccagaccccactgttcacaagcccgaggattgggacgagaatgaaacactaaagctgccagatgattgggatgacgaaatcgatggcgagtggcaggctccaatggtagacaacccagtgtgcaagaaggaccaaacctgtggcatcatccgcaatcccaactacaagggcaagtggattgcaccgatgatcgataacccaaactaccagggcaagtgggcacccagaaagattgccaatccagacttctttgaggatctcaagccctttcaaatgacgcccatcagcgctgtgggtctggagctgtggtccatgtccagtgatattctcttcgacaacctgatcatcacagacgacgtggaggtggcccgtgactttgcggccaacagctttgacatcaagcgtcgctacatcgatcgtgaacgggactcaatcgtgaataaggtagtcgagctagtcaaggactatccctcgatttgggccattggcctggtggccattgtggcgttggttgccctcactaaatgctgtagatttggtaccactaagattcaggaatcggctgctgccgagtccaagaagaccgacgatcctcagccccatgagccgaggccgtgggggagtaggatgagcagagcgaagaaatggaagttgacgataccaccaagaagagcatatagctgtccgttaccacccaaaaagaaattagatgacaacgaatggaagttcaaggcggcgaagaaacaaaagcacacacagactaaggaatctaacactgaggagtaa

SEQ ID NO: 2814 - protein, 543 aa, DROSOPHILA
MLFASSLLLLSAVKAIDSDLEWDDFEDVDVEDVQQEDVDEKPTYKSPVIDAKKFHFADHFDDMEASTRRWVLSQAKKDDIADEISKYDGIWNWEPPQRMVWANDLGLVLKSKAKHAAIAAHLHQPFDFKSEKPLVVQYEITIQKGQECGGSYLKLLSAGKETEQLQTFNDKTPYTIMFGPDKCGKDVTIHFIFKHVNPINGTITEKHCNKPNNSFEEPFKDKLPHLYQLVVRPDNSFEIRIDHKIIKEGSLLTDFKPPVNPPAEIDDPNDHKPDSWDEREKIPDPTVHKPEDWDENETLKLPDDWDDEIDGEWQAPMVDNPVCKKDQTCGIIRNPNYKGKWIAPMIDNPNYQGKWAPRKIANPDFFEDLKPFQMTPISAVGLELWSMSSDILFDNLIITDDVEVARDFAANSFDIKRRYIDRERDSIVNKVVELVKDYPSIWAIGLVAIVALVALTKCCRFGTTKIQESAAAESKKTDDPQPHEPRPWGSRMSRAKKWKLTIPPRRAYSCPLPPKKKLDDNEWKFKAAKKQKHTQTKESNTEE

SEQ ID NO: 2815 - DNA, 3578 bp, DROSOPHILA
aatgcgaagcactcacagcggtcgcgagaatgtggtagcaactcggtaagtttggataattcaagtaaaatgatttaattattgaaatatcatgtttttacagctttgccatcattgtgaccaccgattgcgcctgctggctgcccataattgtggtcaaattggctgctctttcaggcaagttcatcggcaacgcctttaaatgatttattttgattatcaacttattcgtatatatataacccctttcaggctgcgaaatctcgcccgatctttacgcctggctggcggttcttgtgctgccagtgaactcggccctcaatccagtgctctacacattgaccactgcggcctttaagcaacagctgcgtcgctactgtcacaccctgcccagctgctcgctggtgaacaacgagacccgatcccagacccagactgcctacgagtccggactgagtgtcagtctggcgcacttgggcggtggtgtgggcggcgggtcggggcgaaagcggatgtcacaccggcagatgagctatctgtaggcgggcgcaactggcttaaaatgcagcacgagatcaacagactggggctagtgggtgggtggcattacaacaggacacttccatgtaattggtcccttagactattggtattatacgtacttattgatacttattctaatatcaattttaaattacttataacatttgaggatatgataacataaaccttagacaagagattccagctatttaagtttcttttttgtatattatttattttaccaatcgttttaaggcaaacctcttacaactgtccaaagaatatcctaactatttgttgcatccccatttattcgacctgcccaatgggatattgttacatgtgatctaatagttaaatcaaattttaattttataaatacatattcagatgttaattgaagcttttgaacataggacttgcaatcgaaggccgcaaatgcctgccatccggctttctatgcgttgccctgaggttcagtggctacatcgagatccgcctggacgtgatagggtccctcgttcacataggccgtgaaacggatggtttcggtgggcgaaaactcagcgctagcggacagaatctccataatttgccacttcatatacttaatgtccctgtgcagatccttttgacgcgaaagaaggaactccacagcaccgccggtattctttagagctacaatgccccagttgtacttacaaatggttttcaagaacgacaaggcggccatttgaagatcggggaacggagtgtttatcaggtccataatgatattagcatgcgctcccccagcgaagcactcgtaccagtttttaccaatgttactgaaaaagaagagaatcattagaagaaaaacttcaattatagagttaagcattacatgatttctgtggcaggcggcgtcttgaagtcataaatcacatccagggagttgagcagcctcttcttgatgtgcgccgatagcttcttagtatgcgagccatacttcttaaaggacttctccatggccccgctaaagtgcatgttcagcagtatcttgccctgtggagtagtggccaaattggcaagcgtatccatggcagtgggcagaatactctcatcctccgattgaagctgcatgaacaagcaggccagcatgtgcgggtagccgccaatgattttcagaggctggtatacggaaattttgccgaaaaacttcataatgctgggaacgagcagggcgtctagcggatgctcttcgacgcgttggacccgatagctgattatatccaaaacgcgacgacgttccatgtaggacagaccatggttttgttcggccagtggcactaggacgctccattacgctagcctgcaataaaacatcgtcgttatccagttcgctgagagccgcatccagaataaatgtaacgtcactgagtaaggtggcacttttcttggccaggaccactgccaattcgtaggcgcgacagcgcacgatctcattttgctttaggagctgtactagctttgcctgcacatcggcattgctgattcgctgaggcagcacgatggataggatattgatggccagagaggtactctgcgtatccggttgtttcagctcgtccaagatgaggaaaataagctcattgttgggcagggtgagaacctgaccgacggtcaactggcgaagcagcttcttgaacaaactggccaacacctgggcacgcaaggctggattcgagtgggtcaagccacgtcttagcagactggacagctgctcgtcggcggtgtccatcgccagctgatcaaggcagtggcacagcaattccagggtcacgtccacggcctgatccttgggaacatgggaatccgcggcgggattggcgcagtcatacaattggtccgtggtcagcaggcgttcaattatttgacgcggaagagccgcctcctttgcgatggctgagttcatggcggtcagcgcatccagcctttgtggcttcgactccagagcctttaacttggtgacccaccaattgtcttccatttccatttgttttctgtgttaaaatgacagtcggtttcaaacctatcgttcttcgatttcagaagacgttacttgtccgaacttattggcgactatcgatattgcttatgtttatggcttgacactgcaactatcgagcgtttgggcaaaccaatgttttcgatcgatagtagcaagtgctagtatattccttatcgtattgtttgtttgttacaaatgtcttgaaagtttttaagtatattttcaaagccaactatatagctgtaactctattgaaatgaataacttcgattaaagtgcaaaatgatagccgcagccctgccaaacgttgtaatatctatcgcccagtcgaccaccaccagtaatagtgcatccctgttttgacgccattttacaggcgaaattgtgtgtgtgtttgacgcgttgttgtattgaaacaaaaaggcagaaattttccttcgtctgcaaagggcaattgtttacggctggaaaaaagggaggacttcgtagcaaagatgtcgcaacgctttgcacctggccaagcgccggtgcagtcgcgttatcagccaccaccaccggcgcccggcatgcgtccctatccgccgccaggcgcctcttttccagtgagttttccacgcattatccagcacctaccgtttcaattaagcatgtacaatcttatccgcaacagccgcgcgggtttcccctgcatccgaacactactcaacctgttcccggcacggcgaacgtggccggggtaccgggagttcctggagtacccggcgtaccgggaccatcgctactgcagcgcgccgcccaacagccgggctttcagagcagccttcgcggtactggagccggaggtggcggtgttggatccggcggaggcagcaagaggtcaaatgaatcccgcagtttgggtggcggtggtagcaaaagtgattttgcgacggccaaaaagaaaaagaagctggccgaaaagatactgccgcagaaggtgcgggat

SEQ ID NO: 2816 - DNA, 1425 bp, DROSOPHILA
atggaaatggaagacaattggtgggtcaccaagttaaaggctctggagtcgaagccacaaaggctggatgcgctgaccgccatgaactcagccatcgcaaaggaggcggctcttccgcgtcaaataattgaacgcctgctgaccacggaccaattgtatgactgcgccaatcccgccgcggattcccatgttcccaaggatcaggccgtggacgtgaccctggaattgctgtgccactgccttgatcagctggcgatggacaccgccgacgagcagctgtccagtctgctaagacgtggcttgacccactcgaatccagccttgcgtgcccaggtgttggccagtttgttcaagaagctgcttcgccagttgaccgtcggtcaggttctcaccctgcccaacaatgagcttattttcctcatcttggacgagctgaaacaaccggatacgcagagtacctctctggccatcaatatcctatccatcgtgctgcctcagcgaatcagcaatgccgatgtgcaggcaaagctagtacagctcctaaagcaaaatgagatcgtgcgctgtcgcgcctacgaattggcagtggtcctggccaagaaaagtgccaccttactcagtgacgttacatttattctggatgcggctctcagcgaactggataacgacgatgttttattgcaggctagcgtaatggagcgtcctagtgccactggccgaacaaaaccatgcattatgaagtttttcggcaaaatttccgtataccagcctctgaaaatcattggcggctacccgcacatgctggcctgcttgttcatgcagcttcaatcggaggatgagagtattctgcccactgccatggatacgcttgccaatttggccactactccacagggcaagatactgctgaacatgcactttagcggggccatggagaagtcctttaagaagtatggctcgcatactaagaagctatcggcgcacatcaagaagaggctgctcaactccctggatgtgatttatgacttcaagacgccgcctgccacagaaatcattaacattggtaaaaactggtacgagtgcttcgctgggggagcgcatgctaatatcattatggacctgataaacactccgttccccgatcttcaaatggccgccttgtcgttcttgaaaaccatttgtaagtacaactggggcattgtagctctaaagaataccggcggtgctgtggagttccttctttcgcgtcaaaaggatctgcacagggacattaagtatatgaagtggcaaattatggagattctgtccgctagcgctgagttttcgcccaccgaaaccatccgtttcacggcctatgtgaacgagggaccctatcacgtccaggcggatctcgatgtagccactgaacctcagggcaacgcatag

SEQ ID NO: 2817 - protein, 474 aa, DROSOPHILA
MEMEDNWWVTKLKALESKPQRLDALTAMNSAIAKEAALPRQIIERLLTTDQLYDCANPAADSHVPKDQAVDVTLELLCHCLDQLAMDTADEQLSSLLRRGLTHSNPALRAQVLASLFKKLLRQLTVGQVLTLPNNELIFLILDELKQPDTQSTSLAINILSIVLPQRISNADVQAKLVQLLKQNEIVRCRAYELAVVLAKKSATLLSDVTFILDAALSELDNDDVLLQASVMERPSATGRTKPCIMKFFGKISVYQPLKIIGGYPHMLACLFMQLQSEDESILPTAMDTLANLATTPQGKILLNMHFSGAMEKSFKKYGSHTKKLSAHIKKRLLNSLDVIYDFKTPPATEIINIGKNWYECFAGGAHANIIMDLINTPFPDLQMAALSFLKTICKYNWGIVALKNTGGAVEFLLSRQKDLHRDIKYMKWQIMEILSASAEFSPTETIRFTAYVNEGPYHVQADLDVATEPQGNA

SEQ ID NO: 2818 - DNA, 1350 bp, DROSOPHILA
acaaatcagcgtcaatcatacgacgcgttggctgtcaattctgttttattgatgccgcttttgggcctcaaatagcaattaaacccctcccccctccccactccgcactcacatatcaagctattcaaacagaccaataaacatctagttatggatgagaaaaactatagcgaaaaagggaaagttatggagaaaccattcaagcacgatgtgcatcgactactgcattggaacagagaaatttccctaaaaggcaaacgacttcttaaagctttgtgcaaaaatcacctttcaatcatccaaattgtattataaaatcacttcaaatcacgtgtttgattgtcatgatgaactcataacaaatacatcattcattaacaatcaagttgaggcaaaaatgtcattagaccatcgctgggtgagataagaacttttccggttgccaaaaaaaaaaaaaaagaaatcacaacatgtcaaaaagaaattggcaaatgctttggtatgaaataatgatctactcatgtgttcatatcaatgacgtcgtcttctaatccaatttttcgccgtctgcgtatctgatgaaatgatgaaattttttttggcaaatgtccaagaatcaaatacaattaccaacgtcaacagttgggccaatatgacgtcttcgcctggccatccccattcccccccagaagaagttctattaaaagatgcgatgcgatcccaacactccacaattgacgacaattgtagctgaagtgctctcttgataagaacacaatttccgatagctgatagctgacaaacttttcgttgtgatttaatataactaatctttaataatttactaggcgctagtgcaaaacatttgttttatcagattcgtttgtggtttcattccagtgatatatggttaccattataatggaatatttcgaacttattataatactgtctaatcagtactaattatttattattttatagttattggttaacttaccgcttttggagacattttgttgtttcgtgtcttgtcgtacttatcgaaacgaaatgttttctttccaggatattatcgtctgaactctttattgtttttgtgctgcaatctttttgtacagcttgatccatgtggagtcgcccttggagtcggtgtactggagtccaaagaaccaaacctctcgcaggccgatcgtcttcaccacctggtcaaacaattgcttgcccgtcgtcgtcgactgaatggcgaactccagttccgcgtccattgtcgtgacgcgcacatttagctgaaattagtaagggatgtcgggatattaaaaaaatatcgattaaatgattaaaataacg

SEQ ID NO: 2819 - DNA, 2004 bp, DROSOPHILA
aaagctcacgaaaaacacgcggcaattggataagaaacgaaattgttgatccaacgcgaggaagaagaagaattgtgaagcaagaagaagcgaaaacaaactgcgattgcagcacaaaaacaataaagagttcagacgataatatcctggaaagaaaacatttcgtttcgataagtacgacaagacacgaaacaacaaaatgtctccaaaagcgctaaatgtgcgcgtcacgacaatggacgcggaactggagttcgccattcagtcgacgacgacgggcaagcaattgtttgaccaggtggtgaagacgatcggcctgcgagaggtttggttctttggactccagtacaccgactccaagggcgactccacatggatcaagctgtacaaaaaggtgatgaaccaggacgtgaagaaggagaatcccttgcagtttaggttccgtgccaaattctatcccgaggatgtggccgaggagctgatccaggacattacactgcgtctgttctacctgcaggtgaagaatgccatactgaccgacgagatctattgtccgccagagacatccgtgctgctcgcctcgtacgccgtccaggcgcgtcatggtgaccacaataagaccacccacacagccggctttctggccaacgatcgcctgctgccgcagcgcgtcatcgaccagcacaagatgtccaaggacgagtgggagcagtcgattatgacctggtggcaggagcatcgcagcatgctgcgcgaggatgccatgatggagtatctgaagatcgcccaagacctggagatgtacggcgttaactactttgagatccgcaacaagaagggcacggatctttggctgggcgtagacgcactgggtctgaacatttacgagcaggacgataggttgacgccgaaaattggtttcccatggtccgagattcgcaacatttcgttctcggagaagaagttcatcatcaagccgatcgacaagaaggctccggactttatgttctttgcgccacgtgtccgcatcaacaagcgcattctggccctctgcatgggcaaccacgagctgtacatgcgtcgccgcaagccggacaccatcgatgtgcagcagatgaaggcgcaggcgcgcgaggagaagaatgccaaacagcaggaacgtgagaagctgcagctggcgctggccgcacgcgaacgcgctgaaaagaagcagcaggagtacgaggatcggctaaagcagatgcaggaggacatggagcgttcgcagcgcgatctgcttgaggcgcaggacatgatccgccggctggaggagcagctgaagcagctgcaggccgccaaggatgagctggagctgcgccagaaggagctgcaggcgatgctgcagcgcctcgaggaggccaagaatatggaggccgtcgagaagctcaagctcgaggaggagatcatggccaagcagatggaggtgcagcgcattcaggacgaggtcaacgccaaggatgaggagacaaagcgtctgcaggacgaagtggaagacgcccgacgcaagcaggtcattgcggctgaagccgctgccgctctgctggccgcgtcgacaacgccgcagcatcaccacgtggccgaggatgagaacgagaacgaggaggagctgacgaacggcgatgccggtggcgatgtgtcgcgcgacctggacaccgacgagcatatcaaggaccccatcgaggacagacgcacgctggccgagcgcaacgaacgcttgcacgatcagctcaaggctctgaaacaagatttggcgcagtctcgcgacgagacgaaagagacggcaaacgataagattcatcgcgagaacgttcgccagggacgtgacaagtacaagacgctccgcgagattcgtaagggcaacacaaagcgtcgcgtcgatcagtttgagaacatgtaaaagctatcaaagatcagagatcgatagtgcgcgggaaagagagagggagcggtgagactccagaaaga

SEQ ID NO: 2820 - protein, 578 aa, DROSOPHILA
MSPKALNVRVTTMDAELEFAIQSTTTGKQLFDQVVKTIGLREVWFFGLQYTDSKGDSTWIKLYKKVMNQDVKKENPLQFRFRAKFYPEDVAEELIQDITLRLFYLQVKNAILTDEIYCPPETSVLLASYAVQARHGDHNKTTHTAGFLANDRLLPQRVIDQHKMSKDEWEQSIMTWWQEHRSMLREDAMMEYLKIAQDLEMYGVNYFEIRNKKGTDLWLGVDALGLNIYEQDDRLTPKIGFPWSEIRNISFSEKKFIIKPIDKKAPDFMFFAPRVRINKRILALCMGNHELYMRRRKPDTIDVQQMKAQAREEKNAKQQEREKLQLALAARERAEKKQQEYEDRLKQMQEDMERSQRDLLEAQDMIRRLEEQLKQLQAAKDELELRQKELQAMLQRLEEAKNMEAVEKLKLEEEIMAKQMEVQRIQDEVNAKDEETKRLQDEVEDARRKQVIAAEAAAALLAASTTPQHHHVAEDENENEEELTNGDAGGDVSRDLDTDEHIKDPIEDRRTLAERNERLHDQLKALKQDLAQSRDETKETANDKIHRENVRQGRDKYKTLREIRKGNTKRRVDQFENM

SEQ ID NO: 2821 - DNA, 2459 bp, DROSOPHILA
gtctggtgaaggccaaatcagatggtagtctggccaccgcgggctccgtggccgatggagattcagtggctgccgccgctgcttcgtttagtaagctgaagtcgcgctccctggagccactaaccggattggctatgtggtcgtcccaaccgcaaattatcgagctggtcaagggcgatcgcggtctgggcttctctattctggattatcaagatccgttggatcccaacgatacgctgattgtaatccgttctctggtccctggaggggtggctcaattggacggacgccttatacccggagatcgacttttgtttgtgaactccattaacctggagaacgcctcgctggatcaggcagtgcaggctttgaagggtgcttcgaaaggagtggtgcgcattggtgtggccaaaccactgcccatgacggacaactcactgaaggcttgcagcaatgcgagcaccaccagcgaagagaccttggacgcccagccatcgcctccagccttgcccacagttgctccgcccgccatgccgcctagtgcctccatgggagctgagcccgacctgattcccgactggcggaactagggtgttacgataacgaagaatttcacacattccaggcatttgaatctttaagcctgttttaaatcaaatcaaacgcggttgctaactaatggattagttaatcgatattttctacgaatatgaacaacaggcagtagaatctgaaacgatgtcagaaacgatgccagaagtacaggagcgattgttattaccgaagcaaaatgttatgcatattattaacgccgaattgtgtttgtcccctgaaaacaagcattccacaagtatgcaatatattaaaccccctagtattagcaaatgaattttaacatggtatttccagagtgtatgtacttaaactaaattaaataatgtaccttccgtacggtcaatgagtatcacttggggaagggaatcgatgatttggcggagggctattggacccggtttagctgtcgctcgattctcatgtagttgcgcctggacaggactcgatcgcgggcataactgaccaggtagctaagtaatccgattacaaagcacgagacctcaaatttcaagaagttcatttgctcgatgagcgccacccggtcgcagctcctggttacgatctcgccgctctggcagcgcagcacctccttgtagtgcgtgtgaatgcagacgcccaagctccggctgactatatcgaattcggagcacgggtggcactcctgcaccatcgtgtacttctcattccgccagcaggtcgagttgtcctcgatcacgaattgcggctctcggcgacgaggaccatctgccgcgtaacgagattccacgaacaggacgagtatggtgaccatcgttagggctcctagtccaaggagcatgtggtgacgctgacagttctcgagcattgtgaaggcgggcagctaactcttgtatcggatcaagtgctggaaacaacctggaagaacctatgcatgctcagtaggtggataactccaatacatatggacgggattactcgaaatcctattgctttgcttttccccctatgaaatcagctttactgtgtgaccaggcgagagtttttatttttgttcagccgtctttggaactagttcttgcttggcatttaagattatatattaaaaaaaaattgaatttgcacatgcatagatttcgtaatttagataaagcgttaaattaagggagaaaataatatttttcgaggaaatcttataagccgcgtattccgctccgattcgcggaactgcagatgtgtggccagacttcggggagctcgaaactagttcgctgtttacgaacgacaataaacggagaccaaaacaattacggaggacaagcacaaagcggacttgagaaatttgtgaaaatttttataaatcgcgtgtgtgggcgctttgaaaatggtgctgcgatcgggaatcataattccgtttcagtttcgcgacacgaagaagctgctgatgatcggggtgccgcaggagaaccgcgacctaaacatatgggacctaaagaacgtgggtaagcactggtctggtcggagagggggaggtggctcaaatcacggagcccccaagcgatttggtcgccaaaaatgaaatatgtctaacaaatcccgctccacagtgcgcgccgccttcgggatctacaacttcgagttccggaacaagaagatcggcttcaacatcccggacgaactgctgctgcactatctggcccagaggcacgacctcaccaacttcgttatagagatcagtcaaggtaaatagcgtttaagttacggctaagtcgcgtttcaattagcgtttaagcgttcgagtgactgcgggccaccaaaagtcgcgatttcgcggagttccggagtttcacagtcaagtcttgtttgta

SEQ ID NO: 2822 - DNA, 459 bp, DROSOPHILA
atgctcgagaactgtcagcgtcaccacatgctccttggactaggagccctaacgatggtcaccatactcgtcctgttcgtggaatctcgttacgcggcagatggtcctcgtcgccgagagccgcaattcgtgatcgaggacaactcgacctgctggcggaatgagaagtacacgatggtgcaggagtgccacccgtgctccgaattcgatatagtcagccggagcttgggcgtctgcattcacacgcactacaaggaggtgctgcgctgccagagcggcgagatcgtaaccaggagctgcgaccgggtggcgctcatcgagcaaatgaacttcttgaaatttgaggtctcgtgctttgtaatcggattacttagctacctggtcagttatgcccgcgatcgagtcctgtccaggcgcaactacatgagaatcgagcgacagctaaaccgggtccaatag

SEQ ID NO: 2823 - protein, 152 aa, DROSOPHILA
MLENCQRHHMLLGLGALTMVTILVLFVESRYAADGPRRREPQFVIEDNSTCWRNEKYTMVQECHPCSEFDIVSRSLGVCIHTHYKEVLRCQSGEIVTRSCDRVALIEQMNFLKFEVSCFVIGLLSYLVSYARDRVLSRRNYMRIERQLNRVQ

SEQ ID NO: 2824 - DNA, 4491 bp, DROSOPHILA
tcaaagggtaggtggccaatggagtgacttgtggcgttccttccgttgatccataccacggccgaatagtgaacgctgctaaatcgcaaccaagtgcgttgcatagtcttccaggagcgcggcacaaaaaaagtacgctcataccatacggttccaacgtgatctcgtaagttatctgtagtgatgtcgttataggaggcaggcactggcatcgaaataatctcccttccggtttttctcaaggcatccataaaccacttttccctaattccctgtaaggggtcatatggatcactcctaaccagttgccacattccatccaagctccgcacttcacgggtctccgaatccctggggtacaacaatcccttggttggtgtgggctttctgacattatcatattcaaacaaaggggaatcagttagttctttgcgattggcgttcaccaagaagtcgttttcggtgtaagccaatagaacctggagactgccaagcagtaagcaggtgacgggcatccaatgacttttcatctgaaatcagaatatttctatcgagttacaatttaatggttatcaaacatttgtgaaccatcttcttcttcacccggcctttgataagagcagtgtgaccagcgcaaatatagtgaacaaaatccatctattatttaatatgaaatttttttacataaacttaaaattgtaaacttaaaagaatttaggtttaggtttggccttctactcatgataaaaaaaattgtttaccgtgaaacatcattgtttggaatctgcgtttgaaggatctactcaagaggttaaaataatttgcaaatatctgtgtatatctcccgcttaatgttctttcaaacttggtcacaatcattttattcaattacatttatttgaaaattgaaatagtccgtgacatgggaatccgtgagggcaatcgatggtttggtagaaaaaatcggtgctgtcatataatatcgataagataattcaccatctggtagcacgactaagttcatacgtgtaattatcggtagttaaaaataaaaatattaatacgccttgatagaggcaaccctcagtttcagagttgaaaatctcgatggcaatgcaaacaacttcgttcggctaacaaaacccgactaaattccaacgtcaacgagagcatagacgatattttcggtttcttcccaagtgataccgattccgagagctacggccttatatgtagagtgggggcaggcagagatcccggccaaaattaacatattcctggagactatcagccagctggcggccctggcgacctcgaccggcatcatgcagctgctcttatcgtccgtttgcatggcgctgaccagcgcggtgattggatttgcctactaccaaaagcagcagttctatcctgcggtggtctacatcaccaaatcgaacgcctccatgggggtgagtaaatcctatcatacaatccagtcccatgcctaagccttgttttcgtttgcttccaggtcatatacatacaattctttgtaattgtcttcatgttcggcaagctgctaagcaaggtgacaatcagcaagagtaccttgcacacccgcattaacattgttaatccctcagatcttcctgggcactctgcgtgccgcagagtttgagcatctgctggagcgcttttggtatgcccttacggagacctgcttggcctttaccgtattccgggatgacttcaatccgcgctttgtggccttgttcacggtgcttctatttctcaaatcattccattggctagcagaggagcgggtggactttgtaagtcttgcgtcaagtaaatacccattttttgaaattcttgaaccaccgtagatggagcgttcccccgtgctcggctggcttttccacattcgcgtgggcagtctgctcacagtgctaggcatcctagactacgttctgttgatccatgcctataactccactttggtgcgtggtcccaccgtgcagttggtctttggctttgaatacgccatccttctgaccgtaatagccagcacggccatcaagtatgtgcttcacgccgcggaaatgcgcacggacacgccctgggagaacaaggccgtgttcctgctatatacagagctggtcattggacttattaaggtggtcctgtacatactgtttgtggtgatcatggctaaaatatacgcgctgcccatgttcgtattcaggcctatgttctttaccatacgcaacttccgtaaggccctaaatgacgtgattatgtcccggcgtgccattcgcaacatgaataccctgtatcccgacgccacgcctgaggagctgcgccagtcagacaacatctgcatcatttgtcgcgaggacatggtcaatcactcaaagaaactgccctgcggccacatcttccataccacatgcctgcgctcgtggtttcagcgccagcagacctgtccaacctgccgtttgaacatccttcgaactccaaccgtgaactccacagcgatgccacggcaaggcgatgaggctgtggccgcagctgctggaaatcccattccggctgcagcaggtgttcaaccggctggtggtgtgcctcctccagctccaactgccgtagttgacggcaatcaggcaagagccgacgtcaatgtagccggaggtcaagccttgccgccaaactttgcggatctcttcggtgatgccagtgagttttgaagtttgattcctaagacacgattataatcgtcatcttttattttcaggcggcttgcccaatggattgcctaacctggctggtttgcagatccctcctccgccagtaatgcccatgatttcgccttttatgataccaccccacttcggctacctcacgcctctgccgcctccgccgattccacaggacctgaccaattttaccgacgaagaactgcgggccatggagggccttcaacgtgatcatattgtgcagcgtctaaaggtccgatttcgataatctcctcattctacatttcctaatcaaagatcactttacagttgctgcaaaacataaacctaatgctggattccgcggggataatgatgtcccagtaccaaagtttgtctgcgcgcctgcagcttactgcagtgacgccagccaccgcggtcaacggatctgctgattctagcgtctacgacatgcccagtacctcggccacggccatggctcagttggagactcaccaggttacccccacagcagcagccagctcagcgtctccgacgatgcctgcagagaaggtaaccattgaggatttgggagcggacgcagacgaggatgatataccatcgacggccacggaggcagttagcattcccaactccgatgccgactttgaggagaactcctcggagctgggcgaactaaggaagcgccgtttgaagttccttgaagagcggaacaagtctgcagccactaatgaacgcacgacagcggaatagacgccctacaatctgatgtcaacactccaaaacaaaaaaaaccggcagcgacaactctcatcccaaaaaaaaaaaaaatgtgcttgcgtttatcacacttaattctcttggctggtattgatttcctttatacttcgctcttcatctgctgcaccttgtccttgacttctgttattttttctacgatatgggaatattacgacgatgacgacaaagacgactacgatgcctccgacttcacacactggaacgaaggatctgaacgtgaaacgcgaaatgcggcatccaaatccaatatgtagcaatacgtattgtgtaaaaactattttagagatgggaaactgatgatttgtatttaatattactatatgtgtataattaatgtgaaatataattaaaacgaaaagaacgaagaatgaattaagcttgtgcgacgaaaacactaaatagacctgctcctaaatttgtttctcaacggcttttagagccgcaattatactcggaacaggtctgagtctgagctacatactaaatgtaaataaattaattgacgcgtacactacacatagataacaacagtcgatcgacgagttccccgggcgtgaaaaatttgcatctggacgtcgccgcatcaaattctcgactccagctcccggaactcggcaggatccgtgaaacgtacggtcaaaatatagaacagtgtggggaagggcaccaagcacataaaggcatagtggtaattcagggaggtgaggccgtaggccaacaacatccagtgcacagctgggaaagtaagctgctggtatactttatgtatggtgaatgcgcactttgcttacctatgatgaccacgttttttaactcccacaccgacgagtgaaccaatgcctttagggtttgatccagtttgagggaatagtggatggcattggctaccatggatatggccacgctaaggtacggaaaggagtaatctgaaaaagaaaagatctcaagacca

SEQ ID NO: 2825 - DNA, 2218 bp, DROSOPHILA
atctggtagcacgactaagttcatacgtgtaattatcggtagttaaaaataaaaatattaatacgccttgatagaggcaaccctcagtttcagagttgaaaatctcgatggcaatgcaaacaacttcgttcggctaacaaaacccgactaaattccaacgtcaacgagagcatagacgatattttcggtttcttcccaagtgataccgattccgagagctacggccttatatgtagagtgggggcaggcagagatcccggccaaaattaacatattcctggagactatcagccagctggcggccctggcgacctcgaccggcatcatgcagctgctcttatcgtccgtttgcatggcgctgaccagcgcggtgattggatttgcctactaccaaaagcagcagttctatcctgcggtggtctacatcaccaaatcgaacgcctccatgggggtcatatacatacaattctttgtaattgtcttcatgttcggcaagctgctaagcaagatcttcctgggcactctgcgtgccgcagagtttgagcatctgctggagcgcttttggtatgcccttacggagacctgcttggcctttaccgtattccgggatgacttcaatccgcgctttgtggccttgttcacggtgcttctatttctcaaatcattccattggctagcagaggagcgggtggactttatggagcgttcccccgtgctcggctggcttttccacattcgcgtgggcagtctgctcacagtgctaggcatcctagactacgttctgttgatccatgcctataactccactttggtgcgtggtcccaccgtgcagttggtctttggctttgaatacgccatccttctgaccgtaatagccagcacggccatcaagtatgtgcttcacgccgcggaaatgcgcacggacacgccctgggagaacaaggccgtgttcctgctatatacagagctggtcattggacttattaaggtggtcctgtacatactgtttgtggtgatcatggctaaaatatacgcgctgcccatgttcgtattcaggcctatgttctttaccatacgcaacttccgtaaggccctaaatgacgtgattatgtcccggcgtgccattcgcaacatgaataccctgtatcccgacgccacgcctgaggagctgcgccagtcagacaacatctgcatcatttgtcgcgaggacatggtcaatcactcaaagaaactgccctgcggccacatcttccataccacatgcctgcgctcgtggtttcagcgccagcagacctgtccaacctgccgtttgaacatccttcgaactccaaccgtgaactccacagcgatgccacggcaaggcgatgaggctgtggccgcagctgctggaaatcccattccggctgcagcaggtgttcaaccggctggtggtgtgcctcctccagctccaactgccgtagttgacggcaatcaggcaagagccgacgtcaatgtagccggaggtcaagccttgccgccaaactttgcggatctcttcggtgatgccagcggcttgcccaatggattgcctaacctggctggtttgcagatccctcctccgccagtaatgcccatgatttcgccttttatgataccaccccacttcggctacctcacgcctctgccgcctccgccgattccacaggacctgaccaattttaccgacgaagaactgcgggccatggagggccttcaacgtgatcatattgtgcagcgtctaaagatcactttacagttgctgcaaaacataaacctaatgctggattccgcggggataatgatgtcccagtaccaaagtttgtctgcgcgcctgcagcttactgcagtgacgccagccaccgcggtcaacggatctgctgattctagcgtctacgacatgcccagtacctcggccacggccatggctcagttggagactcaccaggttacccccacagcagcagccagctcagcgtctccgacgatgcctgcagagaaggtaaccattgaggatttgggagcggacgcagacgaggatgatataccatcgacggccacggaggcagttagcattcccaactccgatgccgactttgaggagaactcctcggagctgggcgaactaaggaagcgccgtttgaagttccttgaagagcggaacaagtctgcagccactaatgaacgcacgacagcggaatag

SEQ ID NO: 2826 - protein, 621 aa, DROSOPHILA
MALTSAVIGFAYYQKQQFYPAVVYITKSNASMGVIYIQFFVIVFMFGKLLSKIFLGTLRAAEFEHLLERFWYALTETCLAFTVFRDDFNPRFVALFTVLLFLKSFHWLAEERVDFMERSPVLGWLFHIRVGSLLTVLGILDYVLLIHAYNSTLVRGPTVQLVFGFEYAILLTVIASTAIKYVLHAAEMRTDTPWENKAVFLLYTELVIGLIKVVLYILFVVIMAKIYALPMFVFRPMFFTIRNFRKALNDVIMSRRAIRNMNTLYPDATPEELRQSDNICIICREDMVNHSKKLPCGHIFHTTCLRSWFQRQQTCPTCRLNILRTPTVNSTAMPRQGDEAVAAAAGNPIPAAAGVQPAGGVPPPAPTAVVDGNQARADVNVAGGQALPPNFADLFGDASGLPNGLPNLAGLQIPPPPVMPMISPFMIPPHFGYLTPLPPPPIPQDLTNFTDEELRAMEGLQRDHIVQRLKITLQLLQNINLMLDSAGIMMSQYQSLSARLQLTAVTPATAVNGSADSSVYDMPSTSATAMAQLETHQVTPTAAASSASPTMPAEKVTIEDLGADADEDDIPSTATEAVSIPNSDADFEENSSELGELRKRRLKFLEERNKSAATNERTTAE

SEQ ID NO: 2827 - DNA, 12177 bp, DROSOPHILA
ctcaattgaaggatttacctaacaaatccttgccttgatcatgtttacttaggataaataattcaatatactccgaaaaggtgggcagccaatgggaaatctggggcactctgccattgtgttccgcccctggaacgcctatctctttgattgaatctctgtcttcctcgacgctcgacatggctaaataaaaatgaatgaatagataagaacaatctgggtgctcggatatgtgtgttagagttcgatttatagttagtgaggggtgtcctaatatatatcactgccgaatatatgtagaaaaaggcttttacatttttctatagaagaattcatgttaccaaacaagacttcatttctctctcacaaaatcaatacaatatattttagaatggaattcgacagcaacaggcttaagtttcttagaaaagtatgtagtatatttttatatatttcattatgctatgctatttggtacatgggcataccacattgctcgtagaatagaagccatccgttggttttattcggatgagcttgtatcgcactgtcaatggaattattggaaagtttggcgagagacaagtggatggacttggctggggatagacttgttgtacactttatgcaaagtcaagagttgaggcaaccacttaaaggattcccaatgctttttggcacagctgaaatagattttggcccgttaaaagcccgcttctctcgaatttcgcacgattttgctgattgcttttgtttgcacttcacttttgcactgcccgctgccatttgtgctcggaaatacatttttgactgcactcttgaactttcctggagccattctatttaccacggcaaataaaagttttaattgcaaatttcagtttgacattatgcgttgttgtgccgtttttcggtctgcgacgtcttttagcaattaatgaaacttgtttacccggccaacaagtcactgcatttctgactgacttctcttcacttcatttccagggcgcccacggaccgcaaaaaggagcacatcaagcgaccgatgaacgccttcatggtttgggcccaggcagcccgcagggtcatgtccaaacagtatccgcatctgcagaactccgaactgagcaaatcgctgggcaagctgtggaagtaagtactttacttctattctatgctataccccactatactatactacaatatatatacatcactcggaatggaggaatacggagcagatgcgaaacagagacacgtatctggctgcgtaaacgctggggcatggaccacttgagaagtgtcttttataagccccacttctcggccagacaaagaagccatccgcagggagtgggaagtcgcccaagtttggttaagggctttccgtcgagacagggaattgcatctgaaggcggtttgtactgtcaaaaaggagaagtcagttacacagaggacatccaactgcagcccagcaaataaagtcagataaatatctaggaggccaagataaatatattaggttcacctgatggacacttgccaaggacagtgatgagctccaagctgaaatattacactgtattgcatttgaaaagcagggttttctttgtatatacataaaaaggactatccttaccttatattttcataaagcttacgtgcctgcaaggaaatcccgcatctattattatgctcaagaatgctctgaatcgcagtgacagttaattaaacaggatttatttatgggccaacaaattggtccagctccattcccaattagttggggcggatgcttcgacttcttatcagccgaagactccattgcttatcgcgagtcgccccaagcgctgaactgtgaaattttaatttcgaaccggacaatattttattacaaacaatatatgaaaacgacgccgctgtgtcgcagatcgacttttggcctaacagatttgcattaatcatgaaagaggcgatctgcggcagatagcttttaagaatagtggaatccagtggttcgcgacaagtgcaagtgttttgtaagcctggcgtatgtttatttataactatatataaattaattaaatataaggtgcaggtccctcgccgcggtctccggcgtaggttgcaggtaacggggggttcttctgtcactgggaggcagggcggttgccgcagacctcttctcctagattgggagatatggtgggagaacgtctctccgttgttgactgcccttaaggctagccaaccaattcaatgataacagcagtagctggagttgattgaaggcgcgatgcgctctttattgaatacaaaatcaaactgactataagctaacaaagggaaaaacatcatagcggcctctgccaatgcgcagagcttctgccggctatgcatgagcttccggccaaatgcttggtcagcagtttgaccggtgctggtgtgcggacgatcagtccggttaacttagttaactattccctcctcaagattaaggccgccctcggctgaccctatttgggcgagaacttccttcagttgggctgtagatttcttggccctagtggttcgctgccaggttaaaccgatgcagataagagcgcagaaaattgctcccgcaactaacgctatctgacttagtcggtatccgtcgacgtccttctcgaagttcctgatttgctccaagttcttttcacttaaacggtgaaggtatgggaggctcaggacctcgtgtttcatcgagatattaaggactggggaattagccactcccggcgccctattctggaccatgtcatgattaaagaagacgggctcgttgaccatggcactctcaatgaatgttatgaggtgcgtgcctctaatgtggatggccgttccattgtccacacgcacgagtgctggtctgtcattgatgacgattattccttcgtcgacgtaggtgatcggatgtagatcactctgctgtgcgtcgcaatgtgctacgaccccagcgtggagctcctgcgcacacgagctcactgaagataactggcaaaatgttgcccctggtgttatggagcaattctttactgtgcgtatttctctgttgcactctgctaccacattatctttcaaccttaacaccgtatcgtggtgtaccactggaaggatagtgactttgttgcacgccatgataatcttggggaatttaataataaagtgtaagatgttaagggattgtaggacttttacagacgcaacggacaaaatctcccttatgggggtgttggtgggctcctcgccccaaatactctccagatctgcgtggtccaagaagtttggactcactacgttaattttagcgagggttatagtgagcattaagttttgcaattccattacaatgattctgttgcgagtagaaagcgtttcatacaggtgacctgtatcaatctgagcgcttttggaaatttttaaaagtttatttatggtatcagtgagttcgttaattcgaacttgtgttttggtgtttatttcgatttggctattgtgtgcatcaacaagccgcgcttcagtgaacttgactttctcgaagtcttccgcgtcaggtgtccctgcgacaacctttaacgcagttcccaagaagtctaggctccttgccactctgtgatggatgctcaaagaatcaagcatgtcacggaggtgagcgatatcaacgctcaggagtttcttcatatgggactgggggaacatatcgagcatgctgtcggtttcgtcaattacccgcctatactcggagaggttagccgagtgtctgacataggcgaattcctcccagactaagactttaccgtcaatgacgggaaatgtaattcgctcgggaatagtcagtaatgtgggccgatgtcgtggccaggaaacaaagaagaagggttgggagcgacctgtaacgtgtgtgataaattattacttgttcggaatggagttgcccaccaccaataatagcgaaaatatataaaaaatatgccaagtggctaaaaaaataaaaaacttatgccaagtggctacaaattgaaagaataaaagtgtgcctccgagggagccgcggctaggctctgcttgggtcacttgaggttgtctttatggaccaccctccctttaataaggactgtggtccccaagtctgcctcgatgatcttctcctcacataaaggagtaagtttgttgcctaatcgtctgtttgactttactaggactttgtcgccgacctggaacactctgttctgccgagaagcgttctctcgttttcttgtcaaaatctgggcgtttttgattttttcttggacatcggtatgtggatcgtccggatctgcccgcatgacttcggccggttttttattgatgacggagtggatggacatgttatatctggctgtggccagcaagaccaattccactgtgtcacttatgcctttgtcgatttttaggcatctggcgagctcaattaacgtgctgtggaatcgttccacctgtccgtttgagacgctatgtaggggcggtgcattcgaaatgctgacgccaaaatggttttccagcatagccactattgtctgcgatttcaatgatggttcattgtcgcagtagatggttttggctttggggaaaacattcataagttgtaaaaggggtgctttcaaatcttctatggttctagacagaatcggctgtaccatggcgaatttagaaaacttgtcaacacaggtgagaaagtattttttatccgttgagaaaatatcgatgtgcaatatttctcctacgtgggtcgggactggtgtctcaccgagctcctgcttcttcggatgtctgtcatacttcgcctttgcgcaagttttgcaattggctgctatttcgctcgccaatttggtcattttcgggaagtagtactcggagagtacttgtttcacgttttcttgggccgacctgtgagctctgttgtgctcgacggtcaggatttcttttctctcctgcatcgcgaagatgtcggtgaccctattcttacaatgccagaatttcgtggctggaaactgtcgaactacggtcgtcctggattagcgccacgcggtgtgaagatcacagtggaaggcgtttacaccattagggataatgatgttggcgagttcctccagcaaagcttgtttgcacgagaaattgatcgagtgccgcctcttattcccaaataatataaaagtgcgtttccaatgggagcgcgcctcttccaaaattatctggttctggaagcaattcacgggtttgtccgtggactcgatccgtgtgcgtaagcgaaagttcgctgtgaatcgtggccgcgcacgactccggttcttgctcttcaacaacgttgagttgttgtctcgagagggcatctgcaacgaggttgtttttcccaggcttgtaaaaaattcgtgcgccggactcgtcgatgcgtgctttccatctcttaattttggcgttcggattggactccgataccgcgaacgtcagaggttggtgatcggtaaagatgtttatctctttaaccgcatacaggtagtgccgcaacttagccagtgcccagactacccccaacagctccctttcgttggtagcatagttaacctctctgtcagacaatgtccttgagatcattgtaatgggacgtccctcctgggacagcactgcgccaatgccgtaggccgaagcgtctgtcgttagatcaaacgcttttttgtaatcagggtatctcaggatgacgtcctcagacgccaggatattgcgtagcttttcgaaggcacgttgttgcgcttcggaaaattctacctggatactcctggacctgtgtcggctaacactaccgttctcgcccttcaatatgtctgaaatgggcctagctattgatgcgaagtctttgataaagcaacgataatagctggctaagcccaagaatgaccttacctcaaataccgtttttgggttccggaaattcctttatggccttaaccttttctgggtcagtggccgccccattgttggtgacgatgaaccccaggaagctcacgcttttcttaaaaaaacgtgacttttccgccgatattctcatgttagcatcgtacaggctcttcagaacccaatctacatgcttgacattgggtcgttttcatcttccgaaaagatgatgacgtcattcgacgtaaacgtagcagaactttccgatctgctctcgcagaatatcgtcaattgttctttggaagatgcttgcagcattcctgagtccgaatggcagccttcggaactcatacttccctccgtttactgcgaacgatgtcttttcacggtcgcgttctgcgagcgtgatttggtggtagccagacttcagatcgagggtcgtgaagtatttggccttgccgagattccccaatatcatagagatatttggcatggggtatctgtctggtaccgtcctttcgttaagttttcgaaagtccagcaccaagcgcatttttttattgcccagcatcgtcagtgccctttttgtctacgacccatattgggttattgtagggggactttgacttttggattatgccatttttaagcagttcctgaatttcgccgttgacgaagtcagctgctcccatgggatatgggtataacttggcataaatgggctcctcatcaaccgtccggatggtggctaccaccgacgtattgtaaggaagagcctcattaggatcagcaaaagcttttttcctattcccgagcatttttaaaaaagcatccttaattaagggcggtgcgtccgagcaatctactttggtgaaattgacatctgggcaagtatgaaagtcaatttgctctgctccggagccccatttgagcttgccggaagctaggcaaagtgacgcgccggcctgttttaacaggtctaggccaacgatcgcgtcaaaggaggtcaagtctggtaataaaaaaaaggtagctttaagattaaaaatggacacgaaacatttcttagttattgtagtcacaccatgaatcgaatggattgtaaatggggactgcaccgggcggacgcctttcaaccccttaaatggtcggataaaattttttgccgcgcccgtatcaatcagtagtttcatgtcgatccccgctactcttcgtctgatgacgggtagcagggactttcccctaaaaaattaatggtatccgagtcgtactctaggatggaatcgtcgtcgactttaactgctgcactggaggctgcggtgttataaaccttgtccaaatcatcagaggcctgggcaacatggttgaccctttgcctttttggtgggaccgaacggccagacgcggccggcttcgatttcgggtaagccggggcgtgagatggctgcatcctggacaacgacgggtcaacgtccatgggttctggcatgttttctcgggccattcggtcgctacgtggagcggagtgcacctgtgctctatgctgcttagtaaagtgcgggttcttcccagcacttccctgcgagccggcttgtgggggggcccgttggcgctcctgcactttgggatattgcttgtggtccctatcctcttggcttcgtgcaaatgaagttgcaaaagtgtaccgctcatgattggactctacttcttgcgccagggcgagcgctgacggcatgtccttaggctttgccgcgaatagcacgtctgtgaggttgcgcctgagccccgagacaaaaactctcaaagcatcatctcggaacttctcacacagcaccgttgctgccgacgcttcataagacatagtcgccttattggtgagtaaggtgagttttttctcgacctcatcataatactggaggagcgtcaggcttccctgtctgagggtgcctagctcctgctcgataacgtgtatcgggcgtttgtcactatacgtgaaatcgaggcgacttatgatcgcatcgaaattcagtatagtcccaaaggacgacagaactgcatcagcagggcctttaactttgctcctgatgatgaccacagcttgatagtgccgcgaactatcctcatatttcctgaacatatggtaagcggcatttgccgcttgccgccaggagacgtatgtctcctgtgtccccataaagtctggaagacatttaacggcatccaatgtttccccacaagggaccagtccggtgatttctactggtctgtaaaccttgattgggggagcttctgcccgggcaggggcaatctgtatggccgcgacctggccggccagatcttgaattgttttacgcaagtcagcctccctgcgttgactctctaaggcttgctcttgtaatgcccttatgagagctttaatttgttccgtttcgagggacattttatatgcagtgaatgcgttagttggggtgtttttacgtacagagttttctgtcgaatcgtcgctttcggactctgagtcggctagcgcactttttagaattcctatattgtcggaatgactcgctcatgggtagctatgtatgtgaatactcaggccgttgtgcccgtggggccaaacagtacggcaagggggtcgcgggggctgagtcgccgctttgaaggcattggacgaagactcaacgagcagagccactgtccaagctaagtaacgataaggtgaagggcctgcggggagcgggtctccaataaggcaaacaaatatacaaagacaaaaattgccacagcaaagacaaagagataaataaaaggcacaaaattgtcacagcaaatgcatgcgccagtatcgggtagcgaagtggagtgggtcaaaaacaacaaagcttgaaagggctgtgaagccaatgtagcgaattaaatttcgaatgaaacgacagtgtcccgcggatgtgcgaaggcggaatgaaatgcacacaatatggattgcaaagtcaaccacaaatcaaaattcgatatttaaacttcataccagtaacataatcttaattcgcaacacatataaacgtttattgtagtggaaatgccgattttcttaatttatttatgtaactcgcacaaacatcccaaatattttaaaattctagacgcagtttggagtagtgtttaagttgagaatcccacttacatgattcagggtagtggtgtgggttcctggagttgggtgccaattaattaaatataaggtgcaggtccctcgccgcggtctccggcgtaggttgcaggtaacggggggttcttctgtcactgggaggcagggcggttgccgcagacctcttctcctagattgggagatatggtgggagaacgtctctccgttgttgactgcccttaaggctagccaaccaattcaatgataacagcagtagctggagttgattgaaggcgcgatgcgctctttattgaatacaaaatcaaactgactataagctaacaaagggaaaaacatcatagcggcctctgccaatgcgcagagcttctgccggctatgcatgagcttccggccaaatgcttggtcagcagtttgaccggtgctggtgtgcggacgatcagtccggttaacttagttaacttatatactatttcaaaacagtttctagctttactgagtatcccccttataattttactcttgcagaaatctaaaggacagtgataagaagcccttcatggaattcgccgagaagcttcgaatgacccacaagcaggagcatccggactacaagtaccagccgcggcgcaagaaagcgcgggtgttgccgtcccagcaaagcggtgaagggggatccccgggtccagagatgacgttatccgccactatgggtagctccgggaagccaaggagcagcaattccaatggccagaggcgagcgggcaagggaaatgcagctgctgatctgggcagctgcgcctcgaccatctcccatgccaatgtgggctcgaactcctcggatgtcttcagtaatgaggccttcatgaaatccctgaacagtgcctgtgcggccagtttgatggagcagagcctcatcgaaactggcctggactctccgtgctccacggccagttcaatgtcctcgctgacgcccccagccacgccctacaatgtagccccatccaatgcaaaagcgtcggcagcaaataaccccagtcttttgctaaggcaactaagtgagccagttgcaaatgcaggcgatggttatggagttctcctcgaggcaggcagagaatatgtggccataggtgaggtcaattatcaggggcaatcggcgggagttcagagtggagccgaaggaggaggagcaggtcaggagatggacttcctggagaacatcaatgggtatggtggctacacgggcagtcgggtgagctaccctgcctactcctaccccgcaaacggaggccacttcgccaccgaggagcagcagcagcagcaggcgttacaggccagtgaagccttaaattacaagccagcagccgccgacatcgatcccaaggaaattgaccagtatttcatggatcaaatgctgcccatgacgcagcaccaccatccgcatcacacccacccgctgcaccacccactgcaccactcgccgcctttgaactcctccgcctcgctatcctcggcctgctccagtgccagctcgcagcagccggtagcggagtactacgagcacttgggctactccccggccgcctcctctgccagccagaatcccaacttcgggccccagcaaccgtatgccaacggggcggcctccatgacacccacactgggtgaccccgcaccgcaacaggagctgcagtcgcagcagcaggagcagcagcaccagaatccatcgcagcatcatctgtggggcacttacacttatgtcaatccctaagctacttcatttgcacatttgttgtcgggcacagagagaaagaaagcatcggtattcctaaacttatttggggattcaatcggagaaatacaatggcagagttataaacattcatctttcaaatgtcatttctaaatgttacatattagttttagttgatttgcgataactcaattccttttatctaaattggttgtacccttcggaaaattatttagaatatttataccccacgttgttataaattaatttaaaataaaaagagtggctcataaaactgagcaattctgcattgcacccaagacaatcaccaatttctctccgtgcacctgtcccctccacttccgtttccacccgcccctctttatgggtcacttagatggctttcgtttattggtttattgtctgtgcaatgtccgtgtgagcgggtgactgtgcatgtgtgtgtattgctggctcgagggtctttttggagattccctgcaatttaagctaatcgctgcgattttcgtttatggctgcattattccattccccatcaatatgcaatttcagtaagaatcgaagaaagagccatggctaaactatctaaatggaaattgccgggtagtggcaagaatatcgagatcatagctaattgaaagcaatataaactagtagtaataaattctaaatgtaagaacatattgtttagaattggcaagatagtatacgaaaatgtatggtaaatattaagaaaatataaaaacacattatttaaaggaataaatagacaaggacttacacatttaaatgttttgcaactttaaagcgaaactatttaaagcgaatgaggctaccaactcaaattaaaagacgttgagtttaaaggtgaaagcatggacttgttggtcaattgaaatcaagaccggtatcccaggattccctcgaaacactggccaattccaaatggcccgaggttggtacaaattcactcagttgggcgtgccttctgacagtttcccacactctgcagatcatatttgggctttagtgtctacacctggactgtatggcacctgtaaccgttgtaaaaccaaaaaaaaattccagtgaaattaacacccgcctaccaaacgggtttttcacttcgtttttgccatgcaaaacaatttgagacaaaatgaaaatcacactcagcttcgaatgggcaacgcatattttttatttgccgactcttttgaattttttatttagcacggcatttattttatttatttaaatttggaagctt

SEQ ID NO: 2828 - DNA, 1668 bp, DROSOPHILA
tccagggcgcccacggaccgcaaaaaggagcacatcaagcgaccgatgaacgccttcatggtttgggcccaggcagcccgcagggtcatgtccaaacagtatccgcatctgcagaactccgaactgagcaaatcgctgggcaagctgtggaaaaatctaaaggacagtgataagaagcccttcatggaattcgccgagaagcttcgaatgacccacaagcaggagcatccggactacaagtaccagccgcggcgcaagaaagcgcgggtgttgccgtcccagcaaagcggtgaagggggatccccgggtccagagatgacgttatccgccactatgggtagctccgggaagccaaggagcagcaattccaatggccagaggcgagcgggcaagggaaatgcagctgctgatctgggcagctgcgcctcgaccatctcccatgccaatgtgggctcgaactcctcggatgtcttcagtaatgaggccttcatgaaatccctgaacagtgcctgtgcggccagtttgatggagcagagcctcatcgaaactggcctggactctccgtgctccacggccagttcaatgtcctcgctgacgcccccagccacgccctacaatgtagccccatccaatgcaaaagcgtcggcagcaaataaccccagtcttttgctaaggcaactaagtgagccagttgcaaatgcaggcgatggttatggagttctcctcgaggcaggcagagaatatgtggccataggtgaggtcaattatcaggggcaatcggcgggagttcagagtggagccgaaggaggaggagcaggtcaggagatggacttcctggagaacatcaatgggtatggtggctacacgggcagtcgggtgagctaccctgcctactcctaccccgcaaacggaggccacttcgccaccgaggagcagcagcagcagcaggcgttacaggccagtgaagccttaaattacaagccagcagccgccgacatcgatcccaaggaaattgaccagtatttcatggatcaaatgctgcccatgacgcagcaccaccatccgcatcacacccacccgctgcaccacccactgcaccactcgccgcctttgaactcctccgcctcgctatcctcggcctgctccagtgccagctcgcagcagccggtagcggagtactacgagcacttgggctactccccggccgcctcctctgccagccagaatcccaacttcgggccccagcaaccgtatgccaacggggcggcctccatgacacccacactgggtgaccccgcaccgcaacaggagctgcagtcgcagcagcaggagcagcagcaccagaatccatcgcagcatcatctgtggggcacttacacttatgtcaatccctaagctacttcatttgcacatttgttgtcgggcacagagagaaagaaagcatcggtattcctaaacttatttggggattcaatcggagaaatacaatggcagagttataaacattcatctttcaaatgtcatttctaaatgttacatattagttttagttgatttgcgataactcaattccttttatctaaattggttgtacccttcggaaaattatttagaatatttataccccacgttgttataaattaatttaaaataaaaagagtggctcat

SEQ ID NO: 2829 - protein, 449 aa, DROSOPHILA
MNAFMVWAQAARRVMSKQYPHLQNSELSKSLGKLWKNLKDSDKKPFMEFAEKLRMTHKQEHPDYKYQPRRKKARVLPSQQSGEGGSPGPEMTLSATMGSSGKPRSSNSNGQRRAGKGNAAADLGSCASTISHANVGSNSSDVFSNEAFMKSLNSACAASLMEQSLIETGLDSPCSTASSMSSLTPPATPYNVAPSNAKASAANNPSLLLRQLSEPVANAGDGYGVLLEAGREYVAIGEVNYQGQSAGVQSGAEGGGAGQEMDFLENINGYGGYTGSRVSYPAYSYPANGGHFATEEQQQQQALQASEALNYKPAAADIDPKEIDQYFMDQMLPMTQHHHPHHTHPLHHPLHHSPPLNSSASLSSACSSASSQQPVAEYYEHLGYSPAASSASQNPNFGPQQPYANGAASMTPTLGDPAPQQELQSQQQEQQHQNPSQHHLWGTYTYVNP

SEQ ID NO: 2830 - DNA, 3711 bp, DROSOPHILA
aaaatagccggagcaggtttctccgtccagtctgcgtctgcatctcgacactgcatttaagtcggtctggggaacgggtttccatcgaagaccaaagatccaatgagctcaagattcaccatccagtcagcagaacggccgatagggccaaatgcgtttcttgtaggagcgtttagccaaacaagaaaaccagtaaaatctgctgatcaaatgtcgctgcctggaatcgagtcaacaaggaatgagagtgaaaaagtggaaaacctgcggaaaagggggagttgcatgcaccaatcgatgatcagggaagactgcaacagagactaatcgctgcacagttggtcaatgtgagaaattttgtaacctttaaaaacatttagcaattatcacagcaatagattttttcacggatgtttagcttatcccaagattatctcagttcagtaaaatttaatagtaatcacagtttttaatcctaagacaacaagatagataactacagtcctaaacaaacaaggaaagtattcaaaatcttgaaatcaaaatcttgaaaatcaaaaaagtattcaaatgaaaaaaccctattttcttttttcccaaaattagtttttatttttttattttcttatttatactcctataaacttatttctgctatatgccctgagtaaaacaaacactgatggccgataaaacaaacatgattgatgatggtcccagcccttttcgctgtcccaacgtcttggccaattacaagtgcagcttcgtggccaaaaaggcttctgattctcgattcctgtgtgcaatgcaagaccaacttggtccagttcaatgacactcagtgtgcaagaattggccaaagacgatggcactgatactaccacttttccccaacctcttgctcataccttagccctgtgtgcttgtttgtctgccaacaaagtcgacggcggctgcgcagccggtggtttgtataaaatgcgatgggcctaaagaaatttcaaacagttgcggccgtgaggcgctagtgaacacatcttgaaatcgaaggagatataggagataagtcgcgataatgaagcccgttgccttgatcctggttttcctggccattagccaagccagagtactcaacttgcccaaggaggcgatcgatattcctgtggccattgtcgaggataaggagccaccagtagctttgtctttggtcaaagaggaagttaaggcagaggaagttaagccagaggaagtgaaaccaattgctcaagaagagaaagccaaggatctcaaggaggaagttaagccagaaattaagcctgaaatcaaagagcagcctaagcctgatataaaagacgagattaaggaagatttaaaggcagacattaaggaggagctcaaggagaagattgaagagcagatcaacgagttgcctaatgctaagcccctggagctgaaggaaaaatccctggaagctgaggagaaacctcaggaaatcaaagaagaagttcagcagccagaaatcaaaaaagaggccactgaaatcaaagaggaacctgctcagaacattctgaaatctctgccagctgaagagactgtcgttgtgcctgccgaggaactttccccgaatccggtggagcaagagcagtcggaaaaccaggacgccgcgcatcctcaggtccgtcaagccacccaagccacgcccacccagcagagcaccacccagggcaactttgtccagcagttgatccagaactcgccaattggtcagttcctcaatcagttccagccccagccagctgctgctgccgctccagcagcagcacaagtccaggcggatgatgccgccgctgcggcacctgcaactccggctcccacggtgcccggtttcctgaatccccaggccgccatcacctccgcccaacaggccgtgcaaaatgcggcccaaagtgccgtcaatgccaccacccaggccttccagggcatccaacagtttgccagcaacctgggcaatcagttccagaacaccctgtccagcttgactggccagcagcagcaggcggtgtccaccactccgcgtccaccaggtcccatccagcagtttgtcaacaatgttttcggtggcaataacaatgccacggctgccgcaccgcctgcccagcaaagtggcaatcctctgcagggaattatcaacttcctgggcggcaatcgtccacagaacgcaccagctgccgcaccagccactcaggccacagagaagccagccgtagatgacaaaatcgatcctgccaatgatgaggtgggtgaattcgttccggaatccgataatgagctgcgtgcgagtggcgaaaatattgatgattccttcgaggatgctggcgtaccgtccaacgaggttattgtggtcaacgacgatgccggcgaggagggaaatgctgtccagaatcatccagtggccaccgatgcagtggctctctaatgggttgagatgccattattgccattagctaaccccacaaaccaaccgactgacgcccgttttcgtcgacatttttcgattcaaattgagaacgaaaagggaaaatgcttctttagttttctaagtgcatgcaccgcaacaaattatttatttcatactcagcccaggaatttgaatataaacaaatgagagaacacaaatcattaaataaaacaaataacttataatatttaaagagtttttcaaaagggttaaacaggcgtcctcccgtcaatgaaaaaccaagtcgaagtttattcaaaaattatctcatatttatttgaattatttccatttgttttcttgatttattatttcaatgttgtctctttttttttggttttgcttttggtttttgtttcacattaaggtggttcaatagctcaagaatgcttacatcaaccaagacgcgcagtaaatgtacacattcatataaggctaattatctgaaatgtttcgaacctaggcgatagaacaaaggctttcaatttaaactagaggtcgcagctggagttgaacttatgcccaaatatttaagctagtttcttttttaatatacttcgattttttttgctgaaattccatttcaattttttttcgatttgctttatgtattagttaatctttagctaaggtttcgggcttcatttaattgggctgccttacgtaaagtttttggggtttttttctttgggatttcttgagctgaagaatgattctacttaaagttacttttgggtagtaggtaggggggggggcagtgagtgggacttggggcagtgttctattgtttttatgagattttgatatatactttataatgctggaaaactggatcgttgagcagtgagttacaggtgagggagcaagagaaagttggtgattatcggaaattttttagtttcttatccaagttaagtctttttcgagattggtacatgaacttaataagagattcgttttttttttttgatttttcaatagtatcgtaggttaaagtgcataacaggcagagaatctatagagctggatccctcgattcgtagtaagcaatattagtggggactttgcgcttcccatacgagttgaatttatgctaattatacgtttacataagtacgccaaacataacagtgtcttaaagcatttccatttcagcatttcgctcagtgtatacatggtaaagtaatcgagat

SEQ ID NO: 2831 - DNA, 1711 bp, DROSOPHILA
tcaaacagttgcggccgtgaggcgctagtgaacacatcttgaaatcgaaggagatataggagataagtcgcgataatgaagcccgttgccttgatcctggttttcctggccattagccaagccagagtactcaacttgcccaaggaggcgatcgatattcctgtggccattgtcgaggataaggagccaccagtagctttgtctttggtcaaagaggaagttaaggcagaggaagttaagccagaggaagtgaaaccaattgctcaagaagagaaagccaaggatctcaaggaggaagttaagccagaaattaagcctgaaatcaaagagcagcctaagcctgatataaaagacgagattaaggaagatttaaaggcagacattaaggaggagctcaaggagaagattgaagagcagatcaacgagttgcctaatgctaagcccctggagctgaaggaaaaatccctggaagctgaggagaaacctcaggaaatcaaagaagaagttcagcagccagaaatcaaaaaagaggccactgaaatcaaagaggaacctgctcagaacattctgaaatctctgccagctgaagagactgtcgttgtgcctgccgaggaactttccccgaatccggtggagcaagagcagtcggaaaaccaggacgccgcgcatcctcaggtccgtcaagccacccaagccacgcccacccagcagagcaccacccagggcaactttgtccagcagttgatccagaactcgccaattggtcagttcctcaatcagttccagccccagccagctgctgctgccgctccagcagcagcacaagtccaggcggatgatgccgccgctgcggcacctgcaactccggctcccacggtgcccggtttcctgaatccccaggccgccatcacctccgcccaacaggccgtgcaaaatgcggcccaaagtgccgtcaatgccaccacccaggccttccagggcatccaacagtttgccagcaacctgggcaatcagttccagaacaccctgtccagcttgactggccagcagcagcaggcggtgtccaccactccgcgtccaccaggtcccatccagcagtttgtcaacaatgttttcggtggcaataacaatgccacggctgccgcaccgcctgcccagcaaagtggcaatcctctgcagggaattatcaacttcctgggcggcaatcgtccacagaacgcaccagctgccgcaccagccactcaggccacagagaagccagccgtagatgacaaaatcgatcctgccaatgatgaggtgggtgaattcgttccggaatccgataatgagctgcgtgcgagtggcgaaaatattgatgattccttcgaggatgctggcgtaccgtccaacgaggttattgtggtcaacgacgatgccggcgaggagggaaatgctgtccagaatcatccagtggccaccgatgcagtggctctctaatgggttgagatgccattattgccattagctaaccccacaaaccaaccgactgacgcccgttttcgtcgacatttttcgattcaaattgagaacgaaaagggaaaatgcttctttagttttctaagtgcatgcaccgcaacaaattatttatttcatactcagcccaggaatttgaatataaacaaatgagagaacacaaatcattaaataaaacaaataacttataatatttaaa

SEQ ID NO: 2832 - protein, 466 aa, DROSOPHILA
MKPVALILVFLAISQARVLNLPKEAIDIPVAIVEDKEPPVALSLVKEEVKAEEVKPEEVKPIAQEEKAKDLKEEVKPEIKPEIKEQPKPDIKDEIKEDLKADIKEELKEKIEEQINELPNAKPLELKEKSLEAEEKPQEIKEEVQQPEIKKEATEIKEEPAQNILKSLPAEETVVVPAEELSPNPVEQEQSENQDAAHPQVRQATQATPTQQSTTQGNFVQQLIQNSPIGQFLNQFQPQPAAAAAPAAAQVQADDAAAAAPATPAPTVPGFLNPQAAITSAQQAVQNAAQSAVNATTQAFQGIQQFASNLGNQFQNTLSSLTGQQQQAVSTTPRPPGPIQQFVNNVFGGNNNATAAAPPAQQSGNPLQGIINFLGGNRPQNAPAAAPATQATEKPAVDDKIDPANDEVGEFVPESDNELRASGENIDDSFEDAGVPSNEVIVVNDDAGEEGNAVQNHPVATDAVAL

SEQ ID NO: 2833 - DNA, 5024 bp, DROSOPHILA
cgctacgaggcggtgcgccactgccgctacgtggatgaggtaagtgtgttaaactgaaccaatgaaatgtttctatacacttttcgatccatcacaagatcgttccgaatgctccgtggacgctaaatgaggagtttatcgaggagcacaaaatcgactttgtggcccacgatgacataccctatggagctggcggagtcaacgacatatatgctccactcaaagcgaagggaatgtttgtggccacggaacgcactgagggcgtgtccacgtcggacattgtggcccgaatcgtgaaggactacgatgtatatgtgcgcaggaacctggccagaggctactcagccaaggagctcaacgtctcctttctctccgagaagaaattccgtctgcagaacaagatggacgagctgaagacacgaggcaagcgggagctgaccaaagtcaaggttgacatcatcaccaagtgggaggagaagtcgcgcgagttcatcgatgccttcctgctcctgttcggccgggagcggcttaacaccttctggaacgagtccaagggccgaatcattcaggcactcagcccaccaggcagtccgaatggctccgtaaacggtgacgatccagacgcaacagacgacttagactctgaggatgagtacatggagctgccaccagactacgggtctggtagttgcgtatcccttagtcgaaaacaaaagcgccctgataaggtgaatgcctcagcaaacctcaattactcggagcaaccagagcataaggatgtcgtagacgagcgacgcagcgactaaagacgaatttggcctcttcctatcaattaaaacataaataaatatgtttgaagtttaatggaacagcgcagtaggcacttttatacatatttaaaagagctaccagaaaaagtatgcgcttaaaatacattccgataaatttcagttaaattatgaatatttcttttggcaagaaagtaaaaaggcgtttatttgatattttacttgctgcctttattggttatcttatgtgtattgtgaatataagttgggttaaattatagattagctgaatgattttccaaatcctcttcaatgatagaacaatcgcatttgttatttaaaataacgttgaaatattcgcataaaaacaaaaatacaataaatcttgtaacttcataagcgatcatcatctagctcttcatggagctctgttcatgcccgtggcgaacaggggaaccatcttcttgcccttggccttcttttgcttcttcgattccgctggagctgctccattggattttgctgctcctaccttttgctttttctggtccaaggctccaactaaaagttctcccagaccccagtggcccacagatcgctgctcaaagtcctcatcgctggttcttgggaccattacagcccgtggcggcggtggagctgaacggccccaggcgcccacttgaacatccaatggcgcgccaccacctccaggagaattacttccaatagtgggccacatctcctgcttgggacttcccagagtgacactggagtatcgggaaccggggtcctggttgctgatgttcatgggcacagagccactgggagcgggcaaagcctcctcgaagccgcactttagataaaatatcacatattaataattgacactaatggcaggcattgctagctcacagtgggaaactcatgggaggagcttaggtcaaggttagctgcactggcaataagtttgcccatctggcggtcatttatctcgttgatgtgctgctctcgcttgcgctcctcgcgatcccgacgctgtcgttccttcttacgatgaagaatgtcctctgcggaaggaatacatataagcataatgctgtacatggacctagtggacttacccttaaagagcttgagtattcctccagtgaccactggcggctgcaattcgacttccacaaccgaaaactgacaagtcaaaggcaagtggccaagacaagtgaacttgcgtcgatgctcctcatccatagagtgctgttccatctgcacgatttgggcttcgatgagtagcggacccaagtccaaggtgccgtagcaagcctgaagcatcttcacgttcaagggatgcaagtaaatattctgtccgtcgtttgactggtagaaataatagtatttattatggttgctcgagtagctaaggctgctggatgcttctcccgacgagatggaggcatcgtctgacttctcaatatcaatcttggtctcggtttctaggcaaagtacaggtgctgtctcctcttcatcctctttcggatcaggtttctcgacacccaacttctcaacacgctcctgaagcatcaccagcgcttgctggatgaacacatcctcgggacaggagacatccgattcggctagcagttcgttacgctccctctcgatgatggcggccacatccatccgcttggctattagaaactttgagtagcgtttagcctcttcaccagcggacacaaaggggaaacgttcaattgtttcgcccaatcctgcaacatgattttcaatgtacatggagcccttgcgacgccgcatcaactggaaggtaatcttctcgcccacttgcaaatccctcagctgttcgatggtgcagctcttcagatctcccgcgtggatggcgtcatagcagataggacacttgcgccaggtcttgtcgctcagcgagaggtagtgcagcaagcagggccaacagtaggcgtgtccgcatctggtgagcttggcagccacaggcgggtacaggcagatggggcactgcaactcctcagtggtctgtatgttgatctgctcgatgtagctccaatcgatgagtgcatccggcgagccattaacctgagcctttgcacccgatctaatgacgaactgaaagttggcctgcaggaactgctccttgttgtagcgctgctttcggccactcaggccgtggtgctgttgggcctgatggtgatgtcctcgctccagttccctgggcacgcagtggaagttaagcagatggttcagattctgcttcttgctgccctgtgtatacacagagttcagttcatggtcaaagtcaccgctacgtgagtagccggtggcggagtaggctagtcgggagctgcctgaagccccgtcctggccacggggtgaagggaaatcgtaaccgcctccaaacccgcgagccttcggacgcttgtccacattgggacgtagctttgctggctgctgtggctgttgttgctgatcgttgcgcggtgtgggaacctgattccttcgacggctgtgtcgctgcttgttgctgttggtatgtaactctgcggaggagaaggttgcaccaatattaaaaccttttcgggatataaaaatatcaggagaatggagcacccaccactggacttcctttgcgattcagcagacgaggacttgccatgatgagaggattgaggctgcttcttgctgttgctgctgttgttgctgtccatcgttgtggatactggaggtgcacttgtcttggggaatagtaatagtatgggtgctggacagctgccagtgggcggctaattgcgtcttgcctaggtctccacacggagtgcgctgagcaaagtattctcgttgcggattcatgtttactgagccatgattatccaacgggtacgactagaaatagtacttgcgtaatatttccaaaaaatcaaatgcggcttttgcgagtaagtgcagttaaattcgaggcgaaagtacttttttaagtacttggacttgcggctcgattcttcttctctttttctagcacttgttttgttgttctattagtctgtgggtcgtagtattagtagctgtaatcgtattggtgcctaaaaaggtgtgacgtctgcgctagctgctctttgcgggtccaaaaccgaatctttccgacaattaccacttgccaattgcacacacactgccgacacacggtctctgctatcgcggggtttcgatttgacgtctcgaaatcaacaaattttgatggaaaaaccaaatatcctttggtcagggaaaaaaagcatccgtgatgcccgatagaaaatggctgactgtaagtgctggaaagtgcctcgcagagagctgatggtgtgctttggtatggtcgtgattcgtcagagaaaactatcgcacaaggtaattatatataattataatgtcacattggatatttaaataatattaaaggaaatactttttttaatttaatacttcgtataatacgtttgaagtgagcggagctgtgttgtgtaaaatgtgctgttgcaagttgcgttaccgatgttcctagaaagtgtcatctcaattaggcaaaagtataacagctgattttgttatctgagccgcactttgatcggcctttgaataagatatgttagaatcaacattgcagtaacccccaacgacatggactttcggaacgcccgcgcccggcagccggagatcgtgagatccgtgcagaaggatgcacggtacaccaacgagctggccgaagacttgtccgatgtcttgcgcctcaccggtccacggaactggataaagtacaaccagatgtgccgacttctggcggagctcagttaccacggattcgcctcggccaataaccttcagaccctcggcgaagagtacacggggataatacaggtggacgggaactataagcagattcccagcagattggtaagtaaagaatactcgaaaagaaaacatttgtaaacgtcgcgcatcttttagttacaactgattgccattgtcctggagtttggtggcgactccctgttccaacgattgatgcaaaaacttgacacctacgtggccaacaatgacgagattcgaaccgagatcaagccgcagctaaagaagattattcagaggctcaggcaatctcccagctacgtaaaggccctgcacaagtctctattctacttggacgccagcaagtaccagctgtccaagcgcacc

SEQ ID NO: 2834 - DNA, 2729 bp, DROSOPHILA
gtcaaatcgaaaccccgcgatagcagagaccgtgtgtcggcagtgtgtgtgcaattggcaagtgactaatagaacaacaaaacaagtgctagaaaaagagaagaagaatcgagccgcaagtccaagtacttaaaaaagtactttcgcctcgaatttaactgcacttactcgcaaaagccgcatttgattttttggaaatattacgcaagtactatttctagtcgtacccgttggataatcatggctcagtaaacatgaatccgcaacgagaatactttgctcagcgcactccgtgtggagacctaggcaagacgcaattagccgcccactggcagctgtccagcacccatactattactattccccaagacaagtgcacctccagtatccacaacgatggacagcaacaacagcagcaacagcaagaagcagcctcaatcctctcatcatggcaagtcctcgtctgctgaatcgcaaaggaagtccagtgagttacataccaacagcaacaagcagcgacacagccgtcgaaggaatcaggttcccacaccgcgcaacgatcagcaacaacagccacagcagccagcaaagctacgtcccaatgtggacaagcgtccgaaggctcgcgggtttggaggcggttacgatttcccttcaccccgtggccaggacggggcttcaggcagctcccgactagcctactccgccaccggctactcacgtagcggtgactttgaccatgaactgaactctgtgtatacacagggcagcaagaagcagaatctgaaccatctgcttaacttccactgcgtgcccagggaactggagcgaggacatcaccatcaggcccaacagcaccacggcctgagtggccgaaagcagcgctacaacaaggagcagttcctgcaggccaactttcagttcgtcattagatcgggtgcaaaggctcaggttaatggctcgccggatgcactcatcgattggagctacatcgagcagatcaacatacagaccactgaggagttgcagtgccccatctgcctgtacccgcctgtggctgccaagctcaccagatgcggacacgcctactgttggccctgcttgctgcactacctctcgctgagcgacaagacctggcgcaagtgtcctatctgctatgacgccatccacgcgggagatctgaagagctgcaccatcgaacagctgagggatttgcaagtgggcgagaagattaccttccagttgatgcggcgtcgcaagggctccatgtacattgaaaatcatgttgcaggattgggcgaaacaattgaacgtttcccctttgtgtccgctggtgaagaggctaaacgctactcaaagtttctaatagccaagcggatggatgtggccgccatcatcgagagggagcgtaacgaactgctagccgaatcggatgtctcctgtcccgaggatgtgttcatccagcaagcgctggtgatgcttcaggagcgtgttgagaagttgggtgtcgagaaacctgatccgaaagaggatgaagaggagacagcacctgtactttgcctagaaaccgagaccaagattgatattgagaagtcagacgatgcctccatctcgtcgggagaagcatccagcagccttagctactcgagcaaccataataaatactattatttctaccagtcaaacgacggacagaatatttacttgcatcccttgaacgtgaagatgcttcaggcttgctacggcaccttggacttgggtccgctactcatcgaagcccaaatcgtgcagatggaacagcactctatggatgaggagcatcgacgcaagttcacttgtcttggccacttgcctttgacttgtcagttttcggttgtggaagtcgaattgcagccgccagtggtcactggaggaatactcaagctctttaaggaggacattcttcatcgtaagaaggaacgacagcgtcgggatcgcgaggagcgcaagcgagagcagcacatcaacgagataaatgaccgccagatgggcaaacttattgccagtgcagctaaccttgacctaagctcctcccatgagtttcccacttgcggcttcgaggaggctttgcccgctcccagtggctctgtgcccatgaacatcagcaaccaggaccccggttcccgatactccagtgtcactctgggaagtcccaagcaggagatgtggcccactattggaagtaattctcctggaggtggtggcgcgccattggatgttcaagtgggcgcctggggccgttcagctccaccgccgccacgggctgtaatggtcccaagaaccagcgatgaggactttgagcagcgatctgtgggccactggggtctgggagaacttttagttggagccttggaccagaaaaagcaaaaggtaggagcagcaaaatccaatggagcagctccagcggaatcgaagaagcaaaagaaggccaagggcaagaagatggttcccctgttcgccacgggcatgaacagagctccatgaagagctagatgatgatcgcttatgaagttacaagatttattgtatttttgtttttatgcgaatatttcaacgttattttaaataacaaatgcgattgttctatcattgaagaggatttggaaaatcattcagctaatctataatttaacccaacttatattcacaatacacataagataaccaataaaggcagcaagtaaaatatc

SEQ ID NO: 2835 - protein, 708 aa, DROSOPHILA
MDSNNSSNSKKQPQSSHHGKSSSAESQRKSSELHTNSNKQRHSRRRNQVPTPRNDQQQQPQQPAKLRPNVDKRPKARGFGGGYDFPSPRGQDGASGSSRLAYSATGYSRSGDFDHELNSVYTQGSKKQNLNHLLNFHCVPRELERGHHHQAQQHHGLSGRKQRYNKEQFLQANFQFVIRSGAKAQVNGSPDALIDWSYIEQINIQTTEELQCPICLYPPVAAKLTRCGHAYCWPCLLHYLSLSDKTWRKCPICYDAIHAGDLKSCTIEQLRDLQVGEKITFQLMRRRKGSMYIENHVAGLGETIERFPFVSAGEEAKRYSKFLIAKRMDVAAIIERERNELLAESDVSCPEDVFIQQALVMLQERVEKLGVEKPDPKEDEEETAPVLCLETETKIDIEKSDDASISSGEASSSLSYSSNHNKYYYFYQSNDGQNIYLHPLNVKMLQACYGTLDLGPLLIEAQIVQMEQHSMDEEHRRKFTCLGHLPLTCQFSVVEVELQPPVVTGGILKLFKEDILHRKKERQRRDREERKREQHINEINDRQMGKLIASAANLDLSSSHEFPTCGFEEALPAPSGSVPMNISNQDPGSRYSSVTLGSPKQEMWPTIGSNSPGGGGAPLDVQVGAWGRSAPPPPRAVMVPRTSDEDFEQRSVGHWGLGELLVGALDQKKQKVGAAKSNGAAPAESKKQKKAKGKKMVPLFATGMNRAP

SEQ ID NO: 2836 - DNA, 3038 bp, DROSOPHILA
tttgtctgaacagcatgggcttttgcaatacaaatctgctcaaatacatatttgagtcacagccactgagtaagcacatgctgccggatagagtccatgttatctttttgcattcgctcccttgcagctcaatatatgtgcatatatgtaaagaactggctggagcgctgcaagctaactgaacaaatatcgacgtacagcattacactgatggtgatttacttcctgcagctccaggccctgctgccccccattgccatgctgcagatagaggatgcagccaatcaggccgtgctcgtgggtcgtaagtacatcgtcggtttcttggggggattcaccaagtaagtcgtctctttacagcgtgggttgtcaactttgcacaaaaatcgtttagcgaactgggactgcagcaattaaaggcgaccgtccccgtcatcaagggcttccttcgaaacttctttgcgtatttcgccaaatttgactacgagcatttcttggtctgcccatatataggtcaggctaatgttgaaatcgcgaagattgagaggatgctgcatgctaggtgagaatattaattgcttaactttaagccctttaaatatgtaatgctatatagaaattacaaaaaaaaaaaaaaaaaaaaaaaaaactttccctgctactaggtattcagcatatgtgtcggacaaccctgaatgctcgatccagctgaaaaaaccgatggtggtacaggatcccatacaactaaaccacaatgtaacgaaagcggtgaccaaatatggactgcagacgttcgttgactactgccagcagacggcggagctgcttgaggaaccttccaccaattggcgtcagcgctatgcattttaaagaaatccccctcgattatctgtccctgcatccaatctcaaggcacttccgtttatggtctgttaggcttctaccttgtgagcgcgacaccaatgtaggtttgttcagactgttaattaaaggcgattgtcacgtttcggcaatatatttcactaacaagcttttaaattgtataattggtttggtatcatttgcattaacacataaagtgacctcgtatggcacgcacagacacggactacatctgccaggactcgggcagccggttgaacaccttcagcagcatatatattgtgaagcccacgattaggaacagccccaggaagctgatgcggttcagccagtgctgcttggagtcgcgcatcaggttgtaaatgctcatggccgagctctccgcctcctccacgctcccgttattgtcaatgacgaagtgagacttctcgcacttcttgtccagcggcatttgtgaatcgacgcgatgccgggcttccgattccgagagctcattgcgggctattaatcgctccagctgcttgtccgagtcgctgcaatatggggggatgcagttaaagccagctacactttgacacctagcattcaagagctattaacctaccaggttacacagacgatcttgtgtataaagtccatcagcacgccggtctcaaagagcagtggcaggtcgaggacgatccacgcgtgccccgtgaccagcagcttgcacacttgccaaaagatcttgcgatggatggtcggatgggtgatcttgttcagctttccgcgcagctccttgtcctcgaagatcatcttacccagaacagcgcggttgatctccttgctgggcaggaggacctcatctccgaagacttcccgaatctgccgccagcacggctgacctggttccacaactaggcgaaatgagtacagacaattagcggaaatagtcgttaattacgaagcacaaagcggatgtgctccactttttgaactcactctccctggcgattttgtcggcgtcgatgactggaataccctggcgttcgaacactttgctgatggtactttttcccgtggcgataccgccagttacagccacaataaacattattcaacggcagttaaaatactataattcgatggtaggaatgttttttatcgttttgttcgttttacttttcaagtactaatggtacagtgtgaccaagggtcacgtttgcgtttaaataattatttttaaaatactgaaactcgcgggcactgtgggccacttctgcgtaactgttcctaaaaaacaaaataaaacggttatggttgtatttataataaaagcacaagagaatgctatagtcgagttcacagataccagttagtgtaaatgcgaacacgaaatttcaacatttttctgggagggatctaatatctaggggaataaaatgagcaaaaatttttcaattgcgtctttagggcgttagagcggcgtggtaaaaagtttttcggcaaatcgatagaaatttacaaggctaatagaattttgaaaaaattcgaagaattgttcaaaagtttgagcgtggcgttttttacggcttgagaacgtaagagtgggcgtggcaacatggtctatgtctctagaggctgtatgctgaatctgaaccttctcgcttttatagttcctgagatctccacggacatggctagatcgactcgtctattgttcctaatcaagaatatatatactttatatagtcggaagcacttccttctagttgttagatacttttcaacgaatctagtataccctcttactctacaagtaacgggtataactaggctgtatcccaatcaagaaatttgtatttccatttgagattttcggattagattaagattaagttgtttataagctaaatgttgaaaattttcttcaaaattaaaatttaattttttttttttaatttgaaatgctaccagctcatctaaagaagcctcacaactcctgcaagcagagctacgctggtttcttctttggaaaattaatgtcaacgccctgaaatctgcgcaaataacttttgcattaagaagagatgactgcccacaaagtaattgcataaagtaccttggcttgcacctcgatcccagactaacgtgaaaaaacacataaaagcaaagcg

SEQ ID NO: 2837 - DNA, 882 bp, DROSOPHILA
acgaacaaaacgataaaaaacattcctaccatcgaattatagtattttaactgccgttgaataatgtttattgtggctgtaactggcggtatcgccacgggaaaaagtaccatcagcaaagtgttcgaacgccagggtattccagtcatcgacgccgacaaaatcgccagggagattgtggaaccaggtcagccgtgctggcggcagattcgggaagtcttcggagatgaggtcctcctgcccagcaaggagatcaaccgcgctgttctgggtaagatgatcttcgaggacaaggagctgcgcggaaagctgaacaagatcacccatccgaccatccatcgcaagatcttttggcaagtgtgcaagctgctggtcacggggcacgcgtggatcgtcctcgacctgccactgctctttgagaccggcgtgctgatggactttatacacaagatcgtctgtgtaacctgcgactcggacaagcagctggagcgattaatagcccgcaatgagctctcggaatcggaagcccggcatcgcgtcgattcacaaatgccgctggacaagaagtgcgagaagtctcacttcgtcattgacaataacgggagcgtggaggaggcggagagctcggccatgagcatttacaacctgatgcgcgactccaagcagcactggctgaaccgcatcagcttcctggggctgttcctaatcgtgggcttcacaatatatatgctgctgaaggtgttcaaccggctgcccgagtcctggcagatgtagtccgtgtctgtgcgtgccatacgaggtcactttatgtgttaatgcaaatgataccaaaccaattatacaatttaaaagcttgttagtgaaatatattgccgaaacgtg

SEQ ID NO: 2838 - protein, 236 aa, DROSOPHILA
MFIVAVTGGIATGKSTISKVFERQGIPVIDADKIAREIVEPGQPCWRQIREVFGDEVLLPSKEINRAVLGKMIFEDKELRGKLNKITHPTIHRKIFWQVCKLLVTGHAWIVLDLPLLFETGVLMDFIHKIVCVTCDSDKQLERLIARNELSESEARHRVDSQMPLDKKCEKSHFVIDNNGSVEEAESSAMSIYNLMRDSKQHWLNRISFLGLFLIVGFTIYMLLKVFNRLPESWQM

SEQ ID NO: 2839 - DNA, 15051 bp, DROSOPHILA
caatgtgtaccagtcagtaagttttcgaacatcacaggcgtagaggcgcagctcccacatgggctccattagcaaggtggcgaggatggcagatatggcaacctcaacgaaagcgctggccgtcaagatcagctgcttccgcgaaaacctatgtgaattcactaagtaagttcttcttccagtttgattagttcactcacttgcgatccttggcgtccatgtcaatgaaaaagcagtgcatcataagtggcagcatggtcatgaatcccaggtatagccaggagtacgtgcttaactcgtcgcggcatggagagcatgcgtaactttggttcacctgaacaatataaaagtaaattattttccaggcgccgttccgaaggatgctagaacattaacccgagatcctctgggacagaccccgcagctgctccagctgttgtttcctagcggtgatcgcccacagtaggctcctgggcagcgttccaacgcgtcgtacattctcatgaaatcaaaacaattacttcgtattgtatattacattaaacaaaataaaaacaatactcctatcgatatcggacttatcgttatcagtaggaccactgaataaacgaataggttgttcgtgcacttaaattaatactaatttataaaatgataatacatcagaagcacatgcgaaatgtattaaaaataaggaaattattttctacagattatataatgggccctaagactgctttctaatttgatcaaattaataatactatatgtttttatatatttatttacaattaaacatgactagtagagtgtacattcttacagtgcatttcaatgatttgattttatttgaaatcccaattgccagaaatttaaatttagggtcccttatatgtaccacataaaccagttcgataggcgcgcttttggcatggcctgataactctggtaaaaagcaccgcgcgaaccggttcaattcataactagttcgcccgaactgcacaaccctagcaaaagaaatagcttaaatataatttatttaacgcgaattggacaacgagcgggtagaaaaaaccctgtggccgcaaccgcgacgctcgcaggatacgcagctcttcgccgtcgggcaggcaggtaaaaagcaatggcaattggagttgaccgcagaacaacagcaacggcagacgccattttgtctattggccggctgatttgtaagctcaatattcgcgaaatagttaccgcgactagcttcgagtggcgcagccaagtaagggctccccgctgtccagagcaaaggcgaaaggaagagcaatcgcccattttgaggcctgcgaaaagttgggactcggtcgtcagttcgctcgattccatttgcgaaaaataaatgtacgtgcgcgtgaggaagtgtgtgtgcgcgtgaaaaaacagtgaaaaataataaaaagccgcactggccgccgtccttgggtgacttccgttaatctcttacaacttttaaagctatagaaagaatgtgagcaatttaccgccctcgacacacccaatgaaccgctaattttggcatctttctataactttatgcgtagttattttcaccacccttcgcctacaccctttccccgcccctttttccaccagtggctcccacccaccgaccgacattccgcttaaggatgatgccgggcggagagagatagagagtgagtgcaaaatccgtaaacttggacgtgatgtaattttcggcaggaaaatgttctttgtttgcccaaaaaaataacaataaataaataagaatgaagagcgaggcgtaaaacaaaaacaattttaaattaaactcaaacgcacacacaaaaagagagggttctgtgggtgagcgtgcgtgcgtgtgagtgggtgagagcgtaatttgtgtgcttttggagcattatttggcgcttgctgccccgtctattaaataatattgatttttcatattccaacccagcgctctcttacacacacgcaggaccactcacacacccaaaactgagcttcgtacacatgtgggccttttcggtctctctcttagcgctgtatttatccgcctcttattgcctctttcgcttcgttgcactttatagatttttgcaaactggccgctgaccaggcattgggaaaaaggacaataagagggagcccagagcaagaagtccaactaaccgaccaactgtgcctcaagaaacagcaaatcagcggggaactcccaaactggacaagcagaagcccggatacctcacatttgccataagacaccagtcaaaaaacgacgcgcactgcagaacgcattaggattagcccggcactagagctcgtgcattaacatccgcttccggtgctccgcagaacgagttggctggagaggataccccgccaccatgacgttcgacactcgtaggcacaccaccggacagccgggaagcacagcgcccagctcaagcagcagcaccaccagcacaacaaccaccacaacgagtccggcgcagagtgccggatcaggatcgggcataggaacaggcacaggaacagtcgccaactcgagtctgccaggaggaggatcaggtagcttggacggcaaccaggatcaacagccggccacagacagtcagagctctgatgacgtggccgcttccttgtcagcgaacagcgtggacagcaccatcacaatagtgtaagtggtcgtgctgccgtatttgcatgactccgcccaattagtcgggttttgtgcgtagcaccagtatgaccgccacccctaaagatccccaacattcgtgtgtttacttttgcgtagtaattcttccacatgcattctttgtttgtctatggttgggccagcacaatgttcgtaattcatttaactatgtttcagatgattttggccaggccactggttagtgaccataaatgtggcaataaatgttatctttctttttcttcgataggtgcacttggctgctgtccagttttagcaatgaacttaccaagctttactaatattaccttacccggctattactatctcattttgaatgcccgtccacggcctatcttatcgcttgtccatcaaaataagctaacactgaaaattacaaaaaaaaaaaaaaaaaaaatgtatgcgttttggcatttattttaatagaaataaccatttaataaacagaaatgtttatggaagggtgtgctttgattgaccccctaagaacttttttttttatgtgtattatttaatttgttatttttaatattgaataattgtccatttaattaaataggcctccagagaagcttatatcctcgtttcccacgacgaaactgagatcactaacgcaaaagatatccaatccgcgttgggtggtgccggtgctgcctgaacaggaattggaggttctcttaaatgcagccatcgaactgacccaggctggtaagtgtgtccaaacgatttatttgataccctctaaagtcaatttatttgcaggtgtggatcacgactgcgagccatgtgtggagttttatcgcaatggactgagcacttcctttgccaagatcctaaccgacgaggcggtgaattcgtggaagaataacatccaccactgtatccttgtgtcttgcggcaagcttctacatctaatcgccatccacatgcagcgagacaatccctatctgcttgacttgctggctattgtttttgatccggagaacaagttcaacacatttaacgcaggccgtcaaccggagtgcttcgcagcgccggactacatctggggtcagttggacagcaacaaaatgtacgcccgtccgccgccggagcccaagaatgcgcgtggctggcttgtggatcttattaaccgcttcggacagttgggaggctttgacaatctactggaacggtttaacatcggactggaactgctgaagcgcaaccaaaacaagtgcactggcaagaatattagtgtcgagggtagggttgaaaatggggctcaggataatcgcctcacccttgccctcatacacagcctcttgcgtccattcggtcaatgttatgagcttctaatgcctgccactatagccaagtactttatgcccacctggaacgttgtgttagaccttctggacagcttcacagacgaggagttaaagcgagaagtgaaacctgagggacgcaatgactacatcaatgggattgtaaagtcagcccgcttactggccagccgcttgactggccaggaggagctaatccgagatcttgagatgtttcgcctaaagatgatcctgcgtctgctgcaggtgtccagcttcaacggcaagatgaatgcccttaatgagatcaacaaggtgctctcctcggtcgcatatttctcccatcgatcccaacctttgccccactgtatgcccgaagacgaaatggactggctgacggcggatcgcatggcgcaatggataaagtcgtcagatgtattgggtgtcgtgctcaaggactcgctacaccaaccgcagtatgtggaaaaattggaaaagatcatccgctttcttattaaagagcaggcactaacgttggatgatttggatgcagtttggagagcgcaggccggcaaacacgaggcaatcgtgaagaacgttcacgatctactggccaaacttgcatgggactttactcccgagcaactggatcacctcttcgaggcgttccaggtgagttttctgctttaaaagtgtattaagtaagtttaagttttaaattatgattattacattttccgcgatggtttgtatataaaatctcatgaacaatgaaaacaatattaatttttatttcaggccagcatgaccactgccaataagcggcaacgggaaagacttcttgagctaatacgccgcttggctgaggatgacaaaaatggtgtgatggcccaaaaggtgcttaagctgttttggactctggcccacagtcaggaggtgccgccagaggtgcttgatcaggcgctgggcgcacacgttaaaatcttggactacagctgctcgcaggagcgggatgcccaaaagaccatttggttggataagtgcgttgacgaacttaagtcaggcgatggatgggttctgcccgccttgcgtctaatccgggatatttgttgcctatatgataccacgacaaatcatgcccagcgcactcaaacgagtacgaatcgtcagcaggtgattgaacgactacagaatgattattccttggtcattctggtcaccaatagtttgactgcatacatggaaaaggtacgccaaatggtaacggactcaccaggcctggatgcaaccagaatcctaattgacggaagatttccgcatcacgtgcaaatagcggagcgactggagttccttaagttcctgctgaaagatggacagctatggctgtgcgcagatcaggcaaagcagatttggcattgcttggcggtcaatgcagtttttccggcagatcgtgaggagtgttttagatggtttggcaagttgatgggtgaggagcctgacttggatcctggcataaacaaagacttcttcgagaacaacatcctgcaacttgatccgcatctactaaccgaaagcggaatcaagtgctttgagcgcttctttaaggctgtcaattccaaagaggacaagctgaaggcgatacatagaggttacatgctggacaacgaggatctaataggaaaggactacttgtggcgggtcattacaactggaggcgaggaaatcgccagcaaggccattgatctacttaaggaagtgtcgacggcattgggcccacgtctgcaggagaatatcgcagagtttcatgaaatgttcattggtgagtgctgctcccgcctgcgcacacactatggaaatatcgttatattgggcaagacgcagctgcaagaggaattagatgcccccgatcagtcggataataccaacgacgagtctaaagattcaaaaatgcgtttcatcgaggcggagaagatgtgccgaattttaaaggtgctgcaagaatacgtaaaggagtgtgatcgttctttcagcggcgatcgtgttcacctgccacttagccgggttacacggggcaaaaacaccatcttatatatccgcttccagaaccctggcagatctatcgacgacatggagatcgttacacacagcaacgagacgatggccgcttttaagagaaatctacttaagcgaatcaagggaacttcgacggccaacataaaggttgatctcttctatgctaatgacgagatgatcggggtttccgatgaaataaacccactttatcagtacactatccgggataagatgaatcttacagcaaaactcacgcccgtgggtacgggtctagccagcagtcccgactcctcgagcgactcgagcacaggatctcctccgcgtccctgccctgacatgcagcgtgtggagtcagaaagcacgctacccggtgtgatcatctcgcaaaactaccagtacacagagttctttctaaaactgtaccaactgggcagtgatctcgagcacggtcgtcttcgagacagtgcaaaagttttactacacctgcttccctgcgaccgccagacgatccgtcagctaaagattatgtgcaaggtgccgaaggctgccgtaacggtggctgtgacgggtgacaagatcgctaaggatgaggaggagaaactgtaccccactgagcaggcggggattgaagatgaagaggtaagactatagttagtcgagttagttcattcaggaaagctataatggttatttaatttaaattgttttctgtatcaatctcttaatatctcttctttttaggaacactgcacgccagagcaaatgtttttgcaccccacacctgctcaagtgctatacaaccttagtgtgttgcacggactgctgattcccgcgctagatccactaggagaaagtgccctactagtgcagtctgcatggatgcattctggctgcgctcatttcgtgctggaactgttgaccaaaaacaattttctgcctagcgccgatatgcacacaaagcgtgcgtccttccagtgtgtgttgaggttggcaaagctgttcctgtacatagttggcagtgtattgtctcgtgtaggcgatgaacccatgatctgcgaccttgacaacggatcccgttcccaggttgacatcctgaagcagaacttctccacgatgcccagtagctcacagggaacattgagggcgatctccgcgaaacttgctgtgatccttgcccgcgagatgctttcagccagcccagaaggtgatcggtgccgaacgctatttagctccacactgcagtggtcatgtcccgacatttcaaccattaaggcggtagtgcaactggcctgggcctcgtcttgcggaaatcttcaggctctaggcaatagtagcggcgactttgaagacgaggtgatcgtgccggacgggcaagactttagcatgtgcaaggaggcgctagaggttctcaccatttcgtttattctgaatccgagtgccaacgaggcgttgactagcgatccgaactggccaaagttcatcacctccattgttctgaagaacccgcttcgccacgtgcgtcaggtggcctctgagcagttgtttttggcttctacctattgcgctggggatcggcgaccgttcgtatacatggttaacttgctggttggcgcgttgaagacgctggttccccagtacgagtcaacttgcgctgagttcttctcggtgctgtgtcggaccctttcttatggatgcatctacaactggccgctgcagattagcgagggattgttaggcgatgagattaagtggctgcaacgcattcgcgaaaacgtccacgccaccggcgacacacaagtgcatgaggagctccttgaaggccacctctgccttgccaaagagctaatgtttttccttggcgccgattcaaaggcgcagctgaacgagctcatccacgaactgatcgacgacttcctgttcacggcctctcgcgaatttctgcatttacggcgtcatggcagtctacggcaggacaccgtcccgccaccagtttgtcgcagtccgcacacaatcgccgctgcttgcgatctcctcattgccttgtgccagctctgtgttcctaatatgaagctactcaccaatacacttatagacttcgtctgcacgggtgagtgttggaatcgtaagatcatttcatgattaaatgtttcctcaattttttgtagatactgatccgttgcgcgaatgggattacctgccgccggtgggcgccaggccaactaaaggtttctgcggactaaagaacgcaggtgccacttgctacatgaattcggtgttgcagcagctttacatggtaccagcggtccgggtgggtattctgcgagcccacggcgctgccaccaccgacggcgaggatttcagtggcgattccgatttgacgggaggcggtcttggatcggccctattctcgggtcccgcttctgccctagtcagcctcccctcgtcgtcgtcaactatcgaagacggtttgcacgatgtgcgaaagaactatcacgttgtgatcctgaaacatgtgcaggccatattcgcccacctgggccacagtgcgttgcagtattacgttccacgtggtctctggacacattttaagtacaaaattgtttcattgattggcatcacaatgatattaatatattataatttttgtttgctaggctactgggagagcccgtgaatcttcgcgagcagcaggatgccgtggagttcttcatgtccttgcttgaaagtctcgatgaaggacttaaggcgctaggccagccacagcttatgaatgccactctgggcggttcgttcagcgaccagaaaatctgccaagagtgtccccatcgctactccaaagaggaaccatttagtgtatttagtgtcgatattaggaatcatagctcattaaccgaatctctggagcagtatgtcaagggagagctgctcgagggagccgatgcataccattgtgataaatgtgataaaaaagtaatgttctcatctctgatattcatatacaattaatttttattaacatcatttttgtgtccaacaggtagttaccgttaagcgagtgtgcgttaagaagctgccacccgtgttagccattcaactaaagcgtttcgaatacgactacgaacgcgtctgtgcgattaaatttaatgattattttgaatttccacgtatcttggatatggaaccatacacaggtgagtttaaccgtaattccatacgtatatatcttcttattggatcttcttctccatgatcagtgtctggcctagctaagctagagggcgaggtggtggaagtgggtgataattgtcaaacaaacgttgagacgacgaagtacgaactgaccggcattgtggtgcacagcggacaggcttccggcggtcactacttcagttacatactctccaagtgcgtaccataacaatgttacagttttttttaagactaattcaatacaacacctgctccagaaacccagcaaacggcaagtgtcagtggtataagtttgacgacggcgaagtcaccgagtgcaagatgcacgaggacgaggaaatgaaggcggagtgctttggcggcgagtacatgggcgaaacctacgacaacaatcttaagcgcatgcagtaccgtcgacagaagcgctggtggaatgcctacatgttgttctacacccgctgtgatcaaactcccgtgcagtatgaacccagcgtggagcagttgtcactcgcagaaagtcgaaacatggttttaccattgccaaagcccattgagcgcagcgtgcggtgagtggaaatagtgcttgaccactatacagatactttttaattattttttttcgattgcagacaccagaacattcggtttctccactcccgcagcattttttccgtggagttctttaactttatcaaaaagttggtcagctgcaatctactttctgctcggagcaataagatcgtcagtttgtattcaagtggttttatttcccgtttaaaaaaactattatttttttaacagactcctgctgcagaagagctttcactgctgggcgtccaattagcatcgcagtttcttttccacaccggcttccgcacgaaaaagtctctgcgaggccccgttatggaatggtgagtagcttgggaggtattgactcgggtataattaggatacatcttctgctttacaggtatgacgcgctctcacaccacatacgttcctcggcactagttcgcaagtggttcgctaatcatgcgctcctctcgccgccatcgcgtttaggcgagtacattctgatggctccgtctccggatgtccgtactgtctttgtcaagttggtggtttttttctgccattttgccatcaacgatgaacctctgactggctatgacggcgctaatctctgcgagcaggtactcatcagcgtgttgcgcctcttgaaatccgaggcagccgactatggcaaacacctgccccactattttagccttttcagtatgtacgtgggactaggaacacgggaaaaacagcaactgcttagggtgagaactatttacaataagattgcttgccattctaaacgattatgttcgtttgcagctcaatgtgccgctgcagtttattcaggtggcgttggatgatggccccggtccggcaataaaataccagtatccagagttcagcaagctacaccaagtggtttcgcacctaatacgctgcagcgatgtaagcgaaaaatgccagagctccaaccagaacgcccgtccactgtccaatccgttcaaagatcccaatgttgcgcacgaggagctgacgcccctgtccactgagtgcatggacctgctctttaaccgcacggggtaaggtgcatggcattttactgataactgtgctcagttcagagagcatttcaagccatttccttatgaaagaaacgtacagtgagtgcttacgatccgttttgtcatttttttttcagctacatcaagaaagtgatcgaagacactaacgtgggcgacgagggtctgaagctgttgcaatactgcagctgggagaatccacatttctctcgcgcagtgctaaccgaattgttgtggcagtgtgggttcgcctattgtcacgacatgcgtcaccacactgatctgcttctgaacatcctgctgatcgacgactcgtggcagcaccatcgcatacacaatgctctcaacggagtggcggaggaacgtgagggtctgttagagacgatacagcgggcgaagacgcactaccagaagagggcgtaccaaataatcaagtgcctgacgcaacttttccataagtcgccgattgcgctgcagatgctccacacaaattcgaacattactcggcactggagcattgcagtggagtggctgcaaggcgaactagatcggcagcggggcatcggttgccagtacaattcatactcgtggtcgccgccggcgcagagtaacgacaacactaatggctacatgctagagcgatcgcagtctgctaaaaacacgtggtccatggccttcgagctctgtccagatgaggtcagcgaaaaaacggtatctaaaacataacaattatattaaagaatactttattctattgatcgttcattataataggatgaaaataatgagccgaacttggagacgaacatggatgagaacaaatcggaaccggtggctcagccaggaggagtgcttgagggatctaccggcggcacagagcagttgcccgaaaataagacgccaaccacaagcagcccgtcgactgccgcctggccagcgcgtggggatagcaacgctattccacgactttcgcgtcagctatttggggcttacacttcgactggcagtggctccactagtggaggttccgcgccaacttccgccttgacgacaacggcgggtagtggggctaacagcgaaacagaaagcagcgcccaggaaacaaccggcgagacgaccattaacggactgacaaacagcctggaccaaatggagataacggccaaaaaggtaactcgggcgaacaatgtctaggacaagtgtccatctataaggtgtgtgtccgttgccgcaattgaagagttcgagacgtctaaaaacagtcccagaaaactagtaaacacaacaaacacattttacactggaactccaatctgtatctttctatctgtcttctttaatacgtggatagaagatatgtagtttagtcaaactaaacatgtcctcccgacgttcttttccatttatatttatgtttactaaaagacactatgtactttaacaagaacgttggttaatataaaaatattggttcgcttcgactgtttacccttcggttttcgaagatccaccaccttcttatttaaactcttctttaatatttctaccatactacaacatcaccctcggtaacccttgctgcgtttcggtgtttaatcctttattgtatatgaattgtaaccacaaacgcagggtgtgcgaagtcgctccaaaggaggcaagctccccccggtgctgtttcaccatcaccagttgccgccagagcaacaacttaaactgaagcagcaacaacagcagcagcagcaacaacagcatcagcaactacgtggtgatataaacaagacttcctcaagccgcttaatttgatttgacgccaagttagttagagttgttgtttcgtttgagctcaaaacgcccgccttactttgtgtttgttgttgttttcacgatcccggcacaaatgagatgcacttgccatccccggatctgtcttccccttggctttttatttcctttactgcaagttttctctacttatccatgcaaaaccacgcacgccacaatcagtccacacacacaaaatcacaggggtccaacaaatttgaatgtcaacgaagtcaacgaaaactagttgaaatacgatggatatgtttcttaattcgtacttttttaaataaaaaaactaagactgatttctaatataccgaatcttaaaaatcattgtttttttgtatgttatattgaaaagagtgttttttggttcttcagcgaattatttcaacgaaaatatacaatacaaaatatcagtatatacatttcatataaaaaagatatcctagattaaagtacataactaatcgtattagactttgacctattaagatactactttatgatccacttttgaggcgtgaatgaacccgaaaacactcgaagcaagattgcattaccgcttagctggcacccgtagcactgggcgatagattgtcaacctccactaaccgaactctttttgttggctattcacagaagtgccgcagggtgataataaaaaagctagtggaaagtaaggacgaagaggacgcaactactgctaccacagcggccaccacagaggtcacaacatcgccagcgacagctatcgcaacggcagcaactttagagcctgccggaatgagtgagctcacgacgatggtagagaaaaatcttataataagccaagaaaatccacaagcgaaaagctcattgcaataaaatgtattcgcaacctagctggaggagaagatgatgagtatccatagtgttaaatgtaaccaaagcagcctgacaatgagaacggtgtggacaggtgtttactagtggggatccccaccgtcgaaaacgagacttaatgggtaaatacgagaaaaagagcagaatccgtagatattaacaaaggatacttggttggagcgatgcgagtcaaggaacgaaagtctggtagataaggagatcaaaaccagcaaaggtgtttattagctatcgaactttataattacctttaataataaacaaatacaccaattttttgtttggttttctgttttgttaagcattaaaagggatatgtttatttctcctcattgtaaatgtgtcccttttaatgtataaatctaaaaaaaaaaaatgaaaagaacaccttaaactaactcccacaacactacacagaaacggacgtaggcagaaagaaacacactcataatctataagaagcgttaagttgcacgtttacagtaccatataattgtatttatatagtatataaatgatgtattacgtattgaagccgagcaacacttactatactaaccgaaaaaaatcaaaatgatggacacttagatacgatactaggaaaaactaatcgaaacgaatcggctgattgtaagaattagggcaagaaaccaaattgcatctttagtactcagtactcgcctctgaaactgtttccataatcatatttcaacggcatgaaccgatttaatgggatgctaattaaaacaaaacagtataaactcaagagcagaatggactaaagcaacacgagcataaagaaaacttgattatggtcataagtacatatattttaaatgattagtgttttgtattaagtgaaatttgttaaacatttattacatttttatgttctaagttgcgaaataaatgcgaagagaaagcaaagcgcgcaatgtcattcatgccttctctcagtttccatttccgtttccgtttaccgacagcaatcaactcaaagtctaacttttatgccgcgagattttgtacggaactcaattttaaattatgtattcacaaagatgtattacatttgggaaattaatgttcgttacatccattaaattcagcgaaaatgaaacaaataaatcactttttaaaaccattacttttggcttccttacttacccacaaaaacaattcatggctaacagttttagacgtttaatgggttaaagataagaaaattccattagatggacacttttttacttaacgataataaatgcacttcgtgatccctgaaccaaaagcaggctagttaatatttaaaatataattttgtttgtaaatgcaacaactc

SEQ ID NO: 2840 - DNA, 9143 bp, DROSOPHILA
cacaaccctagcaaaagaaatagcttaaatataatttatttaacgcgaattggacaacgagcgggtagaaaaaaccctgtggccgcaaccgcgacgctcgcaggatacgcagctcttcgccgtcgggcaggcagatttttgcaaactggccgctgaccaggcattgggaaaaaggacaataagagggagcccagagcaagaagtccaactaaccgaccaactgtgcctcaagaaacagcaaatcagcggggaactcccaaactggacaagcagaagcccggatacctcacatttgccataagacaccagtcaaaaaacgacgcgcactgcagaacgcattaggattagcccggcactagagctcgtgcattaacatccgcttccggtgctccgcagaacgagttggctggagaggataccccgccaccatgacgttcgacactcgtaggcacaccaccggacagccgggaagcacagcgcccagctcaagcagcagcaccaccagcacaacaaccaccacaacgagtccggcgcagagtgccggatcaggatcgggcataggaacaggcacaggaacagtcgccaactcgagtctgccaggaggaggatcaggtagcttggacggcaaccaggatcaacagccggccacagacagtcagagctctgatgacgtggccgcttccttgtcagcgaacagcgtggacagcaccatcacaatagtgcctccagagaagcttatatcctcgtttcccacgacgaaactgagatcactaacgcaaaagatatccaatccgcgttgggtggtgccggtgctgcctgaacaggaattggaggttctcttaaatgcagccatcgaactgacccaggctggtgtggatcacgactgcgagccatgtgtggagttttatcgcaatggactgagcacttcctttgccaagatcctaaccgacgaggcggtgaattcgtggaagaataacatccaccactgtatccttgtgtcttgcggcaagcttctacatctaatcgccatccacatgcagcgagacaatccctatctgcttgacttgctggctattgtttttgatccggagaacaagttcaacacatttaacgcaggccgtcaaccggagtgcttcgcagcgccggactacatctggggtcagttggacagcaacaaaatgtacgcccgtccgccgccggagcccaagaatgcgcgtggctggcttgtggatcttattaaccgcttcggacagttgggaggctttgacaatctactggaacggtttaacatcggactggaactgctgaagcgcaaccaaaacaagtgcactggcaagaatattagtgtcgagggtagggttgaaaatggggctcaggataatcgcctcacccttgccctcatacacagcctcttgcgtccattcggtcaatgttatgagcttctaatgcctgccactatagccaagtactttatgcccacctggaacgttgtgttagaccttctggacagcttcacagacgaggagttaaagcgagaagtgaaacctgagggacgcaatgactacatcaatgggattgtaaagtcagcccgcttactggccagccgcttgactggccaggaggagctaatccgagatcttgagatgtttcgcctaaagatgatcctgcgtctgctgcaggtgtccagcttcaacggcaagatgaatgcccttaatgagatcaacaaggtgctctcctcggtcgcatatttctcccatcgatcccaacctttgccccactgtatgcccgaagacgaaatggactggctgacggcggatcgcatggcgcaatggataaagtcgtcagatgtattgggtgtcgtgctcaaggactcgctacaccaaccgcagtatgtggaaaaattggaaaagatcatccgctttcttattaaagagcaggcactaacgttggatgatttggatgcagtttggagagcgcaggccggcaaacacgaggcaatcgtgaagaacgttcacgatctactggccaaacttgcatgggactttactcccgagcaactggatcacctcttcgaggcgttccaggccagcatgaccactgccaataagcggcaacgggaaagacttcttgagctaatacgccgcttggctgaggatgacaaaaatggtgtgatggcccaaaaggtgcttaagctgttttggactctggcccacagtcaggaggtgccgccagaggtgcttgatcaggcgctgggcgcacacgttaaaatcttggactacagctgctcgcaggagcgggatgcccaaaagaccatttggttggataagtgcgttgacgaacttaagtcaggcgatggatgggttctgcccgccttgcgtctaatccgggatatttgttgcctatatgataccacgacaaatcatgcccagcgcactcaaacgagtacgaatcgtcagcaggtgattgaacgactacagaatgattattccttggtcattctggtcaccaatagtttgactgcatacatggaaaaggtacgccaaatggtaacggactcaccaggcctggatgcaaccagaatcctaattgacggaagatttccgcatcacgtgcaaatagcggagcgactggagttccttaagttcctgctgaaagatggacagctatggctgtgcgcagatcaggcaaagcagatttggcattgcttggcggtcaatgcagtttttccggcagatcgtgaggagtgttttagatggtttggcaagttgatgggtgaggagcctgacttggatcctggcataaacaaagacttcttcgagaacaacatcctgcaacttgatccgcatctactaaccgaaagcggaatcaagtgctttgagcgcttctttaaggctgtcaattccaaagaggacaagctgaaggcgatacatagaggttacatgctggacaacgaggatctaataggaaaggactacttgtggcgggtcattacaactggaggcgaggaaatcgccagcaaggccattgatctacttaaggaagtgtcgacggcattgggcccacgtctgcaggagaatatcgcagagtttcatgaaatgttcattggtgagtgctgctcccgcctgcgcacacactatggaaatatcgttatattgggcaagacgcagctgcaagaggaattagatgcccccgatcagtcggataataccaacgacgagtctaaagattcaaaaatgcgtttcatcgaggcggagaagatgtgccgaattttaaaggtgctgcaagaatacgtaaaggagtgtgatcgttctttcagcggcgatcgtgttcacctgccacttagccgggttacacggggcaaaaacaccatcttatatatccgcttccagaaccctggcagatctatcgacgacatggagatcgttacacacagcaacgagacgatggccgcttttaagagaaatctacttaagcgaatcaagggaacttcgacggccaacataaaggttgatctcttctatgctaatgacgagatgatcggggtttccgatgaaataaacccactttatcagtacactatccgggataagatgaatcttacagcaaaactcacgcccgtgggtacgggtctagccagcagtcccgactcctcgagcgactcgagcacaggatctcctccgcgtccctgccctgacatgcagcgtgtggagtcagaaagcacgctacccggtgtgatcatctcgcaaaactaccagtacacagagttctttctaaaactgtaccaactgggcagtgatctcgagcacggtcgtcttcgagacagtgcaaaagttttactacacctgcttccctgcgaccgccagacgatccgtcagctaaagattatgtgcaaggtgccgaaggctgccgtaacggtggctgtgacgggtgacaagatcgctaaggatgaggaggagaaactgtaccccactgagcaggcggggattgaagatgaagaggaacactgcacgccagagcaaatgtttttgcaccccacacctgctcaagtgctatacaaccttagtgtgttgcacggactgctgattcccgcgctagatccactaggagaaagtgccctactagtgcagtctgcatggatgcattctggctgcgctcatttcgtgctggaactgttgaccaaaaacaattttctgcctagcgccgatatgcacacaaagcgtgcgtccttccagtgtgtgttgaggttggcaaagctgttcctgtacatagttggcagtgtattgtctcgtgtaggcgatgaacccatgatctgcgaccttgacaacggatcccgttcccaggttgacatcctgaagcagaacttctccacgatgcccagtagctcacagggaacattgagggcgatctccgcgaaacttgctgtgatccttgcccgcgagatgctttcagccagcccagaaggtgatcggtgccgaacgctatttagctccacactgcagtggtcatgtcccgacatttcaaccattaaggcggtagtgcaactggcctgggcctcgtcttgcggaaatcttcaggctctaggcaatagtagcggcgactttgaagacgaggtgatcgtgccggacgggcaagactttagcatgtgcaaggaggcgctagaggttctcaccatttcgtttattctgaatccgagtgccaacgaggcgttgactagcgatccgaactggccaaagttcatcacctccattgttctgaagaacccgcttcgccacgtgcgtcaggtggcctctgagcagttgtttttggcttctacctattgcgctggggatcggcgaccgttcgtatacatggttaacttgctggttggcgcgttgaagacgctggttccccagtacgagtcaacttgcgctgagttcttctcggtgctgtgtcggaccctttcttatggatgcatctacaactggccgctgcagattagcgagggattgttaggcgatgagattaagtggctgcaacgcattcgcgaaaacgtccacgccaccggcgacacacaagtgcatgaggagctccttgaaggccacctctgccttgccaaagagctaatgtttttccttggcgccgattcaaaggcgcagctgaacgagctcatccacgaactgatcgacgacttcctgttcacggcctctcgcgaatttctgcatttacggcgtcatggcagtctacggcaggacaccgtcccgccaccagtttgtcgcagtccgcacacaatcgccgctgcttgcgatctcctcattgccttgtgccagctctgtgttcctaatatgaagctactcaccaatacacttatagacttcgtctgcacggatactgatccgttgcgcgaatgggattacctgccgccggtgggcgccaggccaactaaaggtttctgcggactaaagaacgcaggtgccacttgctacatgaattcggtgttgcagcagctttacatggtaccagcggtccgggtgggtattctgcgagcccacggcgctgccaccaccgacggcgaggatttcagtggcgattccgatttgacgggaggcggtcttggatcggccctattctcgggtcccgcttctgccctagtcagcctcccctcgtcgtcgtcaactatcgaagacggtttgcacgatgtgcgaaagaactatcacgttgtgatcctgaaacatgtgcaggccatattcgcccacctgggccacagtgcgttgcagtattacgttccacgtggtctctggacacattttaagctactgggagagcccgtgaatcttcgcgagcagcaggatgccgtggagttcttcatgtccttgcttgaaagtctcgatgaaggacttaaggcgctaggccagccacagcttatgaatgccactctgggcggttcgttcagcgaccagaaaatctgccaagagtgtccccatcgctactccaaagaggaaccatttagtgtatttagtgtcgatattaggaatcatagctcattaaccgaatctctggagcagtatgtcaagggagagctgctcgagggagccgatgcataccattgtgataaatgtgataaaaaagtagttaccgttaagcgagtgtgcgttaagaagctgccacccgtgttagccattcaactaaagcgtttcgaatacgactacgaacgcgtctgtgcgattaaatttaatgattattttgaatttccacgtatcttggatatggaaccatacacagtgtctggcctagctaagctagagggcgaggtggtggaagtgggtgataattgtcaaacaaacgttgagacgacgaagtacgaactgaccggcattgtggtgcacagcggacaggcttccggcggtcactacttcagttacatactctccaaaaacccagcaaacggcaagtgtcagtggtataagtttgacgacggcgaagtcaccgagtgcaagatgcacgaggacgaggaaatgaaggcggagtgctttggcggcgagtacatgggcgaaacctacgacaacaatcttaagcgcatgcagtaccgtcgacagaagcgctggtggaatgcctacatgttgttctacacccgctgtgatcaaactcccgtgcagtatgaacccagcgtggagcagttgtcactcgcagaaagtcgaaacatggttttaccattgccaaagcccattgagcgcagcgtgcgacaccagaacattcggtttctccactcccgcagcattttttccgtggagttctttaactttatcaaaaagttggtcagctgcaatctactttctgctcggagcaataagatcactcctgctgcagaagagctttcactgctgggcgtccaattagcatcgcagtttcttttccacaccggcttccgcacgaaaaagtctctgcgaggccccgttatggaatggtatgacgcgctctcacaccacatacgttcctcggcactagttcgcaagtggttcgctaatcatgcgctcctctcgccgccatcgcgtttaggcgagtacattctgatggctccgtctccggatgtccgtactgtctttgtcaagttggtggtttttttctgccattttgccatcaacgatgaacctctgactggctatgacggcgctaatctctgcgagcaggtactcatcagcgtgttgcgcctcttgaaatccgaggcagccgactatggcaaacacctgccccactattttagccttttcagtatgtacgtgggactaggaacacgggaaaaacagcaactgcttaggctcaatgtgccgctgcagtttattcaggtggcgttggatgatggccccggtccggcaataaaataccagtatccagagttcagcaagctacaccaagtggtttcgcacctaatacgctgcagcgatgtaagcgaaaaatgccagagctccaaccagaacgcccgtccactgtccaatccgttcaaagatcccaatgttgcgcacgaggagctgacgcccctgtccactgagtgcatggacctgctctttaaccgcacgggctacatcaagaaagtgatcgaagacactaacgtgggcgacgagggtctgaagctgttgcaatactgcagctgggagaatccacatttctctcgcgcagtgctaaccgaattgttgtggcagtgtgggttcgcctattgtcacgacatgcgtcaccacactgatctgcttctgaacatcctgctgatcgacgactcgtggcagcaccatcgcatacacaatgctctcaacggagtggcggaggaacgtgagggtctgttagagacgatacagcgggcgaagacgcactaccagaagagggcgtaccaaataatcaagtgcctgacgcaacttttccataagtcgccgattgcgctgcagatgctccacacaaattcgaacattactcggcactggagcattgcagtggagtggctgcaaggcgaactagatcggcagcggggcatcggttgccagtacaattcatactcgtggtcgccgccggcgcagagtaacgacaacactaatggctacatgctagagcgatcgcagtctgctaaaaacacgtggtccatggccttcgagctctgtccagatgaggtcagcgaaaaaacggatgaaaataatgagccgaacttggagacgaacatggatgagaacaaatcggaaccggtggctcagccaggaggagtgcttgagggatctaccggcggcacagagcagttgcccgaaaataagacgccaaccacaagcagcccgtcgactgccgcctggccagcgcgtggggatagcaacgctattccacgactttcgcgtcagctatttggggcttacacttcgactggcagtggctccactagtggaggttccgcgccaacttccgccttgacgacaacggcgggtagtggggctaacagcgaaacagaaagcagcgcccaggaaacaaccggcgagacgaccattaacggactgacaaacagcctggaccaaatggagataacggccaaaaagaagtgccgcagggtgataataaaaaagctagtggaaagtaaggacgaagaggacgcaactactgctaccacagcggccaccacagaggtcacaacatcgccagcgacagctatcgcaacggcagcaactttagagcctgccggaatgagtgagctcacgacgatggtagagaaaaatcttataataagccaagaaaatccacaagcgaaaagctcattgcaataaaatgtattcgcaacctagctggaggagaagatgatgagtatccatagtgttaaatgtaaccaaagcagcctgacaatgagaacggtgtggacaggtgtttactagtggggatccccaccgtcgaaaacgagacttaatgggtaaatacgagaaaaagagcagaatccgtagatattaacaaaggatacttggttggagcgatgcgagtcaaggaacgaaagtctggtagataaggagatcaaaaccagcaaaggtgtttattagctatcgaactttataattacctttaataataaacaaatacaccaattttttgtttggttttctgttttgttaagcattaaaagggatatgtttatttctcctcattgtaaatgt

SEQ ID NO: 2841 - protein, 2778 aa, DROSOPHILA
MTFDTRRHTTGQPGSTAPSSSSSTTSTTTTTTSPAQSAGSGSGIGTGTGTVANSSLPGGGSGSLDGNQDQQPATDSQSSDDVAASLSANSVDSTITIVPPEKLISSFPTTKLRSLTQKISNPRWVVPVLPEQELEVLLNAAIELTQAGVDHDCEPCVEFYRNGLSTSFAKILTDEAVNSWKNNIHHCILVSCGKLLHLIAIHMQRDNPYLLDLLAIVFDPENKFNTFNAGRQPECFAAPDYIWGQLDSNKMYARPPPEPKNARGWLVDLINRFGQLGGFDNLLERFNIGLELLKRNQNKCTGKNISVEGRVENGAQDNRLTLALIHSLLRPFGQCYELLMPATIAKYFMPTWNVVLDLLDSFTDEELKREVKPEGRNDYINGIVKSARLLASRLTGQEELIRDLEMFRLKMILRLLQVSSFNGKMNALNEINKVLSSVAYFSHRSQPLPHCMPEDEMDWLTADRMAQWIKSSDVLGVVLKDSLHQPQYVEKLEKIIRFLIKEQALTLDDLDAVWRAQAGKHEAIVKNVHDLLAKLAWDFTPEQLDHLFEAFQASMTTANKRQRERLLELIRRLAEDDKNGVMAQKVLKLFWTLAHSQEVPPEVLDQALGAHVKILDYSCSQERDAQKTIWLDKCVDELKSGDGWVLPALRLIRDICCLYDTTTNHAQRTQTSTNRQQVIERLQNDYSLVILVTNSLTAYMEKVRQMVTDSPGLDATRILIDGRFPHHVQIAERLEFLKFLLKDGQLWLCADQAKQIWHCLAVNAVFPADREECFRWFGKLMGEEPDLDPGINKDFFENNILQLDPHLLTESGIKCFERFFKAVNSKEDKLKAIHRGYMLDNEDLIGKDYLWRVITTGGEEIASKAIDLLKEVSTALGPRLQENIAEFHEMFIGECCSRLRTHYGNIVILGKTQLQEELDAPDQSDNTNDESKDSKMRFIEAEKMCRILKVLQEYVKECDRSFSGDRVHLPLSRVTRGKNTILYIRFQNPGRSIDDMEIVTHSNETMAAFKRNLLKRIKGTSTANIKVDLFYANDEMIGVSDEINPLYQYTIRDKMNLTAKLTPVGTGLASSPDSSSDSSTGSPPRPCPDMQRVESESTLPGVIISQNYQYTEFFLKLYQLGSDLEHGRLRDSAKVLLHLLPCDRQTIRQLKIMCKVPKAAVTVAVTGDKIAKDEEEKLYPTEQAGIEDEEEHCTPEQMFLHPTPAQVLYNLSVLHGLLIPALDPLGESALLVQSAWMHSGCAHFVLELLTKNNFLPSADMHTKRASFQCVLRLAKLFLYIVGSVLSRVGDEPMICDLDNGSRSQVDILKQNFSTMPSSSQGTLRAISAKLAVILAREMLSASPEGDRCRTLFSSTLQWSCPDISTIKAVVQLAWASSCGNLQALGNSSGDFEDEVIVPDGQDFSMCKEALEVLTISFILNPSANEALTSDPNWPKFITSIVLKNPLRHVRQVASEQLFLASTYCAGDRRPFVYMVNLLVGALKTLVPQYESTCAEFFSVLCRTLSYGCIYNWPLQISEGLLGDEIKWLQRIRENVHATGDTQVHEELLEGHLCLAKELMFFLGADSKAQLNELIHELIDDFLFTASREFLHLRRHGSLRQDTVPPPVCRSPHTIAAACDLLIALCQLCVPNMKLLTNTLIDFVCTDTDPLREWDYLPPVGARPTKGFCGLKNAGATCYMNSVLQQLYMVPAVRVGILRAHGAATTDGEDFSGDSDLTGGGLGSALFSGPASALVSLPSSSSTIEDGLHDVRKNYHVVILKHVQAIFAHLGHSALQYYVPRGLWTHFKLLGEPVNLREQQDAVEFFMSLLESLDEGLKALGQPQLMNATLGGSFSDQKICQECPHRYSKEEPFSVFSVDIRNHSSLTESLEQYVKGELLEGADAYHCDKCDKKVVTVKRVCVKKLPPVLAIQLKRFEYDYERVCAIKFNDYFEFPRILDMEPYTVSGLAKLEGEVVEVGDNCQTNVETTKYELTGIVVHSGQASGGHYFSYILSKNPANGKCQWYKFDDGEVTECKMHEDEEMKAECFGGEYMGETYDNNLKRMQYRRQKRWWNAYMLFYTRCDQTPVQYEPSVEQLSLAESRNMVLPLPKPIERSVRHQNIRFLHSRSIFSVEFFNFIKKLVSCNLLSARSNKITPAAEELSLLGVQLASQFLFHTGFRTKKSLRGPVMEWYDALSHHIRSSALVRKWFANHALLSPPSRLGEYILMAPSPDVRTVFVKLVVFFCHFAINDEPLTGYDGANLCEQVLISVLRLLKSEAADYGKHLPHYFSLFSMYVGLGTREKQQLLRLNVPLQFIQVALDDGPGPAIKYQYPEFSKLHQVVSHLIRCSDVSEKCQSSNQNARPLSNPFKDPNVAHEELTPLSTECMDLLFNRTGYIKKVIEDTNVGDEGLKLLQYCSWENPHFSRAVLTELLWQCGFAYCHDMRHHTDLLLNILLIDDSWQHHRIHNALNGVAEEREGLLETIQRAKTHYQKRAYQIIKCLTQLFHKSPIALQMLHTNSNITRHWSIAVEWLQGELDRQRGIGCQYNSYSWSPPAQSNDNTNGYMLERSQSAKNTWSMAFELCPDEVSEKTDENNEPNLETNMDENKSEPVAQPGGVLEGSTGGTEQLPENKTPTTSSPSTAAWPARGDSNAIPRLSRQLFGAYTSTGSGSTSGGSAPTSALTTTAGSGANSETESSAQETTGETTINGLTNSLDQMEITAKKKCRRVIIKKLVESKDEEDATTATTAATTEVTTSPATAIATAATLEPAGMSELTTMVEKNLIISQENPQAKSSLQ

SEQ ID NO: 2842 - DNA, 4853 bp, DROSOPHILA
cagatcaattttggatctatccccattcccacaaagatttttaaatgcctatttatttcgattacctagtatgtcttaggtttcaaattttgttacttgactttttatacgaaatactttcctttctttgttatgttttcttgtcaacagcttttgtaattattcaaacttttgtttcgatttaatacgatgtttgttgggtaaactacgttactaggtcagttccacatatgaaagcttacctttctataatgaccatgatacggtcccatgacgatccatccttgctccaatgcttacactatcattccgaactgttttttaggtggccaagctggtggcacggcgcgtcgcggcttcaaacgtccggtcggtggcaagccggcggcaggcggccagcgacgggagcgcaaggccccgcccactgctgaggagctggacgccgaactggactcatacatcaacgacatgaagatctaaatagtgaatagtctgaattagtctaacaagaatagaagagcagcccaatctatagttttaagcctaccatatggacaccccccgcatggtacataaatgcaaacgcatcgacaacgccgcgcccaggagcagatctttgaaagcatcggacatcaaatcaatcaaccacttgcgcatttatccattaattgttagttttgccaatgcggcggatgttaagataactgaaatacatttgatgctgtatttattgtatttagaaatgcgctttatcaagttcgacgataaattgatggaccttgtcaaattaaactgaattgtaataaatactagaattaatttcgtgaccaaatcgaattgtatttactgactcaataggctaggagtattgtttaattactaggcggcggcggactccgaagaatctccatcaacttgcaaaaataaaagagccatcacttacaattaaatgttttatttggagtaatacatcgatggttatattggtattcgtttggacgaattttacagactataagaagattcgattggacactttaagtacaaatgctaaattaggcttagtaggtggtagattttagcaaagtcaatccatatcatccgtatttgtggggcggaatcacgagttacttaatttcaacaatttcgttagacattttaaacctgttacttagacaatagaacaaatgtgggacatgaaaatgaaagggcgaaaggaagaacgacttggagtgctgcttggcaaaatataatcagtttcccttcttcttcggctgatcagcaggttaatataggtaatgcgcctctaaatataggtgtatacgtatgttataagcgagttatgtatatttatagttttatgattcttatgtcggtctgaggatgtgatggtgagtcattaaatgcttggcagctgcttctgctcccgggcacacttccttccctccttcctccctctaccagaatccgcccgacgagaatccgccgggtggaactcggccgcgtgcctctccatttgtggccgctggtttgttcgccggctccttgggctggctgggtggggcggacttggcctcctccttctggatggagacctcttcgcgaattttctccaccaccttgttgggatccgtggagcccatgcaggcattgaggtttgaggagttctgttggttgtacttggcacgcggggcgggaacggccacgtcgggctccgagaagatattggtgtgtccgccgcctgggggcttcagcactcggctggagggacgggcactggtggtcaggccgattttcagctcggtggatgtcattttgtcgctgctggttgtggtttcagtgactgcaatgcataacaatgaaaagtgaatcagatgcggtcggaaatacgagtaccctagactacaaattcagtcacgccacttgcggatgtgacgcccggcacaatgacgcccgtcatccgacatcaccccaccactggcaaatcttggcgaagtggagtgaaaacgagagacccatttgttctgcccttctgccaccttatcgacggtttctctacacacatatgtatgtatgtatgtatatagaaactcatctatttttcttgctgcgctgccctcaactttttaactttgccgttaactgtaattgcgcgttttgtggctgtcgcactttcgttgttgtttttgccattgttcatttctccgtttttgtgttaggcgttcgcacagtgggctcaaaaagtgcgtttgggcattgaccattgactacagttcaaacaataaagtcctttggtgatataaagtgccaatagtcagagtggtcaattaagaaactaattaagttaatagaaagtgggttatatgtatatatgaaaataatatgctttacatatcatctataaaacacacttcctcgcatccaagatgcaaatgacaaatattagtttcgtaatgattttttgcctcgcttatggcggaaaagaggtcgcctcccaggcgatgacatctgaggcaagtgcggtgaagaagcatttgtaatgatgcgtcatccgctgggggaggcacattccgcccaactcccgcctggggtgtatcccatttggggtggctgttggcgacaacaacaaacacaggccacacacactggcaattttgttggggtacgggaaaacaaagcaatgtgaatgaccgcaccgagtcaaagatctctagattagaaggctcacaagcgatttcgattcccacagttgaacgctttccacctgggcaaaaaacactaccaacgtactgcacagaacaaaatacggtcgcatctaaatttattatgatgaatcgaatggatatctaaaattttatttacataactaaaacaacaccaaagagagagagatagatataaggcgtaacaatgaaaacaaattagctggcaaaaaatgacatcgtacaagcattttctctcagtgcagaaaggcaataacagagactgattgccgtgttccctttccactgtacttgttgtttttgcttccctagggcgattgccggctctcacacacacacatctgcatgcatacgagaatcacattaactgtgctttctacttgtattggtgctgaaattatgagtaatgagcaatctggttaaaactcgaaatttcggcctgctgccatcgccgcgacttgttgaccaagtgaatgtttatggccaaaacacattagacaaatccagtttcggcagacctacttaaaacgtatcatcgattagactaaaaacggcgatgcacacggaaactggccgaccagaaagcgaagtaaacaacagccacttcaagagcaggctactgagattcggttcaaactgctttcggttagtttttcgtacctaggtgcatgcaataatcgcctgactaaagcgaagcactcagaacccgaacaatatggccgcccaaaaggagcggcagccggagattgccccgtcgtgggccatagcccaaaagaccgagccacaaaccgggaatcttccacttccacagaggatgtgttatttataatgcatatggcagctgtgctaaataaaattcaaaagcagctgcactcacacaaacgcacgcacacacagacagcgcttgcgctcggtgtacgaaattccatgacacaagtgaaaagtgttggtctgcgaaaatattgatttatctcgcaaacccgctgtcaaccaactatctgtgggcccagcatgtcgacacccaagtcacgcttaccttggaaggactccggaatacggctctactcgaagaagtctggctttaactttgcgaataagagatgcggaaacgacgcgcacttgccaacgaacgttgatttcaaatatggtgtaaagtgaccggagcagagtattggaattaaccgaaaatctgtcttctgttcgtaggggaagcttttctagtctggtcccatttgatataacagcagtgtatcctggcactgttaagtgtcgagattgctcaacacgccatctatgaaagagaattgcaacttttgaaaaaaagtacttcattactgtttaataactaaatctaaatcatagacgttcattactatatcatctcggttgttgatcagtacaagattatttatgctgaattatgctttgacttctagtttttatatttttatttaaacgccctgtagctgagtaacgggtatgttgtaatcgatatttttcttgaatatcagattcaagacattagcctcgtgttcaaccagtgcattgactgaaaccagtgaaaccaccttgtgagcagtaaggtcacacttgagttttgttgacgtttcattttaggttttttcagattgcatctaagcagtctaatatctttatctttactatcgcagcgaatcataacaagatgggtagtgactgggacgagatcaagcgcttggccgccgactttcagaaggcgcagctcacgtctacgctgcagaagtaaggcgaagctctcctattttactgctttacgttttcacatttgttacattaccaatttcgtaggctctcggagcgaaactgcgtggagatcgtcacgctgctgctggagaagcagatgctggaggtggtgttcaccaacgatggcaaggagtacatcacgccggatcatctggagcgcgagatccaggacgagttgtacgtgaacggaggtcgtgccaacttggtggaggtcagcaaaaccctaaatgtggatttatcacgaatcgagctgcttgccgaacgaatatctgcggagaatcaaagcgtacacctggtactgggacagctaatcgacgaggactacatcagtcatattgcgcaggagat

SEQ ID NO: 2843 - DNA, 937 bp, DROSOPHILA
ttcgttggcaagtgcgcgtcgtttccgcatctcttattcgcaaagttaaagccagacttcttcgagtagagccgtattccggagtccttccaagtcactgaaaccacaaccagcagcgacaaaatgacatccaccgagctgaaaatcggcctgaccaccagtgcccgtccctccagccgagtgctgaagcccccaggcggcggacacaccaatatcttctcggagcccgacgtggccgttcccgccccgcgtgccaagtacaaccaacagaactcctcaaacctcaatgcctgcatgggctccacggatcccaacaaggtggtggagaaaattcgcgaagaggtctccatccagaaggaggaggccaagtccgccccacccagccagcccaaggagccggcgaacaaaccagcggccacaaatggagaggcacgcggccgagttccacccggcggattctcgtcgggcggattctggtagagggaggaaggagggaaggaagtgtgcccgggagcagaagcagctgccaagcatttaatgactcaccatcacatcctcagaccgacataagaatcataaaactataaatatacataactcgcttataacatacgtatacacctatatttagaggcgcattacctatattaacctgctgatcagccgaagaagaagggaaactgattatattttgccaagcagcactccaagtcgttcttcctttcgccctttcattttcatgtcccacatttgttctattgtctaagtaacaggtttaaaatgtctaacgaaattgttgaaattaagtaactcgtgattccgccccacaaatacggatgatatggattgactttgctaaaatctaccacctactaagcctaatttagcatttgtacttaaagtgtccaatcgaatcttcttatagtctgtaaaattc

SEQ ID NO: 2844 - protein, 118 aa, DROSOPHILA
MTSTELKIGLTTSARPSSRVLKPPGGGHTNIFSEPDVAVPAPRAKYNQQNSSNLNACMGSTDPNKVVEKIREEVSIQKEEAKSAPPSQPKEPANKPAATNGEARGRVPPGGFSSGGFW

SEQ ID NO: 2845 - DNA, 5437 bp, DROSOPHILA
gtgaagctgctggccatcgccaagggcagcaaaaaggtggacaactgcggtgtcaagcggcgcacgccaaagcgcaagtgctaggagtgggtggagcagcgtcaccagacgtagcaacagctggcgtaggagcacagcacagtctcctcccgccagacaagtcatagccataggcctcgaggggcggagtcggcgcgggcagccgacgacccatcgccgccatcgatcacatacgtactgccattgtgtcatcgttaatcgttaacgccggcgccaggaggggatcaggatcaggatcaggatctggttcgggatcgggatcagctggagtaggagcggcagcgggagcacccacttggcagaggccacctcctggccccgcacccattaaccgtatgcggagtatatgcaacatatttttctttcttttaaacatctaagcgttacattatttaggttttttttattaaatgtatttataattaataaacaaaagaaacaaaaaagcgaaagagcaacaaatataaatttgagcacaacaattcaaagcggacgaccgatcttctcatttgggatgccagtaacccagtagcgaaccgccagagatacaagccgtccaggtttttcctcaatttaacttcggatttatttaatatattttacaactagcggtatctttacatatataacatgtaaaaaaaaatagagttaaggaatagttaaaaaaacgtggagcacaatggaggcgacggcgtgtggcggagcgaacgctgcagtctcgacgagctcacacccagccggttgtgttggatttgtgtgctgatgttgcgctgctcttgccaaaggataaatgcgaagcaaaacaaagttccatcaaggattagaatgcgtgtcaaatggtgggtgatgtgtctccggctggatgcaccgatgtaagagatattggtgggtctcgctccgactgctgatgactgataactgatgagctgctttcgccgccgaccacgcgacgtcatcgttccacatcgtgacttaaacagtatgctggtttcggttctcatcacatctccctccccctctccggctgtcgaccagtcagtggcagtcgcttacatcatgccacccatgccgcccatgcctcccatgccgcccataccacccatgccgggcatggcaggagcgccatcctccttggggatctcggtgacgacagcctcggcggtggtcagcagtgaggccacaccggaggcgtctgtgatggcggtgcgcaccaccttggtgggatcgatgatgcccttctcgatcaggttgccgtattcgcccttcagcgcatcgtagccgtagtcaccggcctgattctccaccttggccaccaccatggcgccatcaacgccggcgttcttggcaatcgtcatgcatggcatgcgcagggcacgacgcacaatctccacgccgagtttctgttatgagatttcatagacattaatacacgaataacagaaaagagagatagataatcgtacctgatcctcgttggtggtctcgacaccctcgagcttctcaatgcaacgcagcagagcggtgccgcctccgggaacgattccctcttcgacggcagcacgggtggcgttcagggcatcatggacgcgatccttcttctcgttgacctccacctcgctggagccgccaacgcgcagcagggcaacgccggaggccaagcgggccagacgctcctgcagcttctccttctcgtactcggaggtggtgtcctcgatctggtccttgatctgattggcgcgacggagcacatcgtccttcttgcccttgcccttcagcagcagggtgtcgtccttggtgatcaccacctcgccgacctggcccaaatcgctaaccttgacgtcctccagcttgacgagatcagcatcatcgccgaagacaatgccgccggaggcgatggccatatcggtgagggtgctcttgcggttgtcgccgaagccgggtgccttgacggcagccacctgaaggccgatcttgaggcggttcaccaccagggtgctcagggcctcaccatcgatatcctcggcaatgatgaccagcggcttgcgctgcgcattggccagctccagagcgggaatgatgctctgcaccgatgagatcttcttctcggacagcaggaggagggcatcttggaactccaccttggcgcccttcgaggagttgatgaagtacggcgagatgtagccgcgatcgaacttcatgccctcgataacctccaactcatcggtgagggtcttgccatccttgacggtgataacgccatcgcgtcccaccttcttcatggcctcgctgatgagattgccgatggcctgatcaccgttggccgagatggtggccacctgggcgatctcctcgggcgtgctaacggggcgcgacatggtcttaaggttgtccttgacggtctcaacggccagcatgacaccgcgacgaatctcgacgggattggcgcccttggagatcttctcgaagccctccttggcaatggcgcgagccagaacggtggccgtggtggtgccatcaccggcctcctcgttggtattgttggccacatcctggaccagcttggcaccgatgttctggaacttgtccttcagctcaatggacttggccacagtgacgccgtccttggtgattttgggcgagccccacgactgctcaatgatcacattgcgacccttggggcccatggtcactgccacagcatcggccagcacatcgacgccctggagcatcatggcgcgcacctcgggtccgaaacgcacatccttggcatagccgcgcatggccaactggcggctaatggaggagcgagcaagcgaaactggcaaacggaacatctgtggaagagcagagaggattggtatgatgagaactggctggtagcaagagatgaatcaaagcacgtgttccgccttgggcagaactaagatgcggtttctttgagttgtttaccccggagtttcttagttgataagcttccagcgggtcaaaggtcaaaaatcttcgttcttgaatgtgaaattgggaatacaacgcgtgagcactgtttaacacacgcagttcgcttgacttttccgataatcagagctgtaaacttctcagattactgacagcaaaagccaatggaatgttatttacacggatacttatggaaattacataaacgcacaatgctccaaaaattgggaattttcaaagagttataaaaaaaataatatacatttttttaataaagctcaatgcaaaaaactcattatcaacataatcattgagctaatttatggcatataacacgtggattagataaatacagatgtacatacatctagtttcggtttataaaaattacaattttcgaaaattacataaactaattaatatctctgtgagaattgcataagcagaaagaatgttttttttttaggttgttattaatgtgaatacaataaaataaaatataagacgaatttaaacagtaatcacctattgtttctatctaatttaatgatgaaatagttctaaaaacacaggcaacatgagatatttacatggattctgctcatccttataaacatcattattttgaattgaaaaattaaaccaaatcaatgagtttaggtattactgatagtattatgtaaactaattcgttgcagcagcgaggctccactgtaccggccaggccccctcattccagtgcccacccccaccccccggggaacgaacaacatcttggcaccgagcattccagaagaaacgatttatgtaaccagcacttgggcaaaagactaatatgtagctcccaaaatgggagggaatgttattcaatgaatcaaagatttccgcaaacgagagtggaaagaaagaaaggaagcagggcaagcagtagcagcacatgcaatgccgtctgataaatgtgaaattgccggcaagcagtggaaaacatgtgcaactgagtttccaccagctttccaatgtgcgcgcccgtatgcgtgtttgtgtgttttgaggtggatttaataaattcttgttggaatgtaatcatttactgcacaatgcagacatcgtttacttttccagttatcaatgaacagaacattctggaaacacgatttgccggctatcggccagattgttcgctcttatataatcgccaatgggacacacacacttgcacacaaacttgaaatgcaattgggcaaatgggaatggctctggaaattgtttaaaagtttagaacttactgtgaattaaactggtactgcgaattattgacaagacagttaagcgaacgcttccgattctatttgatgtgaaacaacaagcccacttcaccacagtttactcgcttcgaaatgtgcgcacaggcggtccgaacttcctaaccttaatgtgtatcggtgtgaccattcgttggccatcgaaaatagccggcgcttatcgattgcttgcgtcgggcaatcgaatattatcggcagccatatgggggactcgcattcaagtaatatttataataaattgagctttcgccgataaataagttttctggtttccatagaaaagaaaacaatttaatatattaatgtattaacagcaaatatgcaaatccaacgcaactattaataatccaattatataataatgaataactatcgcagcaagctttatacgttatgctagagatgttagatgcggaaagcgatagtttcgcgcctaagtttttttttttcaaaatgaaaccatacatatgtatattttattatataggtttactacatttttcgaccatactataaagtctaagtagttacaaactgaatcctttgctcgattgcagtcgtaattggcccggtggagttcatgtagtccattaaggcgtccaagtcgaaaggaccaaacctggcaaaaaaagctttttaatactttattcaaaatcaacattgtttaacatgcttactctggatcttctgcattttcgctgattacgctaaatccgttcttcccattcgccaggtactccatgacgaccacgcggtacttgtgctccaaatcgagtggaatatacctgggcaccaggcacttggagcatcttactcgcacactgaatactcgctgatcggcgttcaaatcgtaacggatacggagaccggaaacctggaggaatcgggaggaacgcggcgtggccgaactggcattcatgggcgccaccacatgctccagcagctccacaatgtgcttaccacgcagactgagggtcaccagtctattctgccatgggcacatggcaaacaattgcttgtaggtgatgtctgtagtgatatacttagtcttattgttcgattaaggtatacatgttgttttcaggactcactgccagctg

SEQ ID NO: 2846 - DNA, 1967 bp, DROSOPHILA
aagttcggaccgcctgtgcgcacatttcgaagcgagtaaactgtggtgaagtgggcttgttgtttcacatcaaatagaatcggaagcgttcgcttaactgtcttgtcaataattcgcagtaccagtttaattcacaatgttccgtttgccagtttcgcttgctcgctcctccattagccgccagttggccatgcgcggctatgccaaggatgtgcgtttcggacccgaggtgcgcgccatgatgctccagggcgtcgatgtgctggccgatgctgtggcagtgaccatgggccccaagggtcgcaatgtgatcattgagcagtcgtggggctcgcccaaaatcaccaaggacggcgtcactgtggccaagtccattgagctgaaggacaagttccagaacatcggtgccaagctggtccaggatgtggccaacaataccaacgaggaggccggtgatggcaccaccacggccaccgttctggctcgcgccattgccaaggagggcttcgagaagatctccaagggcgccaatcccgtcgagattcgtcgcggtgtcatgctggccgttgagaccgtcaaggacaaccttaagaccatgtcgcgccccgttagcacgcccgaggagatcgcccaggtggccaccatctcggccaacggtgatcaggccatcggcaatctcatcagcgaggccatgaagaaggtgggacgcgatggcgttatcaccgtcaaggatggcaagaccctcaccgatgagttggaggttatcgagggcatgaagttcgatcgcggctacatctcgccgtacttcatcaactcctcgaagggcgccaaggtggagttccaagatgccctcctcctgctgtccgagaagaagatctcatcggtgcagagcatcattcccgctctggagctggccaatgcgcagcgcaagccgctggtcatcattgccgaggatatcgatggtgaggccctgagcaccctggtggtgaaccgcctcaagatcggccttcaggtggctgccgtcaaggcacccggcttcggcgacaaccgcaagagcaccctcaccgatatggccatcgcctccggcggcattgtcttcggcgatgatgctgatctcgtcaagctggaggacgtcaaggttagcgatttgggccaggtcggcgaggtggtgatcaccaaggacgacaccctgctgctgaagggcaagggcaagaaggacgatgtgctccgtcgcgccaatcagatcaaggaccagatcgaggacaccacctccgagtacgagaaggagaagctgcaggagcgtctggcccgcttggcctccggcgttgccctgctgcgcgttggcggctccagcgaggtggaggtcaacgagaagaaggatcgcgtccatgatgccctgaacgccacccgtgctgccgtcgaagagggaatcgttcccggaggcggcaccgctctgctgcgttgcattgagaagctcgagggtgtcgagaccaccaacgaggatcagaaactcggcgtggagattgtgcgtcgtgccctgcgcatgccatgcatgacgattgccaagaacgccggcgttgatggcgccatggtggtggccaaggtggagaatcaggccggtgactacggctacgatgcgctgaagggcgaatacggcaacctgatcgagaagggcatcatcgatcccaccaaggtggtgcgcaccgccatcacagacgcctccggtgtggcctcactgctgaccaccgccgaggctgtcgtcaccgagatccccaaggaggatggcgctcctgccatgcccggcatgggtggtatgggcggcatgggaggcatgggcggcatgggtggcatgatgtaagcgactgccactgactggtcgacagccggagagggggagggagatgtgatgagaaccgaaaccagcatactgtttaagtcacgatgtggaacgatgacgtcgcgtggtc

SEQ ID NO: 2847 - protein, 573 aa, DROSOPHILA
MFRLPVSLARSSISRQLAMRGYAKDVRFGPEVRAMMLQGVDVLADAVAVTMGPKGRNVIIEQSWGSPKITKDGVTVAKSIELKDKFQNIGAKLVQDVANNTNEEAGDGTTTATVLARAIAKEGFEKISKGANPVEIRRGVMLAVETVKDNLKTMSRPVSTPEEIAQVATISANGDQAIGNLISEAMKKVGRDGVITVKDGKTLTDELEVIEGMKFDRGYISPYFINSSKGAKVEFQDALLLLSEKKISSVQSIIPALELANAQRKPLVIIAEDIDGEALSTLVVNRLKIGLQVAAVKAPGFGDNRKSTLTDMAIASGGIVFGDDADLVKLEDVKVSDLGQVGEVVITKDDTLLLKGKGKKDDVLRRANQIKDQIEDTTSEYEKEKLQERLARLASGVALLRVGGSSEVEVNEKKDRVHDALNATRAAVEEGIVPGGGTALLRCIEKLEGVETTNEDQKLGVEIVRRALRMPCMTIAKNAGVDGAMVVAKVENQAGDYGYDALKGEYGNLIEKGIIDPTKVVRTAITDASGVASLLTTAEAVVTEIPKEDGAPAMPGMGGMGGMGGMGGMGGMM

SEQ ID NO: 2848 - DNA, 3385 bp, DROSOPHILA
agtgtcttaccagtgatccagctaccaaaaggaaggaaactgacaatagtatcagcagcatggaggtgaaaaaggccgtgaccagtatctgcagtcggcgttccagaggaacccgcagtggtgcccactcgattttcatgtctgctgtgttacaaaaatgcccaaaaaaactccaccagctgctctttcggcggttctcccacgactgaatgatatggaagccagcgatggtcaaattgccctgtactagacttatacttatccttatcggctctcggcttcatgcagggcgcccgcattacctgctaatcacaagccaactaaccagtcagtagcactttgtgtggggctgatgggaattcgcgattggagtgatgaagattataaactcggcatgcaatcgccgtctgggtgcaaaggtatgcggcgattcctaggagattacccactttcaagagcactatgattcaataagcattttatgctgtgggtcgtatttcttaagatttataagtcagttaagtgataagctgtattacttttatactacatacaacgaaattacaaaaacatacaacggattaagttgtatgcttgtatgatgaaataattgttttttaattgaaggctgtagtttaaaaatcaataaagctggttgaacagggattattagaaataaatgataatgctgttattactacatttggtatattctgcgctcattgttatgttttttccctatatatcaattaataaatcatagttattcattttaaattgaacgccaacttctactgatcgttgatcaacactgtttgccgtcttatcgataaataattgctatcaatagcgatagctgcttattcaaagtttcgatcactacccgtcgttttaaaaagcttgtatggcaattttatttgcctgataaaattcgtaatttttatattaaatgcttataaagcactcatttgatcacattgtttagacaataacttctcgactagtgtataatcagcttgtcctgcttggagttcggtatgtactgatccttgtacttggcgaacatcttctccaggtcgtcaataacctgtttgtgtatcttatccacataggctgcgtctggttgatcgctctgaaccacgtcgatgggagcgccaactgaaattttttaaagtttatttgaatcttacaactatgcgacatttgaatgagctgaggactcaccaacttggacaatgcgtcgacggttgggcagaaagccaaaggagtagttgaagatgccccggccaacgggaatcagcggagatatccccgttatcctctttacaaagtcttgaaagcgacgaacccgagagttcggtggattggcaacctgatccagaatgtccacctcgccaaaggaaaacgtgggaacaatcgaagacctaaaatgaagaccggatacaattaaaaataacttttagttgtatccgatttcaacctaccctgtcctaatggccattttaacgaatcccttgcggttcttcagtgtcaatatatatttgccagggtgcgagtctagtgcctcctgggcaccacccaccagaatagccaccgcgttggaggtgaacccatcacgattgtccttgtgcttgggatcgtttgatttggttagcagatatactaaggcctccttggaaaccgacaccaggccccaagatctcaggagaccacgcacgatgggcgtcaggaagttttgatccaaagtggccaccttgggcctcacctgtgggaacagttgcagccacttggagatgtctagacccatattaatggaaatgccagtcctatcagggttacaatatgtgcgtaagaaggtatacaaatgtttcgtcacctaagcaaccatcgataagattgactatcagtcaacaagcttaccccaaaattccgtgcggaaaactggccaaaatgtagttcttattcggcggcagctctgcggtcttgaccagctgtacgggaaagtagtcccgataatgccgaaacagccaattgttgcggttaattttccagctaaaatggattattttagctttaagtgttcttatagggacttcatgacgcctacccattgccatccataatggagtgggttctcttgtgattcgcgtagacgtagaccaaatagatgaccataatggtgcgccacaaaaggcttccatagaactggaagggaatgctttacttttcaaaatattgaagcactgatgtatttaccagcacggcagcaacgaagaaataggatccaaaggagagtatcataaaggataggattaggaaggccatggcaaacgtctggcgacgccgttccatgggaactcctttgggagcccactcgattttcatgatgtcagagctctcgaactcggaaagttgaactacttggtagcacggtcctccggcgactgaaaaatggaaatgttcaatgtttagttaccatttcttatccttatcagtatccgtcggtggcgcgagtgcgtggctattggttagagttgttaaaaaaataccttcgatttaatggctattcgcttggggtgtttaaaaattcgagcaatcaagataatgacttgctctatatggacgtctggctagaatgccgatatgatattatatgatatgatcttatcattgccaacaacagccggctttaacgtttgtccgatacttgtgatcacatatatataattattgttttgaaatttcaattgcaactggtttgaatgcctttagaaagagaacgaaactgctgttgcacgacaacctcctcactttaattgaatggtgataaaactaactgggagttactcgtattgcttttgatccgatccgctttggcctagtatcacaggctaattattttaaacttgtagagctttaataaactagacgctcccatagaaatttattattaatgtttacacacgtaatggatcgttatcgcgtttgagcagcagaaccgacgatgcgagcgtacaacatttaactaaacttgcgagtggcactgaatgctcgagtttcccatgtgagtgtttcgagtactcgaatgcgatgcaacaattgagtcaccaatgtaatcgagcgttctatacgaataacctgaatcagaggcaactgaggtcatgtgcatttgcaagtcgctataaggaaatacctgtattgtcagctctgttccaattgaaatggaatcagggaaagtgtgatcacgcaaaagctacaatgtgggcgaaattagcatagttgttttttggttaatttcgaatattggcgcccaacatggtttctagggatggaagcgaccagcactgcattctgatttatcggtttgctgcaatacaagctcttt

SEQ ID NO: 2849 - DNA, 1059 bp, DROSOPHILA
atgaaaatcgagtgggctcccaaaggagttcccatggaacggcgtcgccagacgtttgccatggccttcctaatcctatcctttatgatactctcctttggatcctatttcttcgttgctgccgtgctgttctatggaagccttttgtggcgcaccattatggtcatctatttggtctacgtctacgcgaatcacaagagaacccactccattatggatggcaatggctggaaaattaaccgcaacaattggctgtttcggcattatcgggactactttcccgtacagctggtcaagaccgcagagctgccgccgaataagaactacattttggccagttttccgcacggaattttggggactggcatttccattaatatgggtctagacatctccaagtggctgcaactgttcccacaggtgaggcccaaggtggccactttggatcaaaacttcctgacgcccatcgtgcgtggtctcctgagatcttggggcctggtgtcggtttccaaggaggccttagtatatctgctaaccaaatcaaacgatcccaagcacaaggacaatcgtgatgggttcacctccaacgcggtggctattctggtgggtggtgcccaggaggcactagactcgcaccctggcaaatatatattgacactgaagaaccgcaagggattcgttaaaatggccattaggacagggtcttcgattgttcccacgttttcctttggcgaggtggacattctggatcaggttgccaatccaccgaactctcgggttcgtcgctttcaagactttgtaaagaggataacggggatatctccgctgattcccgttggccggggcatcttcaactactcctttggctttctgcccaaccgtcgacgcattgtccaagttgttggcgctcccatcgacgtggttcagagcgatcaaccagacgcagcctatgtggataagatacacaaacaggttattgacgacctggagaagatgttcgccaagtacaaggatcagtacataccgaactccaagcaggacaagctgattatacactag

SEQ ID NO: 2850 - protein, 352 aa, DROSOPHILA
MKIEWAPKGVPMERRRQTFAMAFLILSFMILSFGSYFFVAAVLFYGSLLWRTIMVIYLVYVYANHKRTHSIMDGNGWKINRNNWLFRHYRDYFPVQLVKTAELPPNKNYILASFPHGILGTGISINMGLDISKWLQLFPQVRPKVATLDQNFLTPIVRGLLRSWGLVSVSKEALVYLLTKSNDPKHKDNRDGFTSNAVAILVGGAQEALDSHPGKYILTLKNRKGFVKMAIRTGSSIVPTFSFGEVDILDQVANPPNSRVRRFQDFVKRITGISPLIPVGRGIFNYSFGFLPNRRRIVQVVGAPIDVVQSDQPDAAYVDKIHKQVIDDLEKMFAKYKDQYIPNSKQDKLIIH

SEQ ID NO: 2851 - DNA, 3499 bp, DROSOPHILA
gaaggattaccagcaggatagctactgcgaggcaggacgagatgggcagcgtaaagaaggtataggtgaagaatgacgtaaccagggtctgaagccgccgttccagcggaacccggagaggagcccattcgattgtcatgctcaattagaccgatcttcaacacaagaagcgactatttcgacgagtttccagcgactgagcgatcaagtatcagcacacacaatttccagggtgtaacgtggagtacttatccttatcaatgtgacgacccgcctcttcgcagcgatccgcaagtgtcgttaacagtttgagaaccacacttaagtgataagccattgataattgcctaaatccagacactagacatcacacactaggtggggggcatggggtaagattaggtcactacgcagatgatctgaaaagtagccagtgaaactcagatttatttgcccaaattatagtcaaatcagtccgataactgatctaaagtggctgtaaatattgattcgatcttagctggttgttttcaatcgacggcagctgaatcatatcttgggaacccggtactattccaatgtttatatggttatgccggcaacagtcattcctatcgcgatcgattcttgacctttactcgaagaacctaatgctgaggtcacacgttttggcggtgcttcgcaacagtcagaacactcattccattgtgcgtacgccaatagtgtgttctgcgataaggaatctagtcgattttgtcgtagttttactagagatctgtgtcgcccttatcagccgattgtttcattcacaaaagtgctgattcacgcagactttgttacattgaactgaaattatagtgtaagtactatgagtatgcacatttctttatttgcaatgcaatgtgtaatcaacttgtaatgagacaaccagtttaaattcaattaaaaagctcgtttctatttcaatacataggaatattttgtatcaacatgatttaaaactagtgtacaactagagtggcactcttcgaattctccaagtacttgtctttgtactgatcgaataacttctccagcgactcaatgacctgtccatgcactttatccacatactccgagtctgggtgctcgttcttaacaacatcgatgggagcaccaactgggaattaaaatattattaccacttatttgcgtaaagtatataaaaatataacttaccaacttggacaatgcgtcgtcggaatgggaggaagccaaaggtgtagttgaagaatccgcggcccacaggaatcagcggagagactccggtgagcttcttgacaaagtcctgaaaccgtcggagcagcgagttggggggatttgccacctgatcgaaaatgtccacctctccaaaggaaaatgaaggaacaatcgatgagctgaaatcaggatatatgtaaatgggaatttaaattacactcgaacccattacttaccccgttctaatggccattcgcacgaagcctttcctattcttcaaggttaaaatgtactgcccaggatgagagtccatggcttcctgggcaccgccaaccagaatggccaccgcattggaggtgaaaccatcccgattatccttgtgcttgggatcatttgacttgctgagcatacggatcagcgcctctttggacactgacaccagaccccagcagcggaggacctcacgcatgaacggaacatggaaatgctgatccagagtgcccagtttgggacgcacttgggggaatagctccagccacttggagatttccaagcccatgttaatgccaatgcctgtgctacaataaaaatcagtgtctatttatattcgaacgattagattggctatctgtcaaggtgcttaccccagaattccgtggggaaagctggccaagatgtagttcttagtagctggcagttcggctgttttcaccagctccacgggaaagtaatcacgatagtggcgatgcaaaaggttggtgcgtgttatcatccagctgagcgatatacacagcgatataatcttacagagactttcgttagtattcgacttacccattgccatccacaacggattgggttttcttgtggtgcacaaagacgtaggccaagtaagttaccatcagactacgcaccaaaagacctccgtagatctgaagggaaactcatgttctgtaatacttatgcatatgactaaatggttagtgtcttaccagtgatccagctaccaaaaggaaggaaactgacaatagtatcagcagcatggaggtgaaaaaggccgtgaccagtatctgcagtcggcgttccagaggaacccgcagtggtgcccactcgattttcatgtctgctgtgttacaaaaatgcccaaaaaaactccaccagctgctctttcggcggttctcccacgactgaatgatatggaagccagcgatggtcaaattgccctgtactagacttatacttatccttatcggctctcggcttcatgcagggcgcccgcattacctgctaatcacaagccaactaaccagtcagtagcactttgtgtggggctgatgggaattcgcgattggagtgatgaagattataaactcggcatgcaatcgccgtctgggtgcaaaggtatgcggcgattcctaggagattacccactttcaagagcactatgattcaataagcattttatgctgtgggtcgtatttcttaagatttataagtcagttaagtgataagctgtattacttttatactacatacaacgaaattacaaaaacatacaacggattaagttgtatgcttgtatgatgaaataattgttttttaattgaaggctgtagtttaaaaatcaataaagctggttgaacagggattattagaaataaatgataatgctgttattactacatttggtatattctgcgctcattgttatgttttttccctatatatcaattaataaatcatagttattcattttaaattgaacgccaacttctactgatcgttgatcaacactgtttgccgtcttatcgataaataattgctatcaatagcgatagctgcttattcaaagtttcgatcactacccgtcgttttaaaaagcttgtatggcaattttatttgcctgataaaattcgtaatttttatattaaatgcttataaagcactcatttgatcacattgtttagacaataacttctcgactagtgtataatcagcttgtcctgcttggagttcggtatgtactgatccttgtacttggcgaacatcttctccaggtcgtcaataacctgtttgtgtatcttatccacataggctgcgtctggttgatcgctctgaaccacgtcgatgggagcgccaactgaaattttttaaagtttatttgaatcttacaactatgcgacatttgaatgagctgaggactcaccaacttggacaatgcgtcgacggttgggcagaaagccaaaggagtagttgaaga

SEQ ID NO: 2852 - DNA, 1199 bp, DROSOPHILA
ccgagagccgataaggataagtataagtctagtacagggcaatttgaccatcgctggcttccatatcattcagtcgtgggagaaccgccgaaagagcagctggtggagtttttttgggcatttttgtaacacagcagacatgaaaatcgagtgggcaccactgcgggttcctctggaacgccgactgcagatactggtcacggcctttttcacctccatgctgctgatactattgtcagtttccttccttttggtagctggatcactgatctacggaggtcttttggtgcgtagtctgatggtaacttacttggcctacgtctttgtgcaccacaagaaaacccaatccgttgtggatggcaatggctggatgataacacgcaccaaccttttgcatcgccactatcgtgattactttcccgtggagctggtgaaaacagccgaactgccagctactaagaactacatcttggccagctttccccacggaattctgggcacaggcattggcattaacatgggcttggaaatctccaagtggctggagctattcccccaagtgcgtcccaaactgggcactctggatcagcatttccatgttccgttcatgcgtgaggtcctccgctgctggggtctggtgtcagtgtccaaagaggcgctgatccgtatgctcagcaagtcaaatgatcccaagcacaaggataatcgggatggtttcacctccaatgcggtggccattctggttggcggtgcccaggaagccatggactctcatcctgggcagtacattttaaccttgaagaataggaaaggcttcgtgcgaatggccattagaacgggctcatcgattgttccttcattttcctttggagaggtggacattttcgatcaggtggcaaatccccccaactcgctgctccgacggtttcaggactttgtcaagaagctcaccggagtctctccgctgattcctgtgggccgcggattcttcaactacacctttggcttcctcccattccgacgacgcattgtccaagttgttggtgctcccatcgatgttgttaagaacgagcacccagactcggagtatgtggataaagtgcatggacaggtcattgagtcgctggagaagttattcgatcagtacaaagacaagtacttggagaattcgaagagtgccactctagttgtacactagt

SEQ ID NO: 2853 - protein, 352 aa, DROSOPHILA
MKIEWAPLRVPLERRLQILVTAFFTSMLLILLSVSFLLVAGSLIYGGLLVRSLMVTYLAYVFVHHKKTQSVVDGNGWMITRTNLLHRHYRDYFPVELVKTAELPATKNYILASFPHGILGTGIGINMGLEISKWLELFPQVRPKLGTLDQHFHVPFMREVLRCWGLVSVSKEALIRMLSKSNDPKHKDNRDGFTSNAVAILVGGAQEAMDSHPGQYILTLKNRKGFVRMAIRTGSSIVPSFSFGEVDIFDQVANPPNSLLRRFQDFVKKLTGVSPLIPVGRGFFNYTFGFLPFRRRIVQVVGAPIDVVKNEHPDSEYVDKVHGQVIESLEKLFDQYKDKYLENSKSATLVVH

SEQ ID NO: 2854 - DNA, 4128 bp, DROSOPHILA
tgttgaaatggaatgtcggagtgagcatcttgcggcgagcatgccattttttgcctgtaaaaggagtacggtagtatgaagaatagcgccgagtgatgaatccacagtccaactcaccagtcgatgtcagcaagcccgtccttaggaatggatgtaggaagttgtagacgagccccttggttatgagattcggatgattcagcacattttccgcgctatccgcatcgataatgttgtaaatcgcctttccaaagacatattctatgtagctagtacccatttccttagcacgctcacgcgagtaattgaaaacaccagctagacagtcattacatcagccaaatggggtccagcgttcggcttttgctattactcaccgtgatctcgcccatacaagtcaagggtgttgccgaatattgtttttcccttggctatgggagcgatgatctccacaggggttccatcctttaatcgaattcttttggtgaagaaggacaggatgtggtaatccttgttggctctgtggagccagtagagcagggcacttagggccagaatcagccacaagataatcattttggcacaaccgcgttgacggaactctcgtttcacactgattgcacctatcgcagatttctatataaacagctcatactatcagccggttttgtagcaaaaattacacctaaaagctgcttgaactgattagattgcacggtggcgttcccgctgttggcgttcgactagctacgatttgtggttgaattcatctaacaaaaacaatgaatgacttgctagtttgtttgaatgaaagcttgtttcatttgaatgtgggataaccggttttattgttaacaatattcgtccaatgtatggctccaagctacgacgattagcactggagagtcagggttaattagtcatctaatatcaacaacgcacttaaatcaatttagcacttagtaagcatgaataaggaatatcctaaaatcgataaacactaaacgcaattccgcctcacaagcttgacttttattttatttttgaagcgcaaggttatgcccacttggaagacaatggacttgggatcgataacaggcagaatcttgaaatgcttgaggatgaccaccatcagggtcttcatctcctgcatggcgtacttctggcctttgtggttaaaagagatagataatacacatatgtatgagaaccgtatattttgaagacttgtactcttacctatgcagttcctttgtccagcactgaagggaatgtaggcgtaaggatgccttttcaggcagttctgaggtaggaatcgctctgggcggaattcttcgggcgattcccaatacttgggattgcgatggatgtcaaagacgtgtatattaatctgagagcgcttcggcaggattaggccattctctagttccgtttcctggagtgtctgacgacccatgatgggaatcgaaggatacaggcgcatggtttcctttataaagtagcccagataatttagtttacttagttgacttaggttcaggttgctcaggtcgtctagaacggtacgaagaataaaatttatgattctcacgattacgattgcagcgaactgatttacccagaatgtgctcctggatctcttggtagcacagttcctgttcagcggcatatagagacatattcattaggccaaagaccagaccaatggatgtggtatcgtaaccttcagccatcagcgtgtccacctcctcagaaatcccaatatcgtcgattagtccatccttttcggcgcaaatcaaggtgtccagcatggcgaagcgtttctttctaatcacgcatctggttttcgagagaggaagtttattaatgtgaataagtaatttcaaaataagctcacatatcatcgtcagccgtttgagtggctcttctattttccagctcctcttcaagtagtactctgcgttttgcgattatctctctggaaaattcgtgtaccacttttagagctgcgttgtacttgtgtcccgtgaacatgttgtatacacaatcgtcccaatagagcgggtttactatgcgcctggtaagtccttcgtcgattatgtgaaagttcgccctgtagcgatcgcccttctctgccatttcatccagtttgattcccatggcagtttctatgtaagaaatcactgattgttaaagagccactataaacattaaatctttaggtaccacaaatgctatttagggtaaatcgggatatgcggtccttcaaagaaaccacaacttcattttgtccttggaactgacttacgaacttcaagctctccgctctgaaaaaagaaaatttataaaagtttaattgattcattcataagtatgtaagcctgttcatacaataaggaaaataacacaaatgtaagacaaagatgactgcttatccaaagtccataatattgtaaaataaaaattgttacgaaaggcacttacataaagatttcttggaactggttcaatatatccaaatggaatgtcctagtgagcatactgcgtcgcgtgtgccatttcttttctgcaataaagaattttagatccagcattccatttttcagatttcgtttctcacctgtcgctgttagaacgccagttcttaggaaagggtgaagaaaattatatattacacccttcgttatcagattaggatgattcaatatgttcgctgcattatgcgcatctataacattgaagttggaaaaccccatggagtactgcagataactgtctccgctgttcttcgccaactggcgtaagtgagtaaatacctggtctacttatgcgaatagaccaaggggaaaagaagtcttataaagataagaagcccgatgtcaatgttcaccttctacgaaccagtgtcttttcctaagagatcgaagcagttggcgaacacagttcggcccttgatcatgggcactaagctgtccaatggtttgccatccttggtttgaacccttcgggcgaaaaaggccaggatattgtagtctttgtttaccttatagatccagtggatgaccacaagtatggccaccgaaatccacagaagacaaatcatcatgtgggcgaactggatcggtgggcttcgctctcagcactgttttggtcttgtttttttagttccccgctctcgatccacgcgagctttttactatcagcaacgcagagaaccggcacagaattgattagatttggatctattttataaagttagtataaatagtgtacccatgtatgaatatattttttttttttgtgtgctggtttcttcgctccgctggtcgatatttaatctcacgttcacccaataagcttttcattggtgtctaattttaatcgatacactagaatgttcacatttatttattaaagctcaatgtgctttgcaataatctttagtagtgaataatttatctctaaatcaaacacatttctcacaaccgataattgggcttataaattcaaaatctgtaatttcccagctaatttccatcgagatgcctaacaaatttacttcaaactcccaccagctgagtaacaggaatctaatagtcgaggaactgactatatttatttacggtacaaaacgtaaatcttgaattgaagtcaaatgatcattaaagtcgttttggtcgacagcgtgctaaagtcatttgcagtagtaagaaaacccgtataaaatatttttttttgcctttaatgggccatttaataactcgaaagcagagcttgtgaaaaatgccaaaaacatcatcggagtactttaatgaaatgatacccaatccacattgaatatacaagatctgaggctattttcatgaactgttcaagaccacagctatgagataattattaacttaataaacttaacttatataccataaaatgttatgtttgttagcttaactgaataaacatgaatgcagcaaaaagttctcattgcatgattgcattgcaattttactttataaaacatccagctaaaactctcgctttaggtaacattaaacttttgttaaaagtatttcatatagatggcatatttaaaaagttaacttgtatctttcaccttaatcaactgag

SEQ ID NO: 2855 - DNA, 1585 bp, DROSOPHILA
cccaccgatccagttcgcccacatgatgatttgtcttctgtggatttcggtggccatacttgtggtcatccactggatctataaggtaaacaaagactacaatatcctggcctttttcgcccgaagggttcaaaccaaggatggcaaaccattggacagcttagtgcccatgatcaagggccgaactgtgttcgccaactgcttcgatctcttaggaaaagacactgaccaggtatttactcacttacgccagttggcgaagaacagcggagacagttatctgcagtactccatggggttttccaacttcaatgttatagatgcgcataatgcagcgaacatattgaatcatcctaatctgataacgaagggtgtaatatataattttcttcaccctttcctaagaactggcgttctaacagcgacagaaaagaaatggcacacgcgacgcagtatgctcactaggacattccatttggatatattgaaccagttccaagaaatctttatagcggagagcttgaagttcgtaagtcagttccaaggacaaaatgaagttgtggtttctttgaaggaccgcatatcccgatttaccctaaatagcatttgtgaaactgccatgggaatcaaactggatgaaatggcagagaagggcgatcgctacagggcgaactttcacataatcgacgaaggacttaccaggcgcatagtaaacccgctctattgggacgattgtgtatacaacatgttcacgggacacaagtacaacgcagctctaaaagtggtacacgaattttccagagagataatcgcaaaacgcagagtactacttgaagaggagctggaaaatagaagagccactcaaacggctgacgatgatatatgcgtgattagaaagaaacgcttcgccatgctggacaccttgatttgcgccgaaaaggatggactaatcgacgatattgggatttctgaggaggtggacacgctgatggctgaaggttacgataccacatccattggtctggtctttggcctaatgaatatgtctctatatgccgctgaacaggaactgtgctaccaagagatccaggagcacattctggacgacctgagcaacctgaacctaagtcaactaagtaaactaaattatctgggctactttataaaggaaaccatgcgcctgtatccttcgattcccatcatgggtcgtcagacactccaggaaacggaactagagaatggcctaatcctgccgaagcgctctcagattaatatacacgtctttgacatccatcgcaatcccaagtattgggaatcgcccgaagaattccgcccagagcgattcctacctcagaactgcctgaaaaggcatccttacgcctacattcccttcagtgctggacaaaggaactgcataggccagaagtacgccatgcaggagatgaagaccctgatggtggtcatcctcaagcatttcaagattctgcctgttatcgatcccaagtccattgtcttccaagtgggcataaccttgcgcttcaaaaataaaataaaagtcaagcttgtgaggcggaattgcgtttag

SEQ ID NO: 2856 - protein, 520 aa, DROSOPHILA
MMICLLWISVAILVVIHWIYKVNKDYNILAFFARRVQTKDGKPLDSLVPMIKGRTVFANCFDLLGKDTDQVFTHLRQLAKNSGDSYLQYSMGFSNFNVIDAHNAANILNHPNLITKGVIYNFLHPFLRTGVLTATEKKWHTRRSMLTRTFHLDILNQFQEIFIAESLKFVSQFQGQNEVVVSLKDRISRFTLNSICETAMGIKLDEMAEKGDRYRANFHIIDEGLTRRIVNPLYWDDCVYNMFTGHKYNAALKVVHEFSREIIAKRRVLLEEELENRRATQTADDDICVIRKKRFAMLDTLICAEKDGLIDDIGISEEVDTLMAEGYDTTSIGLVFGLMNMSLYAAEQELCYQEIQEHILDDLSNLNLSQLSKLNYLGYFIKETMRLYPSIPIMGRQTLQETELENGLILPKRSQINIHVFDIHRNPKYWESPEEFRPERFLPQNCLKRHPYAYIPFSAGQRNCIGQKYAMQEMKTLMVVILKHFKILPVIDPKSIVFQVGITLRFKNKIKVKLVRRNCV

SEQ ID NO: 2857 - DNA, 2552 bp, DROSOPHILA
gctgtatcgaacacatccttgactttgtcctgcgaacgaaataatatggttattaatcactgcttaattaaatcaataaagccatgcaaataaagttctctgctacattttttgctccactaattatttccattgttgaacaggatgtgtggaaaataaaatacttatcgctaaattaactaactgtttgtacgtttgtttatttagaaactacctctgctattacttatttgctaattattagttaatgacagttttaatataacatttatttaattgctcagctagttacgacagctcttgcatatttctgtttcggttcctttaaagatcggcctattttcctgacgtttttcaacgaagatttgaaacagttcttgccgccaacggctttgcaacttaatcgcggcttgttatatatatatatataatatatatatgtgtgctgtcttattttgcagcaactagcgaagcacttggcacaacaaattgtcaccatcatcgtcgacatcatcatcatcatcatcatcatcgttatcgccacactcatctggtgggtggtggtggcaagtgctttataatttgttgcaatcgcttcatcttcgttgtcgccttcttttgtgaattcttccccatttctccccacggtgggcggtttgttaacagagagggcgtggcaaaagctgttaccttcggggaaatccacgcagagtgcaatgcacggctgacaggagccgactgcattcagtcggaagtgttggggcaaacaaggggattcccccgaccttctgcgtctctttctccactttaacaaccgcacaattatgattattgtgtgtctgtgcgtttgtgccgtgtgacaaggcgactcaaaaggatgaaaaccgaccaggaccaggacgaactgcctcccgcaggaggacacctccttttttgccggcggaatttagccaggcggtgtatttttttttccttttgccaggaggcttctcccgctggattatcctttgtagtcattagggtatgctccctaatggagttacgtttaaataatattccttagttataaaattatcagctgttggctactataaaagttaaaaagatattaaatggaattttaaaccctttattaattctttcctccaacaaggcctcctatttactactgagtatctattattccatacaaaactttccccaaaagagtgctacataacttttttttttcaagtgtttacacaactcaaccgcagtgaagtcagagtcgcggagcaatgacttgtctgccttttgcctttaattaatatgacgtactcttttcattccacattttatcatatatttgtttttttatgatacgattttccgcgttttcttttggctgcttactaactaaccaaccaactcacctgtgtggctgacgaagtctcaatgtattttgcgccaattgttgttgccaaatcccaggcgtctgcatatgaaattgcttcctcgccatttgtctgcaaaaagataaaaagggatgcggaaaaagaaaatcaagttagctcccggcaagatgaaatcaaatcagaatttcataaatatttgaatcgcagccagataaataatgattcagtcagcctcgggcagcacaagtacatattaataaatccatgttcataacgaagaattctcatcgactcacctgcagtttgttgaggacattgggactggtgcgaagatcggcctgggtgccaaccaaaatcagtgcggccttggtcttggcgaatttcggtgcccatttggttttgatggcccgaaatgtttccggttttaccaccgaaaagcagagcaggaaaacatcgctatccggatagcaaagctcccttagcggatccaaggtgtcctggccagcggtatcacaaatggtcaaatgcaccggactctcgttaacgttgacatcggctgtaataatacacaatgtactcgtagttatacaaatgctaaatgctttgctttcacacattgtatgcaatattatcccatttcgtttgaagttacaacaaaagaatcaatcaattgatttgtgtgtgcgtggtgcgtgtggattcactttggcctgatttcgttgcaatttaattgcaaaatatgtaaattactctcactctttggcctttcacttctcgcactttgtgattgcattttgctgtcggaatttaatttaattttatttaaaatgctttacccaatgcttttgttgtctcctccacgcaagtgcaaatttttggcatagcacatggcacactcaaacacccactcacccacacacacacacgcataccacagcagtggacacacacagtgacacgacacaggtagcaccactttgactcacagaggtattttaaataaaaaaaaaaaaaaaaagaaagcacacacagacggtactgggaaagttgtgcatgcctgcaaatttggcaattcattcagttctccattcgcattttcttataataaatggaactagccgttttcaagtttcaagttgagaattttcttgggaatat

SEQ ID NO: 2858 - DNA, 420 bp, DROSOPHILA
atgcaatcacaaagtgcgagaagtgaaaggccaaagaccgatgtcaacgttaacgagagtccggtgcatttgaccatttgtgataccgctggccaggacaccttggatccgctaagggagctttgctatccggatagcgatgttttcctgctctgcttttcggtggtaaaaccggaaacatttcgggccatcaaaaccaaatgggcaccgaaattcgccaagaccaaggccgcactgattttggttggcacccaggccgatcttcgcaccagtcccaatgtcctcaacaaactgcagacaaatggcgaggaagcaatttcatatgcagacgcctgggatttggcaacaacaattggcgcaaaatacattgagacttcgtcagccacacagggagcataccctaatgactacaaaggataa

SEQ ID NO: 2859 - protein, 139 aa, DROSOPHILA
MQSQSARSERPKTDVNVNESPVHLTICDTAGQDTLDPLRELCYPDSDVFLLCFSVVKPETFRAIKTKWAPKFAKTKAALILVGTQADLRTSPNVLNKLQTNGEEAISYADAWDLATTIGAKYIETSSATQGAYPNDYKG

SEQ ID NO: 2860 - DNA, 2833 bp, DROSOPHILA
catcctgcaggaaaacattttttcgccagcggttcgcatttatttatttccatttttttaacacatattaagccgcaaaaatatggcctgtcctttccacttccttttttttttttttttttttttttgggtggtagtccagaatttgcaaaagacgcaaaaagtgctggaaagatacacttaaaaaaaaatgaagtgaaaaactcatttttcatctacatagttttccgagtaaaatgttttatctattttgataccatactgttggcatttcaattgaaagttaggtttaacaaattaatgtaatattaatcatagtcgcaatttcgctccgtgtacaacgagattggcaaatgggaactgggaatattctagctggtcgtctaattcagtcgatagccattcattggaaactcttgattgatgctctggccttgtctgcagttcgttgataagcggcaaagactatgcgaatcttaaccccacacaggccctgtccaccatccaacccctctgaaatgtaaccaggctgatttttacaattgcttgcgattcaatttttcactttacatatttcatggattagacgtcttcaacggtgggtatttctcaattttttttttttgcgaagggatggggggcgtatgtggtggcgatgtacatacatatatggaaactagcataaatggaaatttgtttgccgggggttaaaccaatgggatagcctttgaagatggcctatttatatggttttcaccttgctttttcaaattgtttgtaataaatgcatattgttgtacacattcgattcttttaaaatgtatcaggatagaaatattaagaccacatgattattttcggttaatttatttagtttttttttttaccgaatccattgttttaatggtatatatacacgctcactttgaaaattgagttgacgagttgacgagaaatatgaagaagtatctacgaaagtttgaagtacaggctacctaagctattgtgcgtgctttcgacggcgggcatcttcgagtttcttgagatacctagcagccatgcttagaatcgagggttcctccacatcagagaagttatagtaatcgtcctcatccagcttattgcaatccgtgctaagtggtggtgaaggtgtttgcatcggtgtgttgttgtggttgctgtcgccgtacgagggagtacttttcacctggctctcgcgatgtatgggcattacagtgattttctgcgccttggtcctagaccttttagtcaactgatcgtcggaggcgaaggtcacatgctctttggtgggattttgcctcttgcttcggccacgtttgagattggaaacttttagggaactaattgatgtggctggagcagcataccttgctcccttgatttccctattatccaaatcccttttccttccaactgagctactgcgccccgtcaacgatcccttggtcaagtgatggtccagaattttgctcacccgctcctcaaccattcgattaactgtatcattcagctgctccatcttctcgtccacaacctcgttgaccgccatcctaatggcctcatatatttcattcatgtacttcgatcgtgcattttccgactgtgagcgaggcctcagcttgtccagcacatcctcggtgatcagtgcgaatcgcagctttgttgccttcgacatgtttagcagaaaagtaaagcacaatggagattttgttgactttaaattttgttcgtttctagaaaaaagacgaaaaacgaaggtatataaaattgttactgaactactctgtgactctgttcgctctgaattttggcattaaatcaaactgaatgaatgcgtcggttaaaatcaaggactactgtttaatatattttaacatagctgcgatttgatttggagtaggccctgagtgctttattgtttggctttcgtttatttgtttgccaagttgacatgtgacaggtcgaactcattgttgagtcgaaaaaacaatggacgagtgatttcaattaggcgagttgaataagtcagagtttctgaccgtgtgacatttccacttcctcgtttcttttttattcggctttcggcgagtccttgcgctgacatttcagaccctttgcacttccttttgtgggcacttcaggatgcggatcttaacattgctatccctcgaaccgcgaggaagccagatgtcaggcccggaatgaaaaatgataatttcctgctggttacctggccgggattaatgcgatttacccgaaggggttacgcgatccgaagatgtcccaataacatgtcccatttccatgtcgcgttcccaggtaaaaaaaaaaaagtactcctttcgccgcctcggagggccgaaccaaccccttttatttcgtcgggggtagggaagcgcctatttaaccccttttgctagcccagcggaataggcaaatccgcgagtcattcgcattcacatgccgatcggctgccgcgaagatcggatggacgcgttatcgctcaacgagctgcaattatcgcccgacactcaacgctatcggtgctcctcgatcggatttgcgcttttcgaagtcctcgatcggacggaccgatcaagtcaagtggtcccgccgaagtgccatcaattagccaattcaccattgttccccgatctttgatccattcgtgatcacttcgttgaagatcggagataagtttagcttaaggggcttaccagttgtagttgtgaataaattggcgttccaatatgtattcttagagtttcgacgctttttaatcatgtggtttactaatttactaaaataatgt

SEQ ID NO: 2861 - DNA, 833 bp, DROSOPHILA
gccaaaattcagagcgaacagagtcacagagtagttcagtaacaattttatataccttcgtttttcgtcttttttctagaaacgaacaaaatttaaagtcaacaaaatctccattgtgctttacttttctgctaaacatgtcgaaggcaacaaagctgcgattcgcactgatcaccgaggatgtgctggacaagctgaggcctcgctcacagtcggaaaatgcacgatcgaagtacatgaatgaaatatatgaggccattaggatggcggtcaacgaggttgtggacgagaagatggagcagctgaatgatacagttaatcgaatggttgaggagcgggtgagcaaaattctggaccatcacttgaccaagggatcgttgacggggcgcagtagctcagttggaaggaaaagggatttggataatagggaaatcaagggagcaaggtatgctgctccagccacatcaattagttccctaaaagtttccaatctcaaacgtggccgaagcaagaggcaaaatcccaccaaagagcatgtgaccttcgcctccgacgatcagttgactaaaaggtctaggaccaaggcgcagaaaatcactgtaatgcccatacatcgcgagagccaggtgaaaagtactccctcgtacggcgacagcaaccacaacaacacaccgatgcaaacaccttcaccaccacttagcacggattgcaataagctggatgaggacgattactataacttctctgatgtggaggaaccctcgattctaagcatggctgctaggtatctcaagaaactcgaagatgcccgccgtcgaaagcacgcacaatag

SEQ ID NO: 2862 - protein, 231 aa, DROSOPHILA
MSKATKLRFALITEDVLDKLRPRSQSENARSKYMNEIYEAIRMAVNEVVDEKMEQLNDTVNRMVEERVSKILDHHLTKGSLTGRSSSVGRKRDLDNREIKGARYAAPATSISSLKVSNLKRGRSKRQNPTKEHVTFASDDQLTKRSRTKAQKITVMPIHRESQVKSTPSYGDSNHNNTPMQTPSPPLSTDCNKLDEDDYYNFSDVEEPSILSMAARYLKKLEDARRRKHAQ

SEQ ID NO: 2863 - DNA, 5153 bp, DROSOPHILA
catgtagtccattaaggcgtccaagtcgaaaggaccaaacctggcaaaaaaagctttttaatactttattcaaaatcaacattgtttaacatgcttactctggatcttctgcattttcgctgattacgctaaatccgttcttcccattcgccaggtactccatgacgaccacgcggtacttgtgctccaaatcgagtggaatatacctgggcaccaggcacttggagcatcttactcgcacactgaatactcgctgatcggcgttcaaatcgtaacggatacggagaccggaaacctggaggaatcgggaggaacgcggcgtggccgaactggcattcatgggcgccaccacatgctccagcagctccacaatgtgcttaccacgcagactgagggtcaccagtctattctgccatgggcacatggcaaacaattgcttgtaggtgatgtctgtagtgatatacttagtcttattgttcgattaaggtatacatgttgttttcaggactcactgccagctggaataggcactcgaaaagttcccgttgatgtcaaggcaatggtcacgttactccaactctcttcagacgacgatgaagcatccttgacaaactgaagattctcattggactaggtcagttgcaagtgggttgaagccaccactacttaccgcatgaagcatagcatcggtgaagaagttacccagattgcattccccactgctgcactgactctgctggagattcacgcgactctggcccactgtccgctcggcaatgggtttcatctcgagttgccaaggcaccatggcttgtagaacgatatcatctttgggagattttaaatggtatatgattatattatgcaaccattgcctccaaacatattccccagcatcaataatcttccagagaaaagatatgtttgtgtactttccctgataaatttattgtggaaaatgcaattattgcacattatggatataatacatatgtatgtataatcagttgagcactgtgatgcgtccctcgaggccctggtaaatgggattgatgtgattgctgtacgagattagggcatccaagtccgtgactccccacctgaaatcagtaaataatcaaatggtattacaacatgggacacaagatgagctgcctgtatgtacgtactggaggtcagtgccctcggcgagcatggtgtagccatcgccaccagcctgcaggaagttgggcgatgtgaggcgatagagcttgtcggataccagaggctcgtacttgggcacctcgcagtccgcacaacgaatcgttacggatatgacacgcgatcccaccggcttcgtgtagtcgtacttcgcccggatgcccgagaactgcagattgatgtacgatccggtcaccccgttctcgaggtccactttgctcagggcccactccatggcctccactatcttgctgcccggcagattgtaggaaaccagcgtgttctcgaagggcgacatgctgactatatgggcgtacgtaagatctgagggatacattcaattgaagatttttagaggagtttttgctataacgcggtcaaaaacgatcacacaaccaagagaatgacttttttgtgcagcctatgatccacataaacgatcccgaaattcgtatatttatttctggaaaattttttttttcgaattttccgatttttataatcttaatttttttgcgaaaaatggacaaaaatttacattttaaactgtgaatgccattcgaaagggaatttggtgacgagttcaacgaagtatgacattccgtatttggattaataacttcattgctatgaacaaaaaaggattagtttttgttgcaaaattggggattcatttagccgaaattatgattttttcgaagaatttaaaatcctataacttggccaaaaatggtcacacattcaaaaaaattactgttttataaaacttatgatccaaataaacgattcctgtcaacgttttcataattaaaaaaaattttttttttttcgaattttctgattttttataatcataattttttgcgaaaaatggacaaaaaattacattttaaactgtgaatgccattcgaaagggaattttgtgacgaattcagcgaggtatgacattccatatttggacaaataactccattgatatgggttaaaaactaatcaattttggcatacaatcggcattctattgtttgaagaattttgaaattttttaagagcatttctactggaaattggccgaaaatgataacatagcaaatataattttttgtgcagtttttgtcttaaattacccttcggtatacctatatttttatttataataatcaatttttttgttttgtgttttctgttaacgttttttcgaaaaaagcaagagaaaacttcaaatttgaatgctacttgattgggaatttaataacgagctcaacgagatgttccactcatatttgcatcattttgatccaaattatacttaataccaaatctgcaagtcgaattttctattaaattccaatacttactgcctctgttgagcggcacacggagtcctccgatgttcatgagtccggcggatacattcgtccaaaccttctcttcatatgaagccattccgacgaactgcaagcgaaaagattgcatatacttgatccatagaaggtttccccaacttacagaatgaaccatggcgtcgcaaaagaagttgcccaagttgcactctccggcggcacaatcgtccttggtgagatccaccttggtgttgccgaccaccaccttgcccgtctcgtcgatcacctccttccacggctgcatggccaccagcacttcctcatctacggggagcacaatgcacaaaaacacatcagatatacaatccttctgcaatcgaggactttcacatggcacacggcaagcaagagcaactgatttttcagagtgtaaaattaactagttgcacgaggaacttataacttatagttacacagaaaacaaatcacttgtagttcacacaaaataacaaaattaagcactagtaaaaatcaagcactgaaataataacataaaaacaagcaaataaggaaataatcgagggattagttcttatagataaacaacttgggaattataaggccgttcgagcagtagaggtacagttacgaattgatcttaagaagctaagataccctactgactcaatcgtactgaccttctggcacggattggtccatgtagagcggatcaccctcgtagtccagcacatcgccgttgtcatcgaaatagacgatcaggttgcccacgtagcgggcataggccgatgcctggacaatgagcacgcggtggccagagctgtggataacctcggtgggataatcaccggatggcgtgtgtggcccaggcggatcacccgtgtagaggaaggtgtgcgaatgggagccaacgatgacgtcgatccaatcgccggcattcgcagcgatctgctgatccacatcgtagccgcagtgggagacgacaatgatgatgttggcaccctgggccttcagcagctgcgcctcctcgcgaatggtgtcgctctcgttgcgaaagatcaccttaccggtattggccagatcctgcagcacaataatatccattcaattcatatggcatctggatggtggaatcacccaaactcacgtaggttgtctccaggataacaccaatcacaccaatcttgcggcccgatcgctcgattatcatcgacttgttgtacttgccctccatggtgggctcgtgggcgcagtccatgttggccaccagcatattggtgtccaccgtctctaggaatggcaccacgccctccacaccgtgatcgaactcgtgattgccgagggtctaaaaagggttggtcaattgtggatatcaagcaacgcatatggataccatcacttaccatcacatcggcgggcagaaggttcagcagctgctgcgtaacgttccatcgaccgatgttgtaccacaacgtgccctgaaaactgtcgccggcattgatgtagatgggattgagctccgcttgctcctgaagcagacgcttcacggtgtaaacggtgcgcggatagccaccgatgcactcctcgccctcgtcgcaggtgccaccggaggtgtccgtggcctcgaacctgcaaatggaacggatcgcaatcgaagcggggattagctctcgagatggctagtgctcgtcgaattgccatggcccatcgtccgtatcgttatcgggatcgggaaatcgtcaaatcggcacacgaaacgaaatcagtacgtggacctgatagtgggccatggtttacggccatgtgatggccataaaacgatccaatccgatcgtgcctcacctggcgtgcaaatcatttatgtggattatggccacgggaaagccctccttgtcggcagcctccgcggatgagcacatgaccgccatcaccgccaccaccactaccagcgaccatgtcagtcgattgcaagcggttgccattttactccaacgcaccagaatctgcacctgcacttcacctcaccagaaaaaaaaaaaaacaattaaattcaagtgtaaacacatccagcgcgatggctgtcgataaggcaactgaatggccaaaatagcgaaatctgaatgggcctcgcgcacccgatccgatctggactggattgtgggtacccttcctccgctgataagccaagtatttgcgttatgcataacctgtacatggcgaaaaactgggtcatattgctccgtaccgtaaacagtgcaaaaacggatatttagccatatttaacacaaataaactacttattcgaaatgttcttatgttaccatacaacaaatatggaattttaaacatttatttatataagttaataattacagttatcgatttgattttgaagatcgcaagcgaccgtttattgcaatttatcatttgaaactaaatctagcgtacaaaatgtttccctaagtccctagcaatcaagtgaagtcgtcggcagcggcgcagcaggcgtcggccgcggcgcagcgcagaagtgtcgatgtcgcgcttaaccgttcgttggcgttgatggcagcggagactatgtggaaccac

SEQ ID NO: 2864 - DNA, 1500 bp, DROSOPHILA
gagggcgaggagtgcatcggtggctatccgcgcaccgtttacaccgtgaagcgtctgcttcaggagcaagcggagctcaatcccatctacatcaatgccggcgacagttttcagggcacgttgtggtacaacatcggtcgatggaacgttacgcagcagctgctgaaccttctgcccgccgatgtgatgaccctcggcaatcacgagttcgatcacggtgtggagggcgtggtgccattcctagagacggtggacaccaatatgctggtggccaacatggactgcgcccacgagcccaccatggagggcaagtacaacaagtcgatgataatcgagcgatcgggccgcaagattggtgtgattggtgttatcctggagacaacctacgatctggccaataccggtaaggtgatctttcgcaacgagagcgacaccattcgcgaggaggcgcagctgctgaaggcccagggtgccaacatcatcattgtcgtctcccactgcggctacgatgtggatcagcagatcgctgcgaatgccggcgattggatcgacgtcatcgttggctcccattcgcacaccttcctctacacgggtgatccgcctgggccacacacgccatccggtgattatcccaccgaggttatccacagctctggccaccgcgtgctcattgtccaggcatcggcctatgcccgctacgtgggcaacctgatcgtctatttcgatgacaacggcgatgtgctggactacgagggtgatccgctctacatggaccaatccgtgccagaagatgaggaagtgctggtggccatgcagccgtggaaggaggtgatcgacgagacgggcaaggtggtggtcggcaacaccaaggtggatctcaccaaggacgattgtgccgccggagagtgcaacttgggcaacttcttttgcgacgccatgttgcagttcgtcggaatggcttcatatgaagagaaggtttggacgaatgtatccgccggactcatgaacatcggaggactccgtgtgccgctcaacagaggcagtaatccctcagatcttacgtacgcccatatagtcagcatgtcgcccttcgagaacacgctggtttcctacaatctgccgggcagcaagatagtggaggccatggagtgggccctgagcaaagtggacctcgagaacggggtgaccggatcgtacatcaatctgcagttctcgggcatccgggcgaagtacgactacacgaagccggtgggatcgcgtgtcatatccgtaacgattcgttgtgcggactgcgaggtgcccaagtacgagcctctggtatccgacaagctctatcgcctcacatcgcccaacttcctgcaggctggtggcgatggctacaccatgctcgccgagggcactgacctccagtacgacttggatgccctaatctcgtacagcaatcacatcaatcccatttaccagggcctcgagggacgcatcacagtgctcaactgatta

SEQ ID NO: 2865 - protein, 436 aa, DROSOPHILA
MTLGNHEFDHGVEGVVPFLETVDTNMLVANMDCAHEPTMEGKYNKSMIIERSGRKIGVIGVILETTYDLANTGKVIFRNESDTIREEAQLLKAQGANIIIVVSHCGYDVDQQIAANAGDWIDVIVGSHSHTFLYTGDPPGPHTPSGDYPTEVIHSSGHRVLIVQASAYARYVGNLIVYFDDNGDVLDYEGDPLYMDQSVPEDEEVLVAMQPWKEVIDETGKVVVGNTKVDLTKDDCAAGECNLGNFFCDAMLQFVGMASYEEKVWTNVSAGLMNIGGLRVPLNRGSNPSDLTYAHIVSMSPFENTLVSYNLPGSKIVEAMEWALSKVDLENGVTGSYINLQFSGIRAKYDYTKPVGSRVISVTIRCADCEVPKYEPLVSDKLYRLTSPNFLQAGGDGYTMLAEGTDLQYDLDALISYSNHINPIYQGLEGRITVLN

SEQ ID NO: 2866 - DNA, 2824 bp, DROSOPHILA
agtagagttatagcgaaacaccaaagtgagatagtttttggacataggctcttataggcacctgcatatgtactactatacatatatgtacatatgtcgtaggcagttcgtccgacaattatgccaattacgtattgtattttgtattgcctcaccagcagaatttaggaaaattaaccagagtgctatggggtgcacccaagttccctcccagctctaacaataatcagtatcatactatagtgtactcaaacgttatgcttgcatgagaaccaccttacaggagtacaacaatcgggattcgcctagatagatatggtggcccatcctatggcttctaattcaactgttattgaaaattcaaaaacgaaatattactcaagagagtcccacgttgtcgaggagaatccaagttatgccaagtgttcctttctaaaaagtttatatatagacgaatacttttcgtaatatttgaatatttgtaggtaattcttaaagccaaccacaagtacttaactagtaatctcattgaatcttaatatttcccccaactttcccttctaatattgctattgctttagcgttaaaaaatcgaaattcgaaaactaaaccaaaccgaaaccgaaagaaaactaataaaatattgactaaaactgatttgttgctaaattaatgaaattgtaccttcgaaaggaattttgcgatcgattctttctagcgtagcaccaattccttatagttgttaaatcggaaacgagattaagaatgatcgtcgtggcacaaaatgcgaaattaagttaagtttttccaaaattcgagaatccagctccttgttctttttgtatatataagtacatacaaggtaacaaatttaattggtaactaataaaaggaaaaaacaaaacatgatcttttttttttaaattagtctaaaactgtgttgcgtttcaaaagtttccttaattctataaaaaatcacaatctaagggactctactgagtcactgtattataagtttgatatgctttgagtttggagtgtacttctctttgtattcatcgaacatcctcgccagcgcgtcgatcacctgcccatggatcttgtccacatattcgggatcgggagtctcgcatctttccacatcgatgggggaaccaactgaagtatagagagtggtattggggttataaactataagtaaaatgaagagtgttatgcactcaccaacttggacaatacgtcgtcgatgtgggagaatgccatagttgtagttgaagataccgcgacccttgggaaggagcggtgaaatgcctgtgaatttcttgaccacattctggaagcgacggagcgaggagtccggaggattagccacctgatcaaatatgtccacctcgccaaaggacaacgagggcacaatcgacgatctagcacaacaagagaatgtatcaattaatccttacaaattatccgctccaaactaacccggttcgaacagccattttgacgaaaccctttctatccttgagggtcaaaatgtactgtcccggatgcgaatccatggcttccttggcgccaccaacaagtacggccaccgcattggatgtgaaaccatcccgattatccttgtgcattggatcatttgacttgctgagtaaataggacagggattccttggaaaccgataccatgccccaccagcgcaatatgtcacgcaggaaaggcgtcttgaagtgatgatccagggtggcgatcttgggtcgaacgtgcgggtaaagggatagccaattgtcgatgtccaggctcatgttaatgcaagttccagtactaggagtgcaatcaacatgtgataagatataaaaagctgttgatctatagatacccaagtattccgtgtggaaagcttgctacgatatagttcctgttgggaggcagctcggcggtttttacaagttcgacggggaagtagtttcgatatctccaattgctgcggtagaataaccaactgggtaatggggaaagttagttgggctattatctcttcagcaatcgggatacttcagtttcagcacttacccattaccttccataatgccgtaatttcttttataatccaaataaattttcacaaaatagataagaagcagactacgcacaaacatttcgccgtagtacttgaaaatatgaaagaaagatacaaattgttagtgctttggtaagtacaatgtaagtagttcttataattataatttaagtggtatgctgacatgaaattcctatccattagttggtaaaactatctcaagctatttcctttaatttcacttctataaattagtcttatggaatatcttacactaaaataattaaccgctttcaacgatctcgattttggtttcaaaaactagccagcttcctcagatcgagatcgaaacattctcagattgcaaatgtttttgctcttatttggatcttccacaattttaaacccgatactgattccgtctataattaacaacattgagatcgttttcgcgtgtgtaataacataataaaaacataagtgtaataactaatttgccctgaaggattaccagcaggatagctactgcgaggcaggacgagatgggcagcgtaaagaaggtataggtgaagaatgacgtaaccagggtctgaagccgccgttccagcggaacccggagaggagcccattcgattgtcatgctcaattagaccgatcttcaacacaagaagcgactatttcgacgagtttccagcgactgagcgatcaagtatcagcacacacaatttccagggtgtaacgtgg

SEQ ID NO: 2867 - DNA, 700 bp, DROSOPHILA
tactggaacttgcattaacatgagcctggacatcgacaattggctatccctttacccgcacgttcgacccaagatcgccaccctggatcatcacttcaagacgcctttcctgcgtgacatattgcgctggtggggcatggtatcggtttccaaggaatccctgtcctatttactcagcaagtcaaatgatccaatgcacaaggataatcgggatggtttcacatccaatgcggtggccgtacttgttggtggcgccaaggaagccatggattcgcatccgggacagtacattttgaccctcaaggatagaaagggtttcgtcaaaatggctgttcgaaccggatcgtcgattgtgccctcgttgtcctttggcgaggtggacatatttgatcaggtggctaatcctccggactcctcgctccgtcgcttccagaatgtggtcaagaaattcacaggcatttcaccgctccttcccaagggtcgcggtatcttcaactacaactatggcattctcccacatcgacgacgtattgtccaagttgttggttcccccatcgatgtggaaagatgcgagactcccgatcccgaatatgtggacaagatccatgggcaggtgatcgacgcgctggcgaggatgttcgatgaatacaaagagaagtacactccaaactcaaagcatatcaaacttataatacagtga

SEQ ID NO: 2868 - protein, 226 aa, DROSOPHILA
MSLDIDNWLSLYPHVRPKIATLDHHFKTPFLRDILRWWGMVSVSKESLSYLLSKSNDPMHKDNRDGFTSNAVAVLVGGAKEAMDSHPGQYILTLKDRKGFVKMAVRTGSSIVPSLSFGEVDIFDQVANPPDSSLRRFQNVVKKFTGISPLLPKGRGIFNYNYGILPHRRRIVQVVGSPIDVERCETPDPEYVDKIHGQVIDALARMFDEYKEKYTPNSKHIKLIIQ

SEQ ID NO: 2869 - DNA, 5034 bp, DROSOPHILA
atcgtaatttaaaacaaacaatacaaaaataattaccaattaagcccattttaaattcacattccgtattgcaaagcacaaaatagccttgtgtccagtggtatccagaaaaccggcccatttaataagcttttaaaaacgttgagggatgtgcaatagttagtttattcgtctctttgggattttagcactgttcgttacactcatcgcccgcgtctgcctttgtccatacggagattttgttgatatttttgcgaatcctgacaaaagccccacaaatctgatcgcagtgatcgcaggcctcgccaatcatgcaaagaagcacgtccagccaagttttgtccagttcggctgtggaccttttatccactttatatgtccaacgacctccgcccttgttcggcggatcctcccacatggggcgaatgcccttcttgaagagcatgtaatcacagccgcggttgagcttggatggcgtatcgatgcggaaatacaggttccagaagtcctcgacggtattgaagctgtcaatctccttcagcatgtcctcccatgatatttcagggtcgtactttacgccccacagggtccatgtgttctgcagccggtgcttgtttgtggcacccaacgatgccagtttgttattatccagagaagtccccattttaaattccgatgactctttggtttgccttaagttttccatttcgcagatactctatgctgaagcccccttttaaaatgcattcgtagaattcgtagaattgtttttaatggacttacaatatttaccgacgaatgtggtcaagcttagagcatttgatcatttaattattgacgttaaagcaatgcactgtcaattaggaaacaatcgtgattactaatggctgcatttatatgtaaaatacatttgacaggcaatcgaaacatatcgatatatcgcgtgatgctatcgtgagaggttggcccagcgctagtattgattgttaaacaaaaaggaattttgcactaacttgtgggccgcagttactgcaaattcgcgccaggatggacatgataaacaagttctactcatccgccgtacagacggtgtccacactgtccggcgttctgcccgggaacaatgtgacgcgggagtacgaggtgctggaacaggtgtgcactgccggagtgggtgagtttacctgcattgctagttgaacatattgtggcttgctgataccgagtaatcccactgccaggtctgatgtggaaggtgtacaatggccacaagaagagcaccaaacaggaagtgtccgtcttcgtgttcgagaaaaagtcgttggagcgctggtcgaaggatgaccgggagaccatgctggaaacactgcgtcgcggggttcaacagctaacaaaaattcgacatcctcacgtgctaaccgtacagcatccactggaggagagtcgggactcgcttgccttcgccacggagccggtttttgcctccctagccaacgtggtcggcgacaacgtccgctccgaaaagaagctctatgatgtagagattcgacacggtctgctgcagctcttcgatggcctgcagttccttcaccaagacgccaagattgtgcaccgcaacattagcgccgagacaatcgtgatcaacaagaaccgcagctggaagctgttcggatttgatttctgcattgccaaccaaccggccaccgatggcacaccccactggccctttcgggagtacaccacatccctgcacgtcctggcacagcccagcttggagtacacagcaccggagctggccttgaacagtgtcaacacaccagacagtgatctgttctcattgggtaggtaccgagttatatcataggaatgaatataatttcgcatgagtcatagccagccaagtatttgatcttgttgataatttacgtataaaagtaaatttttctgcgattattgaaataagtcaacagataaggtattttataaatagctaagcgttttaatacaaggtatctttcatattaagtaaccagatatagaatcgtatttattgagtcttcctttgctgcaggcgttctaattttcaccatttatgccggcaagcccctgaaaatgtttggcagtgattacagcagctttcgtcgctacgcaaatgatctgaaccagcgaaagtatccacccatgaacgcagttcccagcgagctgactgaaagccttaaagcgctgctgcatcccagtgccaacctgcgaccgaagctgcatgagctaaagcagatcgcctactttcaagatgtcggggttaagacacttagctatttggactcgctataccagtgggacaacctgcagaagtcaaagttttataagggtctaccgcagatcattccgacgctaccgcaccgggtcaatttgcattcgattcttccctatctcgtcaaagagttcgtcaactcgccaatgataccgtttgtgctgcccaacgttttgcttattgctgagatgagcagccaacgagagtactgcgaccacatccttccgcacttgaagccgatctttaaacttacggaccccatccagattctgctgatctttatgcagaaaatggatctgctgctcaagctaacgccagcggaagaggtgaagcagagtgttctgccgctactttatcgctctctggaatgcgacatgccacagatccaggacctctgtctagcggtgcttccaacattttccactctgattgactacaacgccatgaagaactccgtgctgccacgaatcaagaaactgtgtctgcagagcagcaatgtgtcggtaaaggttaactgcctgatctccatcggcaagttgttggaaaacttggacaagtggcttgtgctagacgagattttgccattcttgcagcagatccaaagccgcgaacctgctatcattatgggaattattggtaagctttgaaattaacaccaattgtcgttttataactattctccttattttaggcatttataaaatcgcaatgacaaataccaaactgggcataacaaaggacgtgatggcacacaaatgcatcccttatctggtaccattaagtgtggagaacggccttaccattgctcaattcaacacgattataagcctcatcaaggagatgatggggcgggtggaacaggagcagcgggaaaagctgcagcagctgtccaccatacagagagacaataagtaagtgcgaatttctgtgtgcagcagatgcattttattttaattataacttcgttcagacccaaagacgcttccgaaatattggccaacgagctggagaactctactctctccccctacggttccatcaatggtaataagatcaacgatgacatgttctccggattcactgttggacagccgaaagcagccatcggcgctgcaatagcaccggctaaagctagggagcagctcaagtaggattcactcaagatggagacaaagaaatgctccaaaaactcaaaaaaaacgtctgtaatttcagaatatcgcacaataccatatcagctccgccagcagccagacctgacatcctctcctcgatgatgcagagcaacctcactggtctgggtacaattacagtggcagctgctccgccacctacaactacacaaatgccgtcaaacaatggttggcacagtgcgaatccccttgtgatgaaccatcagttggcctctcctcaagccagcaacaacaattccttttcgctggacgacctggatcccttcgctggtggcagaccctctgttggagcccccaaagccaacaacacaaacggtgccaacatgtatacggtgcaacagcctacggttaactacatttatcctactggctacagtctgaacagcatccagcagcatcagcagcagcaactgctgggtaagcccagtcaagcacccacgctccagccgcagacacagccgctcctgccaactgataaccagaacctcaacgcactttcccagcaagacatacttaactttttgaactagacacagccgtagttaataacaattgatagatatccatgttccatacatccgatatacaaagcaactatatttagctgtcggcgtcgatttatgtggcacaaaattctaagcgtcagtaatcattggtattaccatttttgctggcaatatcactcgattacctttttcgattagaacttgtgttgatacattggacgctgacacatatatttatacataaaatctaatctgtgcaagtgtatgagtgtgtcagtcttaatgtgtgcgtgtttgttagtaatgttttaaattatattatgtagacttaaacgcaaggcttttgagcccttgctcgttgccacattccgcaatcgatatcaaatgtgaaacgaaacgaccgcatgtagttaaatataatagtacattagctagacaaaatagccaactaactatgttctgacgtattttttacaaagcatatttaattcactttcacgcatgagttcttattgtaattctacgcaaatccaattactaagacacgaaattgtacagacatatatagttttatttatcttttattttaacgtcatgtatttttgtttattcaaaataaaggtttgttccttgagttttaattttattaataaaatacaaaatattaatgtgatttgatagtttcatggtgcaataaactaattaaaaacaatgcttgacaggttctttaaataaggtggcattcaaataataataaattataatggtaaatatcacattgaatccatagtactgactttactaatccctttaatttccttttacggacttcaatccctcttcgggcaattttactttggcaacatagtgattgaaaggcgatcccagatataagtgacccttaacttccagcacgtgggatatgcccgaagctgatctgtcaaacccatgcagggatctcacaatgtttccattccaatccacacgcaccacagtgctacgcttgggagcgttcctgatgacc

SEQ ID NO: 2870 - DNA, 2555 bp, DROSOPHILA
attttgcactaacttgtgggccgcagttactgcaaattcgcgccaggatggacatgataaacaagttctactcatccgccgtacagacggtgtccacactgtccggcgttctgcccgggaacaatgtgacgcgggagtacgaggtgctggaacaggtgtgcactgccggagtgggtctgatgtggaaggtgtacaatggccacaagaagagcaccaaacaggaagtgtccgtcttcgtgttcgagaaaaagtcgttggagcgctggtcgaaggatgaccgggagaccatgctggaaacactgcgtcgcggggttcaacagctaacaaaaattcgacatcctcacgtgctaaccgtacagcatccactggaggagagtcgggactcgcttgccttcgccacggagccggtttttgcctccctagccaacgtggtcggcgacaacgtccgctccgaaaagaagctctatgatgtagagattcgacacggtctgctgcagctcttcgatggcctgcagttccttcaccaagacgccaagattgtgcaccgcaacattagcgccgagacaatcgtgatcaacaagaaccgcagctggaagctgttcggatttgatttctgcattgccaaccaaccggccaccgatggcacaccccactggccctttcgggagtacaccacatccctgcacgtcctggcacagcccagcttggagtacacagcaccggagctggccttgaacagtgtcaacacaccagacagtgatctgttctcattgggcgttctaattttcaccatttatgccggcaagcccctgaaaatgtttggcagtgattacagcagctttcgtcgctacgcaaatgatctgaaccagcgaaagtatccacccatgaacgcagttcccagcgagctgactgaaagccttaaagcgctgctgcatcccagtgccaacctgcgaccgaagctgcatgagctaaagcagatcgcctactttcaagatgtcggggttaagacacttagctatttggactcgctataccagtgggacaacctgcagaagtcaaagttttataagggtctaccgcagatcattccgacgctaccgcaccgggtcaatttgcattcgattcttccctatctcgtcaaagagttcgtcaactcgccaatgataccgtttgtgctgcccaacgttttgcttattgctgagatgagcagccaacgagagtactgcgaccacatccttccgcacttgaagccgatctttaaacttacggaccccatccagattctgctgatctttatgcagaaaatggatctgctgctcaagctaacgccagcggaagaggtgaagcagagtgttctgccgctactttatcgctctctggaatgcgacatgccacagatccaggacctctgtctagcggtgcttccaacattttccactctgattgactacaacgccatgaagaactccgtgctgccacgaatcaagaaactgtgtctgcagagcagcaatgtgtcggtaaaggttaactgcctgatctccatcggcaagttgttggaaaacttggacaagtggcttgtgctagacgagattttgccattcttgcagcagatccaaagccgcgaacctgctatcattatgggaattattggcatttataaaatcgcaatgacaaataccaaactgggcataacaaaggacgtgatggcacacaaatgcatcccttatctggtaccattaagtgtggagaacggccttaccattgctcaattcaacacgattataagcctcatcaaggagatgatggggcgggtggaacaggagcagcgggaaaagctgcagcagctgtccaccatacagagagacaataaacccaaagacgcttccgaaatattggccaacgagctggagaactctactctctccccctacggttccatcaatggtaataagatcaacgatgacatgttctccggattcactgttggacagccgaaagcagccatcggcgctgcaatagcaccggctaaagctagggagcagctcaaaatatcgcacaataccatatcagctccgccagcagccagacctgacatcctctcctcgatgatgcagagcaacctcactggtctgggtacaattacagtggcagctgctccgccacctacaactacacaaatgccgtcaaacaatggttggcacagtgcgaatccccttgtgatgaaccatcagttggcctctcctcaagccagcaacaacaattccttttcgctggacgacctggatcccttcgctggtggcagaccctctgttggagcccccaaagccaacaacacaaacggtgccaacatgtatacggtgcaacagcctacggttaactacatttatcctactggctacagtctgaacagcatccagcagcatcagcagcagcaactgctgggtaagcccagtcaagcacccacgctccagccgcagacacagccgctcctgccaactgataaccagaacctcaacgcactttcccagcaagacatacttaactttttgaactag

SEQ ID NO: 2871 - protein, 835 aa, DROSOPHILA
MDMINKFYSSAVQTVSTLSGVLPGNNVTREYEVLEQVCTAGVGLMWKVYNGHKKSTKQEVSVFVFEKKSLERWSKDDRETMLETLRRGVQQLTKIRHPHVLTVQHPLEESRDSLAFATEPVFASLANVVGDNVRSEKKLYDVEIRHGLLQLFDGLQFLHQDAKIVHRNISAETIVINKNRSWKLFGFDFCIANQPATDGTPHWPFREYTTSLHVLAQPSLEYTAPELALNSVNTPDSDLFSLGVLIFTIYAGKPLKMFGSDYSSFRRYANDLNQRKYPPMNAVPSELTESLKALLHPSANLRPKLHELKQIAYFQDVGVKTLSYLDSLYQWDNLQKSKFYKGLPQIIPTLPHRVNLHSILPYLVKEFVNSPMIPFVLPNVLLIAEMSSQREYCDHILPHLKPIFKLTDPIQILLIFMQKMDLLLKLTPAEEVKQSVLPLLYRSLECDMPQIQDLCLAVLPTFSTLIDYNAMKNSVLPRIKKLCLQSSNVSVKVNCLISIGKLLENLDKWLVLDEILPFLQQIQSREPAIIMGIIGIYKIAMTNTKLGITKDVMAHKCIPYLVPLSVENGLTIAQFNTIISLIKEMMGRVEQEQREKLQQLSTIQRDNKPKDASEILANELENSTLSPYGSINGNKINDDMFSGFTVGQPKAAIGAAIAPAKAREQLKISHNTISAPPAARPDILSSMMQSNLTGLGTITVAAAPPPTTTQMPSNNGWHSANPLVMNHQLASPQASNNNSFSLDDLDPFAGGRPSVGAPKANNTNGANMYTVQQPTVNYIYPTGYSLNSIQQHQQQQLLGKPSQAPTLQPQTQPLLPTDNQNLNALSQQDILNFLN

SEQ ID NO: 2872 - DNA, 5864 bp, DROSOPHILA
gcaataagttggctcaggagtgcgaggcccaataccgtgccgcgttgcttgagcaaaacaaagccctgaataagagcattgacgactttgaactggcgaccgaaacggtgctgaagacctgcagcatgatcatcaagaaggtggacaagaaaaaggatcgcctgctcatcgcagaccacaaaaagaagctgcagaagcagctactagagtgcaacgagccggcactgctgctgcacctggctgcactgatcttgttcaccacgatcactggtagcattttgcacgcgtccggaaaattcgtttctgccatactgcagcatattcgcggctcactaaacgaggaccagaatgctctgttgcttcggtatcacggtgagtttttgcaaccataatttgcgttttacctaattcttacatacatttcagatttggtcctgcaagttctgcaggccattcccgatagcaatgagtcaaaactggccaacgaacatttgcagacaatgcagaatcaagtggtggagctagctcaaaacttttcacgtgcatcgatttctaaggctgattgatgatgctcctatattccaatctttcttcccatgtcattaaattgcgtctatgtaaattggttctggtctgcaatagattttgcatttgttaaattttcatagtttataaattgtttttattactgctatgcatgaagttacaaaacgatgagccttaaacagagttcctagctttatcactttcgaaggtttgggttgttggaaaaacgatttaaaattgattagtttggaagggctgttctccatttagtttgttaagctcaagcttgaattaaataaatctcttacgaagctacttatatacaatattttctaacagaccgatataagttgtgcatttctttataacgagtatttgattgttaggattgatgtgagcgatgtttgtccctacactttataaactatgtagtctttgaagtatttgcttggctttatcgctggattgcctgcaaaaagggaaatgattgcttttaactctcaaaagtgagtttcattacttacataaagattggattgcttgcatcacagttctctaatgtttgtttaatatatcctataaaaagttccatgttcttgagggtctcgctgttcggtaacaaccagactgtaggcagggtatttacaatgatgtaagctttgtttatggcatcgtttggcgtgcagactcgcatagctaataacaggtaacgattcagaagggctccaatcgccagctcacgcagtagcttatcagccaggatgccctgccagcttaggaaatttcgaaacagctttagaccactgcaaaactgcctctgaaagaatgaggtcttcgcctcttgcactctaaagttcaaacaaaaagcggtaattaagaccatgatggccaatcttttgcaagaataatatacttactgctttggaaaaatgggtataaatacatcattttctagggctaaccgcatgcgttccatgatggattcaaacagtttgttaagctgcttatttgtgccgctcaagggaaactcgcgacctaatcgattgatgaacccaaccaatctcagggtctgtgtggtagataatggatcccagcattctgtgaccagagctaaaaaacattcatttattaccccgcttcgcgtttttttttaatgtgtaaaactcaccagtcaccttgggcagcacaatcttttcgatgagcgccggcaccagattgatatccggatcgattttcagctgctccacggtttcatctgcctgggaggcataaagcatgcaggcctgataccaacgcatattttctatatccgcatacacgtccagcagtggcgaccaaagaacaagttcgtgtcgcaccagcggagccaagacttttggaaggcacaggctaacaaatgcgtcctggtatgacgacatgtcagttttacgccaggcaaaaaacttcattagtattagctcgatcttgctaaagtcgtcggtaacgtcttcaagggcgtccaccgactgtgattctatctgcgccatcgtagtcacactcagttcctgctgttgatcggcaatttcatcgtcgcttgacatgccatccaggtgggacgagagcagatcattgcgctcgcgctcgcatcggcgacgtgtcctccgaccctcccgttccgctgcgcggcgaacttgttcttcataatcaggtgttcggcgggaggcagctgttataggttctaaaagcagaagattgaacatattaatatagtttaataatcgaattattttccctaagacaagactaaaaacaaaattctcatacttgctgattcggcgatttctttggcctgatcacgtacatcctgcctccgtctgtttaccaaataacgttgatttttgccatactgttgcagtgcacgcttctcaagatcgtatattactggcgctttttccgagaggcaatcgacaaggtcattcacatagcactttatttcttggtaaaacttgtactttgcggccgctgtcggtgcattctgctggcactctaactgctggagctttaatgcctttagttctgtactaatcctggccatactagcgctgtgatcagccgaccgctctttaagctcgctaagacgcgattgaatggcagctaggatttcctgaggagttcgcaatgctgtagccttggccttttccttcttggttttgacggatgatcgaactgctgcggctaagttggtgcgctcaagggcatttttagcataggcctgctccagcagagtggacgtggactgtgccgctgttgaatctccgtcgtccatgccggttccgatgcccgacggggcaggcttgatcataaaacgggagagcactgtttcatgctgagaatggaccaactgggctgccgtaacacccttgcggatctgctggttttcccactcgttcatctcgcgatctgaatctccgtcggtggctgcagaggagtgagcaaaggttaacaatagtctaaaaacttcacctgtaattagcctggctctggtcacaaatcggacttggtccctctacatacaatcattttcgacagcataaaattgctcgcgccgctcttcacgctctttgcgtcccgtaatatcgttcatgtccatgcgttcttcatcatccgactgatcaccctcaacatcttcgcagggcagacggttgcttagcttggccggctccttgggctcctcaataggtatatagtcgcctgcacctggaatataacacaaagagtaagccatcgctagtgtggcaacgtgtcgaatcttaccctgttctctagccctttgccgacgttttcgggcagcgtgtatcattgctgcatccggaatggaaccactttcgagcatctgtttcaaatgttctggcttggagaaacggtgacgcgttttgtcatggccaccatcctcggattgctggtcttcttcatcgctcatatcctcccgtccagcgcaaagggcagctctaccgttcagaattgcctcgggagtctcagatttctttaccactagctggggacaagataagtaagttttatattattgtggattcctaaaggacttcgattagggtgaagcattggtattcatgctgcttttgtggaagggaagacatgcgactatcaatggtgggaaaattactatttatgtgactacgttagcaatggctttgatttttggtaattcaaaaaatatatctttgaatgttacataatatttaaatagttttcttctggtaaggtcaagttgtatgcgtcaatttattatcaaagaaagaatgagttagaatgttctgtgataaattttctaattcgtggtcatagttacagtagtagtacttaaagatcgcattataattggaaattttatgttgagtgatagttggatcgcagatcctagacacttcccatcactgaccagttaaaacgccaagcaaatcaacgtctaagctactaatattttaaaattggcacttcagaccagaaaaaccaactaatttaataacacatttaaactcattcagcctaatctttgctgctaattgttctacgataattcaatgtaatttctgatgttgaaatttcgttaaacggtattattgtagaagaaattgaataataataaccttaccacaaagtcgtctgtgcgtatttcggtttggatcatatgattatcactttttttacttttactctgatcgctggcacttttatatctgccagcattggcaggattcgagttggaattcgggggacccgatgatgggccaccggacgactctaaatgctgtgtactaccattttcgcccccgggatgtccgctgttttccgcccgttcctcgcgcttcttcttgcggcgttccttgtccagcatgcgcatcactttcttgctatgcgacgactttcgcacctggaacacctcgccgtcatcctctgcaaaagaattggggattttggctccatactctttttatattccggtatcactcaccatcatctgcgaagctgagcagcgcctttggcttgctgttgtcctcctgcggctttatggccttccggctcttctctttctccctcttgcccgaaattatgggaggcggtggcgcctccatttcggcgtccggatccaaggatgcgccgtcctcctcttcgtcagcgttgctggagaacacgcgtcgctgaattttcttcggtttgcgaaaaagcgacattttccacgatgttgttgttactctgcgatttgtttaatcaatgaaaaatcggaagaaaagcgaattttcgcaagatctcttcttcttgctgtcgtattgtaatagagatgaaaatctttcgatgtcgttctcgtgctcacgtgagtcacgagcagggctggaacgttaattctcggtcctcggtctagcacttacaaaacttttctgtattgaaaatatgaatagctttacaaattttgaaactattgtaacaattaaataaaaatgtgataaatacattaatttgtatacccagggcagctacacataaaactggtcttattaaaatatcggcaagagcttagatgacttttcatccctagataccgacaacggccatctctaatctctgaattcggcgaccgcagggcgtttcaaaacagaccgaaaagtcgttaacttattggtgccttgagtcacagaatctctaacatgggccttaaaggttgtgaattgcaattggacaacccgtggaacacctactacgccggtcagacggtcaacggccaggtgaagtttacgttcgactcgcccaaaaaagtccgaggtaagtgcgaatccaagtcccaattgtgggcagcgctggagaatgctaattaaaaccccagctgcttactattactcataggagtgacgacacctgtgtaagagtcaatgattaattggaaatttagtaaataaatatacatagcactttcgtcttcaatgtgcaggatgttcactggctgtcgttggtagtttccttgctaacttcttaaaatcctgacgcaaaaagccggcgcaccacccacaaatgtcggttgctctttcggtgcctaaacgaccttgttttcagaaagctggcggttgttaaaccctccaaagaaatgcactttctcctcttttcagttgggcgataacaactataaatagctccaagtgtgaatgaatacaaaagaaagtaaataaatatgtagtacatttgacgggggcatgtaacctatgtggcaaacattccaccataatcaaattttgaggtcaccaaacacgggagacagatgctgcctg

SEQ ID NO: 2873 - DNA, 2450 bp, DROSOPHILA
agaagaagagatcttgcgaaaattcgcttttcttccgatttttcattgattaaacaaatcgcagagtaacaacaacatcgtggaaaatgtcgctttttcgcaaaccgaagaaaattcagcgacgcgtgttctccagcaacgctgacgaagaggaggacggcgcatccttggatccggacgccgaaatggaggcgccaccgcctcccataatttcgggcaagagggagaaagagaagagccggaaggccataaagccgcaggaggacaacagcaagccaaaggcgctgctcagcttcgcagatgatgaggatgacggcgaggtgttccaggtgcgaaagtcgtcgcatagcaagaaagtgatgcgcatgctggacaaggaacgccgcaagaagaagcgcgaggaacgggcggaaaacagcggacatcccgggggcgaaaatggtagtacacagcatttagagtcgtccggtggcccatcatcgggtcccccgaattccaactcgaatcctgccaatgctggcagatataaaagtgccagcgatcagagtaaaagtaaaaaaagtgataatcatatgatccaaaccgaaatacgcacagacgactttgtgctagtggtaaagaaatctgagactcccgaggcaattctgaacggtagagctgccctttgcgctggacgggaggatatgagcgatgaagaagaccagcaatccgaggatggtggccatgacaaaacgcgtcaccgtttctccaagccagaacatttgaaacagatgctcgaaagtggttccattccggatgcagcaatgatacacgctgcccgaaaacgtcggcaaagggctagagaacagggtgcaggcgactatatacctattgaggagcccaaggagccggccaagctaagcaaccgtctgccctgcgaagatgttgagggtgatcagtcggatgatgaagaacgcatggacatgaacgatattacgggacgcaaagagcgtgaagagcggcgcgagcaattttatgctgtcgaaaatgattccaccgacggagattcagatcgcgagatgaacgagtgggaaaaccagcagatccgcaagggtgttacggcagcccagttggtccattctcagcatgaaacagtgctctcccgttttatgatcaagcctgccccgtcgggcatcggaaccggcatggacgacggagattcaacagcggcacagtccacgtccactctgctggagcaggcctatgctaaaaatgcccttgagcgcaccaacttagccgcagcagttcgatcatccgtcaaaaccaagaaggaaaaggccaaggctacagcattgcgaactcctcaggaaatcctagctgccattcaatcgcgtcttagcgagcttaaagagcggtcggctgatcacagcgctagtatggccaggattagtacagaactaaaggcattaaagctccagcagttagagtgccagcagaatgcaccgacagcggccgcaaagtacaagttttaccaagaaataaagtgctatgtgaatgaccttgtcgattgcctctcggaaaaagcgccagtaatatacgatcttgagaagcgtgcactgcaacagtatggcaaaaatcaacgttatttggtaaacagacggaggcaggatgtacgtgatcaggccaaagaaatcgccgaatcagcaaaacctataacagctgcctcccgccgaacacctgattatgaagaacaagttcgccgcgcagcggaacgggagggtcggaggacacgtcgccgatgcgagcgcgagcgcaatgatctgctctcgtcccacctggatggcatgtcaagcgacgatgaaattgccgatcaacagcaggaactgagtgtgactacgatggcgcagatagaatcacagtcggtggacgcccttgaagacgttaccgacgactttagcaagatcgagctaatactaatgaagttttttgcctggcgtaaaactgacatgtcgtcataccaggacgcatttgttagcctgtgccttccaaaagtcttggctccgctggtgcgacacgaacttgttctttggtcgccactgctggacgtgtatgcggatatagaaaatatgcgttggtatcaggcctgcatgctttatgcctcccaggcagatgaaaccgtggagcagctgaaaatcgatccggatatcaatctggtgccggcgctcatcgaaaagattgtgctgcccaaggtgactggtcgcgagtttcccttgagcggcacaaataagcagcttaacaaactgtttgaatccatcatggaacgcatgcgctggcagggcatcctggctgataagctactgcgtgagctggcgattggagcccttctgaatcgttacctgttattagctatgcgagtctgcacgccaaacgatgccataaacaaagcttacatcattgcaatccagcgataa

SEQ ID NO: 2874 - protein, 787 aa, DROSOPHILA
MSLFRKPKKIQRRVFSSNADEEEDGASLDPDAEMEAPPPPIISGKREKEKSRKAIKPQEDNSKPKALLSFADDEDDGEVFQVRKSSHSKKVMRMLDKERRKKKREERAENSGHPGGENGSTQHLESSGGPSSGPPNSNSNPANAGRYKSASDQSKSKKSDNHMIQTEIRTDDFVLVVKKSETPEAILNGRAALCAGREDMSDEEDQQSEDGGHDKTRHRFSKPEHLKQMLESGSIPDAAMIHAARKRRQRAREQGAGDYIPIEEPKEPAKLSNRLPCEDVEGDQSDDEERMDMNDITGRKEREERREQFYAVENDSTDGDSDREMNEWENQQIRKGVTAAQLVHSQHETVLSRFMIKPAPSGIGTGMDDGDSTAAQSTSTLLEQAYAKNALERTNLAAAVRSSVKTKKEKAKATALRTPQEILAAIQSRLSELKERSADHSASMARISTELKALKLQQLECQQNAPTAAAKYKFYQEIKCYVNDLVDCLSEKAPVIYDLEKRALQQYGKNQRYLVNRRRQDVRDQAKEIAESAKPITAASRRTPDYEEQVRRAAEREGRRTRRRCERERNDLLSSHLDGMSSDDEIADQQQELSVTTMAQIESQSVDALEDVTDDFSKIELILMKFFAWRKTDMSSYQDAFVSLCLPKVLAPLVRHELVLWSPLLDVYADIENMRWYQACMLYASQADETVEQLKIDPDINLVPALIEKIVLPKVTGREFPLSGTNKQLNKLFESIMERMRWQGILADKLLRELAIGALLNRYLLLAMRVCTPNDAINKAYIIAIQR

SEQ ID NO: 2875 - DNA, 6746 bp, DROSOPHILA
actggcatccgaatccgacacggatgcggagctcagcgacacagagctggagaaccggcgcaccaagctgagatcccgcatgctgcagcagcagcgcgaggaggaggttctacagaaagaggatgagaaacagtcggaatcgtccgaatcagaaagctccgagtacgaggaggagaccgaaagcgaggaggacaacgaaccccgcctgaagccgctcttcgtccgaaagagagatcgtgccaccatccaggagaaggagcgagaggctcagaagcagaagcagctggaggcggaggccaagcgggcagccaaggagcgcagaagagccaccctgcgaatggtcgaggagagcgtcaagaaagatctggagaagaccaagccggagaccaatgaggcctgcatcgaggacgtgtgcacggacgacgaaaacgacgaggtggaatacgaggcctggaagctgcgtgaactcaagcgaatgaagcgggatcgcgaggaacgtgataagtaagtgaacatcaaactgctcttagaattcctttttaacaattctttcccttttctttcagcgtcgaacgcgagaagctggacattgatcgcatgcgcaacatgaccgaagaggagcgacgccaggagctgcgccagaaccccaaggtggtcaccaacaaggccaccaagggcaagtacaagttcctgcagaagtactatcatcgtggtgccttctacctggatgaggagaacgacgtcctcaagcgcgacttcgcccaggccacgctggaggatcacttcgataagaccattctgcccaaggtgatgcaggtgaagaacttcggccgctgcggccgcaccaagtacactcatttagtggaccaggacaccaccaagttcgactcgccctggtacgccgagtcatccagcaacatcaagttccacaacgaacacgccggcggcatgaggcagcagtttgacaagcccaccggctcgaagcgaaaaaagatggagtagtgttagacgtatgtaattgatgtatttgacaggcattaggaaagtaacaagtaaatattgtgcggccacagttatgatggaaccaaaacttcatatacaaacaattatatataatacaaatatcataagtttaaggtatgaacgagatttcgtctgggacttcgatgtgtgatgtacaattttggaataatggctaacgaatgataacaaaaagcggagaacacacaaaaaaaaaaactataacgtttaaagtttgagcgtgtgctcctgtagcatttcaatgttgtgttgaacgagcgcctgcataacagcctcggttttgatgaagtgcaccttttcatagttgttcagacgtcgcttagatttcgtatccttgctggtggtgaccacgtacagatccacgctgatggccagcgaaggcggttgggcatgaaccttgccgccggcgctgtgaatgatgactgtgggagattaccgattagccactagttggaataagatttctagttaggcttgcctttcatttcgttggcctttggcactatgtctttgccgagcataaagtgcaagccatacagcaagcgagggtgttccagtacggaggagggtttgaacttgtaggtctcctcgaacgttgggtcgctgaacagatggtctgcctttatgtcgatgctcctggtcttcttcacagagtgcagccaattggtggagagaactggtttgttggaagcaatgactgttaggaacttataggtgcgctcgcccttgtccatcacaagcaggtcgcactgcaagggatcttcggtgatctccaccacgtctagaaagcatataaatctatttagaattcaactcgctttgcggcatgtgtttacttacgcttcagtgacttgaggacagtttccaaagctggacgattgcacatggtgaacgctaccttaattttgcccgtagtagtcttggcctttctcacgtacaagttaattgctagaaaagaagattatggtgtaagataaggtaagtgtaaggtaaggacgcatttacctctaaggggatcggcatccggctgactgaatcgcgttgtagctgcaaggaaaggtaaatgtgaaaatagtccatcaacaataagaatttaacttactagcgcctgatctgttcttcagaacttcctcgtcaacagacattttaggcttcttggtagggacgtccgagctggacgtgggctcttcgccagatgttaagcgcttagctcgcctgcgtgtagttgctgtagatacatttggctccttggcagcagctgagctagatgatggctcttcaattgagggcgttgtagaacgcgactgagcagccccagttactctggcattatttccagcgcttgtggaagactcgagttgttctatgcttaccctggatatgcggacaaccgcacgtttaattaatgcgccccctgtttttacttccgtcagggtgctggaatcttcggcgattgtcatgcgcctggttctaaccataggcttttccacagttgcctcagctttggtagtctcgtttttcttgccttttccacctcttttcggtttgacggcttgtgctgcactctcagtctcttcagcgctagcttttcgcctggttctggccgctggcttggacatatccttggtttcttccccctgaatctgtctttctttttctgcctttggggtcatagcatcttcgtcggcagtttggcgcctagttctgggttttgccttgggaatgtcctttgacgtttcccctttacttgacttaaccttcttaaccctttttccgctttctgtctggacagaactgtcctcctcaagcaactcggcatcatcagcgctattttgtcgagtgactctcttcgagcctttggcaatattcttagatgtgtctgccttactcgaagcagtgttcttggcctttcttccttttcctagatcaggcgttcgaacatcttcatcgctggtttggcgcctggttcttgtcgtaggcttgggaatatccttggatgagtctgccttttccgccttcttggcctttctagcacgtatatttttggtaggtggctcttcgttgggtttatccaccacatctgcgttgacttcattcctttctgaagagcttcctggagtaccagggcggctttgaattcgtcttttacgggagcgccattgattaacaacattgttgaaacaatcgcctttctcttctgagtctgatttgtcttcctttgttatctcttctggaatggaatcgatgccatgttcccggataaccgacttgttaagggctacaaattgatatataaatagggatttctttaataaaaaattataaaatcgcttaccttccgattttttatccactaaattgtttagccgttctctcgagttacttcccggtctctcagaaccctccgatcttcgtctgtccttacggattgctgtaaattaaatggattttagattcttcaagtatagcttcatttgcgagtgacctacgggtttctggaggagattccgatttggccacccgtttgagacggccaaagccagttccatcagtacgcccacgactcctgttactcacgttactaaaaacgccttcaatctgacagatctggatggaaataaccaataacgcaaactatgcttagagtttaggtttaagttaccttctgatagtgattcttatccttgatcacacacggctcaaaaaatggtatcgactcctcattgggacttacaggcgacgttgccacagtccctgaaatcatttcattgagcacagcatctatctcaccgcaagtcgcttcaaagaatttcgaatctggacagatatttattttccagatccataataaggaacatctttggtattcttacctgatgcaactttgacactgtcgtcaagtggaatgttctccttgtcctgtaaactcacggaatgctgattgaccacatgaaaaggttgcgtggctacgaagtcctggcaacgagagctattgatcttggcgggaaatgcttgagtggctatcaaatcttggttggaaatctcattattttctggtgaagccatgtttgcttgtgggattcctaagttaaatgcctgagtttctataaaatcttggttggaagcatcattagctgtagagggtttaggtgaatcaactttttgtggcggtgccaagttaaatgcctgtgtcgctatgagatcttgattggcttcattttcttgtggtgcctgcggacgtcctaagttaaacgcctgagtagccacgaagtcttggttgttttgcccattgtcttcctcgtcactttccaacaatttatgtcgtggaaatcgttgagtggctatcatatcttgattcttttcctgactattcgtgtcaggagtggcagtgggggtctcaatcgtcgccacaaccagctgtttaactccgccaaactgcggtgtggcggtatttgtattgtccgcaggacgaacgaacggatctggactgctggagccatcgcgcctcctatccccccccatgatcaggtcaaatagatcgggtgtgcagatatttctatctacggacggagcggtcaaatcgggagtaatgcaggcatcgccacgcggcaatatatcatccgctttggtgctactcagagcacagcatttggaattgctagccgaccagttcaaggcactcatttccatgtcggtggtgtccagttgatctaagaagaaagcgcacattattgaaagttatcagtttcaatggatgcacataccccgcttagtatcctgattttccagaccttcaattggtgctgttggcggcggaagaggcagcagaacatcgcagagtacctgtgaggtatcgaagtcatcgatggcatcctcattataatcctgggtgcacatgcgtataatgctgccctgagatgattcctcatcgctgtctatcgtcggacctggcttatcaactacgggaataaccgggggtttaaacactggtggttcaggtggaagatccgcaagcatatcctgcgtttcgggtatcatgaagtcatcgcccagcgacactctttgtccggtcgaaggcctttcgcataacaccgcttgggtctcgggtataaataagctatctgccgttgtgttgactgatgtgttggcggatggaggctgtgtttccggaacatccatgctgtccaaggttgtgttgtttaatccgttcttcaggcattccccgaatccgctactgtcgtggacctgaacgaagggtaagcattaagttatgcatcctgtaagaatggtatttggtgcccatacctcatcgtgatcttctccaaactctagcctggcctccacattgccaaagcggagtttcaccttgccggccacggcgttctccatgccgatgtccaccacggtctcctcctggtcgttcacaaagatcttgcccaccagggcagccaggcgcaccacacctcggcgcagtatgcaggctgtggcgtgggccagctccattgactgcccattgaggataggagttattaaaggggaaatgtttaagtaagggccaatttacctcatcggcgatgcttatttccaggcccttctgcctcccaatgcggtaaatggtatccgctttcagaagaatggccggcaaaccgccaaaaaacaggcttacatctgccatcctggcggcagttccttcaaaactgaaggacgaaaaaaaaaaacaagacaataaatggaaacaacaaacgcactgaacggtcacacttgaaatgggcgccaaaaacaggcgatatatacggtagtgttaattacaacagatatgccaaaaggcaaaataagactaacaacgtatattatttttaaaattatatagtgccttgtgaagactagaatatcgagctttagtttttgttttgacacactgaatagtgatataccgatagtccattgttttcgataatcctgcattgccacgtgcacctggcaaccctgtgcatcaccatggcaatcggtggttagtttcacttttgttttgaaacaacaattattgtactataagcatactattaatacagttaaccatgaggcatgagtgataccgatacggacgacaccgatctgctgctcctgataccaccgaacttctgcgcggaggacaaaatgagcgcatgcgcggcggcagatgcgttggccatgcccccgccccctcccccggcgaccacaagtgcagcgtaccagttcctacatcccagcaagaaatcggagctgaatagcatcaattcccggctgcagaacatcgcactggatgcggaggagcctccctcggacatttccaccatatccacgaatactgtaaggaacgctggaaggccaagtagggagctccacggcatggtgcactccacgccgaagagtgggtccgttgagcccctccgccatcgaccactggacgacaacattctgctcgaaatcgaccactacctagacgacaataatgcgcaccgttggcagaggcacgatcaccacctgcatcaccgcagcgacgatcatctgaggaacgagcgggcggggaaagagggtcatccgggaacctcgtctctgcccagcatgaggctggcctcatcatcctccggcgccgtttctgtcgaagcagccagggtcgatcgaagcagcctgaatgagaacaagatcataagtctgagcgagct

SEQ ID NO: 2876 - DNA, 4058 bp, DROSOPHILA
tccttcagttttgaaggaactgccgccaggatggcagatgtaagcctgttttttggcggtttgccggccattcttctgaaagcggataccatttaccgcattgggaggcagaagggcctggaaataagcatcgccgatgagtcaatggagctggcccacgccacagcctgcatactgcgccgaggtgtggtgcgcctggctgccctggtgggcaagatctttgtgaacgaccaggaggagaccgtggtggacatcggcatggagaacgccgtggccggcaaggtgaaactccgctttggcaatgtggaggccaggctagagtttggagaagatcacgatgaggtccacgacagtagcggattcggggaatgcctgaagaacggattaaacaacacaaccttggacagcatggatgttccggaaacacagcctccatccgccaacacatcagtcaacacaacggcagatagcttatttatacccgagacccaagcggtgttatgcgaaaggccttcgaccggacaaagagtgtcgctgggcgatgacttcatgatacccgaaacgcaggatatgcttgcggatcttccacctgaaccaccagtgtttaaacccccggttattcccgtagttgataagccaggtccgacgatagacagcgatgaggaatcatctcagggcagcattatacgcatgtgcacccaggattataatgaggatgccatcgatgacttcgatacctcacaggtactctgcgatgttctgctgcctcttccgccgccaacagcaccaattgaaggtctggaaaatcaggatactaagcgggatcaactggacaccaccgacatggaaatgagtgccttgaactggtcggctagcaattccaaatgctgtgctctgagtagcaccaaagcggatgatatattgccgcgtggcgatgcctgcattactcccgatttgaccgctccgtccgtagatagaaatatctgcacacccgatctatttgacctgatcatggggggggataggaggcgcgatggctccagcagtccagatccgttcgttcgtcctgcggacaatacaaataccgccacaccgcagtttggcggagttaaacagctggttgtggcgacgattgagacccccactgccactcctgacacgaatagtcaggaaaagaatcaagatatgatagccactcaacgatttccacgacataaattgttggaaagtgacgaggaagacaatgggcaaaacaaccaagacttcgtggctactcaggcgtttaacttaggacgtccgcaggcaccacaagaaaatgaagccaatcaagatctcatagcgacacaggcatttaacttggcaccgccacaaaaagttgattcacctaaaccctctacagctaatgatgcttccaaccaagattttatagaaactcaggcatttaacttaggaatcccacaagcaaacatggcttcaccagaaaataatgagatttccaaccaagatttgatagccactcaagcatttcccgccaagatcaatagctctcgttgccaggacttcgtagccacgcaaccttttcatgtggtcaatcagcattccgtgagtttacaggacaaggagaacattccacttgacgacagtgtcaaagttgcatcagggactgtggcaacgtcgcctgtaagtcccaatgaggagtcgataccattttttgagccgtgtgtgatcaaggataagaatcactatcagaagatctgtcagattgaaggcgtttttagtaacgtgagtaacaggagtcgtgggcgtactgatggaactggctttggccgtctcaaacgggtggccaaatcggaatctcctccagaaaccccaatccgtaaggacagacgaagatcggagggttctgagagaccgggaagtaactcgagagaacggctaaacaatttagtggataaaaaatcggaagcccttaacaagtcggttatccgggaacatggcatcgattccattccagaagagataacaaaggaagacaaatcagactcagaagagaaaggcgattgtttcaacaatgttgttaatcaatggcgctcccgtaaaagacgaattcaaagccgccctggtactccaggaagctcttcagaaaggaatgaagtcaacgcagatgtggtggataaacccaacgaagagccacctaccaaaaatatacgtgctagaaaggccaagaaggcggaaaaggcagactcatccaaggatattcccaagcctacgacaagaaccaggcgccaaaccagcgatgaagatgttcgaacgcctgatctaggaaaaggaagaaaggccaagaacactgcttcgagtaaggcagacacatctaagaatattgccaaaggctcgaagagagtcactcgacaaaatagcgctgatgatgccgagttgcttgaggaggacagttctgtccagacagaaagcggaaaaagggttaagaaggttaagtcaagtaaaggggaaacgtcaaaggacattcccaaggcaaaacccagaactaggcgccaaactgccgacgaagatgctatgaccccaaaggcagaaaaagaaagacagattcagggggaagaaaccaaggatatgtccaagccagcggccagaaccaggcgaaaagctagcgctgaagagactgagagtgcagcacaagccgtcaaaccgaaaagaggtggaaaaggcaagaaaaacgagactaccaaagctgaggcaactgtggaaaagcctatggttagaaccaggcgcatgacaatcgccgaagattccagcaccctgacggaagtaaaaacagggggcgcattaattaaacgtgcggttgtccgcatatccagggtaagcatagaacaactcgagtcttccacaagcgctggaaataatgccagagtaactggggctgctcagtcgcgttctacaacgccctcaattgaagagccatcatctagctcagctgctgccaaggagccaaatgtatctacagcaactacacgcaggcgagctaagcgcttaacatctggcgaagagcccacgtccagctcggacgtccctaccaagaagcctaaaatgtctgttgacgaggaagttctgaagaacagatcaggcgctactacaacgcgattcagtcagccggatgccgatccccttagagcaattaacttgtacgtgagaaaggccaagactactacgggcaaaattaaggtagcgttcaccatgtgcaatcgtccagctttggaaactgtcctcaagtcactgaagcacgtggtggagatcaccgaagatcccttgcagtgcgacctgcttgtgatggacaagggcgagcgcacctataagttcctaacagtcattgcttccaacaaaccagttctctccaccaattggctgcactctgtgaagaagaccaggagcatcgacataaaggcagaccatctgttcagcgacccaacgttcgaggagacctacaagttcaaaccctcctccgtactggaacaccctcgcttgctgtatggcttgcactttatgctcggcaaagacatagtgccaaaggccaacgaaatgaaagtcatcattcacagcgccggcggcaaggttcatgcccaaccgccttcgctggccatcagcgtggatctgtacgtggtcaccaccagcaaggatacgaaatctaagcgacgtctgaacaactatgaaaaggtgcacttcatcaaaaccgaggctgttatgcaggcgctcgttcaacacaacattgaaatgctacaggagcacacgctcaaactttaaacgttatagtttttttttttgtgtgttctccgctttttgttatcattcgttagccattattccaaaattgtacatcacacatcgaagtcccagacgaaatctcgttcataccttaaacttatgatatttgtattatatataattgtttgtatatgaagttttggttccatcataactgtggccgcacaatatttacttgttactttcctaatgcctgtcaaatacatcaattacatacgtctaacact

SEQ ID NO: 2877 - protein, 1259 aa, DROSOPHILA
MADVSLFFGGLPAILLKADTIYRIGRQKGLEISIADESMELAHATACILRRGVVRLAALVGKIFVNDQEETVVDIGMENAVAGKVKLRFGNVEARLEFGEDHDEVHDSSGFGECLKNGLNNTTLDSMDVPETQPPSANTSVNTTADSLFIPETQAVLCERPSTGQRVSLGDDFMIPETQDMLADLPPEPPVFKPPVIPVVDKPGPTIDSDEESSQGSIIRMCTQDYNEDAIDDFDTSQVLCDVLLPLPPPTAPIEGLENQDTKRDQLDTTDMEMSALNWSASNSKCCALSSTKADDILPRGDACITPDLTAPSVDRNICTPDLFDLIMGGDRRRDGSSSPDPFVRPADNTNTATPQFGGVKQLVVATIETPTATPDTNSQEKNQDMIATQRFPRHKLLESDEEDNGQNNQDFVATQAFNLGRPQAPQENEANQDLIATQAFNLAPPQKVDSPKPSTANDASNQDFIETQAFNLGIPQANMASPENNEISNQDLIATQAFPAKINSSRCQDFVATQPFHVVNQHSVSLQDKENIPLDDSVKVASGTVATSPVSPNEESIPFFEPCVIKDKNHYQKICQIEGVFSNVSNRSRGRTDGTGFGRLKRVAKSESPPETPIRKDRRRSEGSERPGSNSRERLNNLVDKKSEALNKSVIREHGIDSIPEEITKEDKSDSEEKGDCFNNVVNQWRSRKRRIQSRPGTPGSSSERNEVNADVVDKPNEEPPTKNIRARKAKKAEKADSSKDIPKPTTRTRRQTSDEDVRTPDLGKGRKAKNTASSKADTSKNIAKGSKRVTRQNSADDAELLEEDSSVQTESGKRVKKVKSSKGETSKDIPKAKPRTRRQTADEDAMTPKAEKERQIQGEETKDMSKPAARTRRKASAEETESAAQAVKPKRGGKGKKNETTKAEATVEKPMVRTRRMTIAEDSSTLTEVKTGGALIKRAVVRISRVSIEQLESSTSAGNNARVTGAAQSRSTTPSIEEPSSSSAAAKEPNVSTATTRRRAKRLTSGEEPTSSSDVPTKKPKMSVDEEVLKNRSGATTTRFSQPDADPLRAINLYVRKAKTTTGKIKVAFTMCNRPALETVLKSLKHVVEITEDPLQCDLLVMDKGERTYKFLTVIASNKPVLSTNWLHSVKKTRSIDIKADHLFSDPTFEETYKFKPSSVLEHPRLLYGLHFMLGKDIVPKANEMKVIIHSAGGKVHAQPPSLAISVDLYVVTTSKDTKSKRRLNNYEKVHFIKTEAVMQALVQHNIEMLQEHTLKL

SEQ ID NO: 2878 - DNA, 3023 bp, DROSOPHILA
aacttaccttgtttctatcaactcatacattgtttaaagtaaaatgtaattctttttttttttttgttgaactttccatcgtcgaaacgctctaaaatggtttacagcttctgcatcctccgcatcgcccctctagtcctcgcccatcatcatggttgtcgtcgtcatcttgtcgtggttgagcgactcctgcggcaaatgaaaattagttgtttactctgtgcaacataaacaaataagcgcaacgtccaccgtccagaatatccaccagtttttcccgtcccaaacgtcatactcatccgactgttgcaaatggtagctgtaggttttggacgtcctccgtttggattgggcccatcgaagcattaaaaagaaatcatttatcagagctacagacggtttgcagatgaggaaccgtcgtggctgcagcaaatgcaaattgaaaaccgacgacaagatgtggggcagagcctcaagaatgaggggcacttgcgccgtactgttgttgcaatcccaaatggaaactgtcataattcgctgtgacagcacttgaatggatactcaaggttgcaataaatctgttcgtgctatttgggaatttgttcttaaaacagagacagtttattgctcccattttgcatacatttaatgtcgctgcataattatgactccccctaatccctacgaaatcccccaatgcgacaaactgttcacgaactcaagtagataacgacgcaatcttctcacttaatcttgctgaatctatttgtttgataaaacgagaaccgttgtgaatcaatcattgattgataaataatgcactagacgatatttatatatattatatttcatttatttaaatatatatcttggaatctattaaatcccgttcctagttccatcaaagtggaatgtatggttcggttccgattgatcgttggtgtgcagttcagaacagtggagtcatttggtttgatatcatgcatgatctatattaagcttattgaggttgctggtcccttgtatctttgctcggcttacatagataagaccgatccttggccttgtcacaaatggccatcaattggccagtctcgcccagctgctttagtagctcaacaatgaagggcagataattgtggcggcgacgaatgttctccttgcgatagcgacgcttcttctccttctcgtgcctcacatgggatcttaggttggcgatctccgcctgacgatccgcgtggcttagttgcgatggtaggttgaccagcatttggatcttccgctcgtagcatcgctgacgatccgagaccagggccattagattgaagtggatctcaccgacgctgtagcgttccatgcgtgcctcaataatcggtctgaccacatccagccagttctgttgctggtcgatatcggccagttcgatgggaccctcatgcattccgtccaattcgaaaagtttgccttttattggcataaagcccacaaagtggtaacaatcatcttctatgaaatccgtgctctcttcaaccacgaagagttcgggtcgagcaaatgaattgtgtactttacggatcttctcctcgttggccaaacggtgtccacggcattccggatctagatcctggcataagtttcttaaatcggtcaaagtttgacccaaatcgatgtcttcatgctgtagattgagcagcaggcagagtagagcctgcgtggcacaggcattcggtatcacctggcgagcaaagaagatatcacttctatccgtgaccacgcgaccagcgggcttgtcatccaaccatttgaacagaaagattaggccatggatgggctccaggtgacggaaggcgtccgctttaatggaccagatttcctccacctcggcacccgtgcagccaaaaccactaatcatctcggtgaagacacccggatcgctttcaatcaggcaccagttgtttgcggctgttgcctccttggtggttaactcctcaacggttgctgctccaggattttctgtgtccatggctaaagaagttataactttaaactaaccttcttgtcctaaaataagtgtttagttttttttcacaatcggaattttggatttattctccgttttttttcttgacacttgtcatgaaccgtatgatgtacgtattgacattccaacttgattaattgactgctgatgattttattttgcacgccgaaacacacacgtaaattggacgaatttacaaaatgtaaacgggttgaagggggtaaaggtggtccaattaaagaaatttttctcagtgaattattaaaagctgaaaccattaaataatggttcccaccttatcgttctttcgcattaatcttatcaatatctttcttccaagaaacacttttaaatttagaaagccctatttaattttgtttttatttttaattgcccgtctgaagattaaagctacatcgctgggcaaactgagtaaaaaaaaaaaactttcctttaaatggcgccaatttagacatttggaattttttgaaattcttatgtgtgctcctctaatcttgaaagcttaattggttatagcacctacgttcacttcaaggaattcgaacatcgagttcaaatattttctaacgacatgcaaaataaagctagaatttctgagcatccccttctcattttcagtcataatttcggccatctcagccatcgaaccgcaattggccagcctcggaataaatgaagccctaatgagccgcaatcgatcaactttgctgatatgtggctcaccctaatgcgtatatatcctcctcactgtcgtgcacactgtgcatttgggcgtgggagtcactggctggtgaaatgggggctacagggacgtggcaaatggcgtcgcatcgccaagggattaacaggcagtagctggggccgcctgagggataataagtgcattggagcatcaaatcaataaaacgcgcacactggcccacacaaaacacacacacactcactcgcatgggacagtggc

SEQ ID NO: 2879 - DNA, 1023 bp, DROSOPHILA
atggacacagaaaatcctggagcagcaaccgttgaggagttaaccaccaaggaggcaacagccgcaaacaactggtgcctgattgaaagcgatccgggtgtcttcaccgagatgattagtggttttggctgcacgggtgccgaggtggaggaaatctggtccattaaagcggacgccttccgtcacctggagcccatccatggcctaatctttctgttcaaatggttggatgacaagcccgctggtcgcgtggtcacggatagaagtgatatcttctttgctcgccaggtgataccgaatgcctgtgccacgcaggctctactctgcctgctgctcaatctacagcatgaagacatcgatttgggtcaaactttgaccgatttaagaaacttatgccaggatctagatccggaatgccgtggacaccgtttggccaacgaggagaagatccgtaaagtacacaattcatttgctcgacccgaactcttcgtggttgaagagagcacggatttcatagaagatgattgttaccactttgtgggctttatgccaataaaaggcaaacttttcgaattggacggaatgcatgagggtcccatcgaactggccgatatcgaccagcaacagaactggctggatgtggtcagaccgattattgaggcacgcatggaacgctacagcgtcggtgagatccacttcaatctaatggccctggtctcggatcgtcagcgatgctacgagcggaagatccaaatgctggtcaacctaccatcgcaactaagccacgcggatcgtcaggcggagatcgccaacctaagatcccatgtgaggcacgagaaggagaagaagcgtcgctatcgcaaggagaacattcgtcgccgccacaattatctgcccttcattgttgagctactaaagcagctgggcgagactggccaattgatggccatttgtgacaaggccaaggatcggtcttatctatgtaagccgagcaaagatacaagggaccagcaacctcaataa

SEQ ID NO: 2880 - protein, 340 aa, DROSOPHILA
MDTENPGAATVEELTTKEATAANNWCLIESDPGVFTEMISGFGCTGAEVEEIWSIKADAFRHLEPIHGLIFLFKWLDDKPAGRVVTDRSDIFFARQVIPNACATQALLCLLLNLQHEDIDLGQTLTDLRNLCQDLDPECRGHRLANEEKIRKVHNSFARPELFVVEESTDFIEDDCYHFVGFMPIKGKLFELDGMHEGPIELADIDQQQNWLDVVRPIIEARMERYSVGEIHFNLMALVSDRQRCYERKIQMLVNLPSQLSHADRQAEIANLRSHVRHEKEKKRRYRKENIRRRHNYLPFIVELLKQLGETGQLMAICDKAKDRSYLCKPSKDTRDQQPQ

SEQ ID NO: 2881 - DNA, 3034 bp, DROSOPHILA
ttgtcttggactgatttaaatactattaattggccggcagacaaacggcgctatttgcataccatttatcgcatttgatatctggtcatatatgtatatttatttggcaatgccatatatgcgatggacaaaagatctgcgaaattccaaaagtcagccaatgaagatcaacgaacaaaagatgacagcccgtacacaaagcagttaaaaagatttattacatttccatgtggcatcaacgcggcggtggcaataatttcgtttgcataattgtcgtttagtaacccccgaatccgtacggatttcataatatcaataccattttgatataactaggtgcgaagacccagacaacagtgatatcctcttatcagtttgcaagcccaaatgtatctcaaaagttgaccatgttccacgaataattattatgctgataagattgatagcacgaacaagattaatgcattaattaaaatcaatgataatttttttttttttttgataaggatatcccttttattccacttgatgggtacgtgttataagttatcatattcgtggttcctttaatttgtatccattcaatttgatgtcatatctgtatattaacttcctttatagaaactgaaacttaatctaacattcttttctattgactcagctgaattttggaagatatatacgtacagatcttagctatatatatgtagtataatagcggccacgccatctgaaatggaatatgttgatttgccttatgaaacttcagttgatttggtgtccagattgaaattaagatacatttccatagtgcttgaatcttttactgctcgaaatattgctctagtcaaaaggggttttcgattcgttgttcgatttccttggttctggtcgagattcatgccccattgacgcccttctattgaaacgctttgtgagtacctttagctatcgagttctggtttttttttaatgtattttctggcctttttatgtattttaccgggaggggtcttaacaaaaaatattacatgtgtcgtttagggagttttttttgcccgaaaaagaaacgcccttgagggggggggggggtaatgaatacgttgtggctaagacgagattgacaacatttcgggggatttggacagttgggtattggaggagaccctctccatccgagggctctgaactaagctagatcccaaaatgaaacctgatcctctacagccgcccgtagtgtgcctggctgggctttcggtccgtaaagaagttcctcagcaccataatctggacgagaccgatcacgatgactgcggccgtctccagggatgaccagaccataacccgctgattgagatcttcggcccgcttgcgaccttgcgcctccctcagtcgatgatgcgtctgggcgtccaggatgtcgttgaggcccttgtgaatcgcctgcgacgatgtctccatctgtgtgagcaccgtggcatgttcatccacaccgggcagagccggctcctcgcccacttggaagtccacgtagacgatcttgtgcgagaaggccgagaattgattgccaaagcaagcggtatacacgcccgttgtctcggcaacgaactgatgactatcgaaggtggccttctccagactgtagatgaccttgccctgcggatccttcagggtgacgtccacgtccaattggccaccggccgacacctggaactcaaagtaggcgctcgagttcttcttgatctcctcgtagaagcaatccaccgcgttatcggccagatcgaaggtgaattcgacggcagagatgcagtgcatcatcagagctaccgcaaatacaacgatttgtgtgttcatggttcgccctttttgctttttggtattccctgctggattcgtatgattccctgcttcaccgcctgttattcttccagctgcaaaagaaatgcgctcggtcagtgccaagattccggccaaatgctatgccacctgtcattccaattccatttacttaccagcctccgtccggattacgtgacgtgtttttgttatttgtgatatgctatcgatatcgccagcattcggcgttttgtgttattcgccgcacgataggtctggggttctgacgtgtcaacactcttttccgccactcgctgtgcagcactgcggacccacgtatatgctatcggctactgagcagcagagttgccactctttttttttctttggcgccattatcaaaaattgttaagcacttaaaaataaactttaacaataaacatagttgtatacatatatgattaaaaatttacatatatatattttttttatatatttatattataaattttaaaagtactaattttttaaaaatgtacatttcagaatttgaattgtaaagccataattctttaagagtaaatggagaaaaaaagaaaagcggaacaccgtctacacctgcaggtgtatcagttctttcttggagagaacggtgatcagattgtttgccgtggttatgcccagaatctcgtcaatctcgttgcccaaggtgatgagcttttgtttacccaaggtgacgggaggtccgtttcgcctgcggagaccatcagccgaattattagccggaaagtagacgagaacgtagcgtacagggtcacatatggctacgtaatccagatccggactgcagacggtgaatttccgcacaaccttggaggcctgcacgtagccgaaggcgtgcagctggccctcgtggcggacactccattcatctggacgactgggctggtacatctgtagccatatggaggcgtcgacgccctggcgggtagcaaaggcggctggaaagccaggacgcagcgtggtggtgagcaccagtggcgggggaccaagaaaaatagtgtgggtgatgcacccgctggtcaaattgaagcgtactaaaagaagaaaatgtatttattaagcatatgcagcagatgtataatagaatgcttacccatcttcatttcttcatcagcggatattaagtcacattctt

SEQ ID NO: 2882 - DNA, 953 bp, DROSOPHILA
cacgtaatccggacggaggctgctggaagaataacaggcggtgaagcagggaatcatacgaatccagcagggaataccaaaaagcaaaaagggcgaaccatgaacacacaaatcgttgtatttgcggtagctctgatgatgcactgcatctctgccgtcgaattcaccttcgatctggccgataacgcggtggattgcttctacgaggagatcaagaagaactcgagcgcctactttgagttccaggtgtcggccggtggccaattggacgtggacgtcaccctgaaggatccgcagggcaaggtcatctacagtctggagaaggccaccttcgatagtcatcagttcgttgccgagacaacgggcgtgtataccgcttgctttggcaatcaattctcggccttctcgcacaagatcgtctacgtggacttccaagtgggcgaggagccggctctgcccggtgtggatgaacatgccacggtgctcacacagatggagacatcgtcgcaggcgattcacaagggcctcaacgacatcctggacgcccagacgcatcatcgactgagggaggcgcaaggtcgcaagcgggccgaagatctcaatcagcgggttatggtctggtcatccctggagacggccgcagtcatcgtgatcggtctcgtccagattatggtgctgaggaacttctttacggaccgaaagcccagccaggcacactacgggcggctgtagaggatcaggtttcattttgggatctagcttagttcagagccctcggatggagagggtctcctccaatacccaactgtccaaatcccccgaaatgttgtcaatctcgtcttagccacaacgtattcattaccccccccccccctcaagggcgtttctttttcgggcaaaaaaaactccctaaacgacacatgtaatattttttgttaagacccctcccggta

SEQ ID NO: 2883 - protein, 210 aa, DROSOPHILA
MNTQIVVFAVALMMHCISAVEFTFDLADNAVDCFYEEIKKNSSAYFEFQVSAGGQLDVDVTLKDPQGKVIYSLEKATFDSHQFVAETTGVYTACFGNQFSAFSHKIVYVDFQVGEEPALPGVDEHATVLTQMETSSQAIHKGLNDILDAQTHHRLREAQGRKRAEDLNQRVMVWSSLETAAVIVIGLVQIMVLRNFFTDRKPSQAHYGRL

SEQ ID NO: 2884 - DNA, 3554 bp, DROSOPHILA
tttgtggctctctctgcacttcctgctcctcttctttttaccaggaagcggaaatgagccttggccgcaggagcctcttgtctcgattccgcttccgttttcgtgtagctttttcgctctctgagagcgcgccggaaatgtgtaggtgtgtttgtgtgtgtgagttctggttgcgaatgtgtgtgtgtgtgtgtgggatgtggctggtatgtgtgtgtttgggggggggggttcagatttgatgcaactgatcgtggtaaacaattaattgtaaatttgttttaaactaatttctaagggggagggggctcattacttctggttgtttgcaacattttgacatcatttgcatacaatatttttataaaatatgttccttattcatgattcatttcctttctcgatttatttgctcatttctctcgtggaatttgttatctttatcttttaggcgtacaatttagtttagcttaatttgatttgtgtttcgaatgttgttttcggttctatttaaagatatacttgttgttggttgggctttcgcgtgtataagtagttgtagttgtagatgtgtagagtacaatcgaaaagaatcaataaatacgaatgttttagtttacgaatgtttcacttgttgcataatttaaaaaacggctcaaaaacgaacgacaaatatatttaaatatgtagatatatatatataataattccccatatgaattaatggttaatcagcgaaaaatagtacaatcataatagtagtaaatggtaataattacaaaaacttgaaacagttaaaaacatttgtcagtttaagttttgcttgtatatagtagattggttatttcaattcgacaattgccatcggatccaaaacgaaacgagaacgaaaaaaatttgaaaattctttactttacgcttatacttttgctcctctctcctcctcctctgttatatatttttttttttgtttttttagttttggtggtttttggaagtcttatagcagaacacatagggactttttcggcttcttctgtttcttctcgggcgacttcttgttgatctgccggaccaggtcgtagaaaatatcgttcacattcactttggctttggctgaggtctccatgaaggcgcagttgaactgggtggccaggttcttgcccagctccttgccgacgacgcgctcctcttcgaggtcgcacttgttgcccacgagcaccatgggcacatcgtccgtgtccttcacccggagtatctgctcgcgcaggtcctgcagatcgttaaacgtcgattgcgccgtgatcgagtagaccagcacgaatccctggccgttcttcatgtacaaatcccgcatggccgtgaactgctccgtacccgccgtgtccaggatctccagcatgcactgctgtccgtccacctccacctgcttcctgtaactgtcctcgatggtgggatcgtacttctccacgaagatgcactggacaaactggactgtcagcgcggatttgcccacgccgccgcttccaaggaccacgattttgtactcacgcatgctggctgctgtgctgtttgtatatccttcgtatatctcttgttttgtgctaaattctagggaagagacccaaaatgcaggtaggccaggtaggtgggttcactttccaggtggctctccctcgaaaatcacttgtttttaggcgttgttcggcgattgcttgtcggttgcagttgttttttgtttttgtttttttttgttgctcttgcttattagttaatatatgttttatatttaaagtaaattgtttgttgttgttgcttttgctgttgataacctttgtgccgtgtaagtgactgcgtgagtgtgtgtgtgttagtgtgtgtgaatgtgtgatggtgtttgtgctccctctctcgctcgctccttccgccgagttgcgtgcgttcaattgttgcttttttgagcggaaatatcctggcttgactgttcctcgagacggccgtcactgctaccgagagcacactgtggggggagtaagaagaaaggcgctttttagacacaataaacgctaaattctttgcgagtctttttggtttgcgttttttggtatgctgagaactgactgcactccctcttttcttcttcacaactctctcgttctcgttctcgctctaatgattcattttcagggttgccaggcggccgcaccgaacgcagcgccccactgcaacgcctcaagccggagattcccttaaatttcactcagctctctcacttaaaatgcacttaaattgcacactgggcacccatgtgcgtacatcggcctaccgaacggccactaaacaactgaaccacgcaaatgcacccgcatgtcgggcggcagggcaactctgggcggagttttacctatgcttttcactcgctgccgccaactgcttgctccttggggaccgcttcacctgtcgccgctcgcgaatcgcttcacttttaatttaacactagtttgccttgtaatttctttactttttcgccctcagcgaacagcgaacactcaaagactagggctgccaaagcatcgatggcactatcggcactcgcaggccgagggctacgcacgactatcgcaatggcttagcgatgacacttttaaagcattgctgtaaattttaaaaataaactataaaatttatattcgaaatatatttgattcttttaaatttatattagcacatcaaattttggaaatatttaaattgttattttccctatatatttttttttaattttaattttgttaatacgatttcatattgaaattgttttctacagtaagtgatattttatggtattcctattttattttttaagcataatttgcaaataatatataagctgtgttgccgatagtttaagaaaaaattctaatgcttgattgtttcatgaatcagcaatatgattcgcattcagaattttagtcagccgcatattcacattttcgagatacagttttgaatcatagaatttatcataaggaaaataattacaatttatacaaaaattgcaatatcacgtttttggaatattattgtaggggtcataatattccaaaaacgtgatattgcaatttatgtataaattgtaattatattccttatgattaattcaatgataataaatataataatttcttaaagtgattaattccatgaaaaacacactccactttaagataccgctaaaatggtcagaccgaaatctcttccaatgcttcagcgtcttttcgatttaatcaattcatataaactatgtatatttaggaaatcaacaaaagttaatatctaactaaaatttcgtacaaaatccagcgcggtcatcgacctagcggatcttggtgaccattccggcggcaatggtgactcccgccacgcgaagcatcacgcgtcccagctccttgaagtccgcataccgctcgatgcagatgggtctgctggtttccagttccactagggcacacgagttgttgcccaggcaacgcggcttcttcttgaccacctcg

SEQ ID NO: 2885 - DNA, 1170 bp, DROSOPHILA
tttgagtgttcgctgttcgctgagggcgaaaaagtaaagaaattacaaggcaaactagtgttaaattaaaagtgaagcgattcgcgagcggcgacaggtgaagcggtccccaaggagcaagcagttggcggcagcgagtgaaaagcatagtgtgctctcggtagcagtgacggccgtctcgaggaacagtcaagccaggatatttccgctcaaaaaagcaacaattgaacgcacgcaactcggcggaaggagcgagcgagagagggagcacaaacaccatcacacattcacacacactaacacacacacactcacgcagtcacttacacggcacaaaggttatcaacagcaaaagcaacaacaacaaacaatttactttaaatataaaacatatattaactaataagcaagagcaacaaaaaaaaacaaaaacaaaaaacaactgcaaccgacaagcaatcgccgaacaacgcctaaaaacaagtgattttcgagggagagccacctggaaagtgaacccacctacctggcctacctgcattttgggtctcttccctagaatttagcacaaaacaagagatatacgaaggatatacaaacagcacagcagccagcatgcgtgagtacaaaatcgtggtccttggaagcggcggcgtgggcaaatccgcgctgacagtccagtttgtccagtgcatcttcgtggagaagtacgatcccaccatcgaggacagttacaggaagcaggtggaggtggacggacagcagtgcatgctggagatcctggacacggcgggtacggagcagttcacggccatgcgggatttgtacatgaagaacggccagggattcgtgctggtctactcgatcacggcgcaatcgacgtttaacgatctgcaggacctgcgcgagcagatactccgggtgaaggacacggacgatgtgcccatggtgctcgtgggcaacaagtgcgacctcgaagaggagcgcgtcgtcggcaaggagctgggcaagaacctggccacccagttcaactgcgccttcatggagacctcagccaaagccaaagtgaatgtgaacgatattttctacgacctggtccggcagatcaacaagaagtcgcccgagaagaaacagaagaagccgaaaaagtccctatgtgttctgctataa

SEQ ID NO: 2886 - protein, 184 aa, DROSOPHILA
MREYKIVVLGSGGVGKSALTVQFVQCIFVEKYDPTIEDSYRKQVEVDGQQCMLEILDTAGTEQFTAMRDLYMKNGQGFVLVYSITAQSTFNDLQDLREQILRVKDTDDVPMVLVGNKCDLEEERVVGKELGKNLATQFNCAFMETSAKAKVNVNDIFYDLVRQINKKSPEKKQKKPKKSLCVLL

SEQ ID NO: 2887 - DNA, 5748 bp, DROSOPHILA
aaccagcagacagtactgggattttaagtccaacttccaagaacttacaataagatatcacagcaaagccacttcaaccaaaccaaaggaaccttctatgaaccctttgacgcccagaagaactccatctggagttcctccaccacgcagactcacatcgattaatgacgaatggtcggattgcgggtctattactataaaaatctggatgaccaactgaggtgatctacgcaatcctatcatggcagtacccagcattatgatcttaacagcagtacacaggaaatctttaggcaactcaacgcagtcaagcaatgaatatggcagcttaaccaagatgtttttattggagcagttgtccgatccgttggttgagctggaaaaacgggtggacttattcctatcgtatcttctatgaatgacgaaacaaacctatgattcaacttaaacgaaataaagaaacgaaaaaaaagcacgtcagcttgtttaacctttattatatttacctaagccttaagtaaaccttaaatttccgtgagctgtatctatgcaaaatcacttaagcgtttcaactgcaagtttgagggcacgaaggtcatgcgcttgattagtcagcgattggacagagccaactattcagaaaattggcaacgttaataggaaacactaataaggaaacaaactttaaaaattatggacacattcccgttttccccctttatttgcagtattgggctacgaatatcagcaaagtaagaaaaatcgagaatatgtctaacaaaatatttaaaatcaacttccccgaaaatacaaataagcttaaaactgtcattgggtgttgaataggatgtacttatatgcacatatatacatatggatctaaggtaagtataggtgtagatctttaagggctagcagaaccgttctcactaaaattattaatctttggactgcgtgtggcactcaaggcatcggatcccgacatggtttcacttccgtgctagttacgattgtagcccagaccgagaatattacgcgcctacaatagaaatgaaagattagtggatcactgtgcgattcatgcctggaaactcaccgtgatgaacgccgagttaaaggagcgttggaacgtgtgcgtcatgccctctgtttgggatagcatcatttggagttgcacagcctcgtccatgcggctcttgaggaactcccaggtctgcgcatgtcctggggacttgtcctgcaggaagtacaactcggtcatcttcatgatggtcgccagacccacacgtctcgtgtaccaaccgaactagaggaagctcattgattaagtcgggcattgtacatacgagactatacgttactcacatccacagatcgatctccggagtagtagcagatgtcatccaccagggtgagcacctgggccagagctgtgggcgcatgctggggctgggctaatagggccatcgcctggggccaatgcgtcttgtagggagtaaccatctccagacgctggcgcactgcttgtaccagaaaatctagaggatcctccacctcctgcttgccaccatctgtcttttgctgcaggctttccaccagctgggcgttgcacttgccgttgaagtgggagaccagcgcgaagccaccctcgggaaacatgccgtgcaccacgctaggatagccactttcctcggcacccagaatgatggcctggcgggtccagccctgctggggcacatgctgcaatgcagcgtccaggatctttgcccttatggcatccaccttggcttgcttggcgtcatcttctgggcctgtagactctgatccttttgcacccagtccaccacctccgcctgcttctttttgtgatgccttttcggcagcttgatcggccgcatcccgctccctttcgcgctgctcctcgcgggctctaaagtcttctagattggctttcttctcatcctttccataactccttgctattaaaaatgtcaatggtctcggctgcagtggagccaaacgggagctagtcgcatctgcaagaaggcgagcctttgtagtaacaccatttaaggtttgaaaaagcgagttttgtttttttgcctagctaattcatatatttgaaatacaaaaacatatttaaaatggctataaaaattagaaaaacgctgccagcttaggtgttaagtacgcacacctatgtgtacctatttgtgtgcaactagatttcagtgcgcagatcgcaatgcaaagcccgcatcgctggccagttagttagcacaccacaactggctcaattagtcggttaattatcgccccagccaagaacccacagaccacatagatcagtttaagtttcgatttcgttttcggttctgtttacacacagtttacgttatcatttcgctttcattgtggacaaactacaagctaagcatctgatggattggcaacccgtcgcaggcgagcggactgttcgatgatctctctggcgcgcagatataaagattgtagcgtttccaagctggtaatggaactggccagcacatcgagcttctcctgccgtccaatgtcgggcagcttgctctccgcgtcgccgccagccattccgctattgcttatgttgacggcgagcatgttgagttggcgctgcattagttcatcatccgaagcactctgacccttttcgacgcgctccttgtacgccttgtaatgggccatcgaaaagttaagcgctgttcccagtgggtccagcaattccttttcaatttccggcagagcctgccagaagccagtcacatcattcttgtctcttgccgcaaagtagcgtaggatattcagagcatgacacaggcgatcggagtgcagaagaagatcggatttcacgtcatggggcagcacacagacgcagagcagcaacatctcgcggaagagctttccgctataaacttccggcatgggaccagattgccctagcgccttgtcaacaaggtccttgtacatccctccgaggtagcccattagtccgccgtgctgcaatgtccccatcagatttttaaggatgagatactttccatgatcatcgaaggccagaacaaattgcctgagcacatgaattcccaactgccgaagtgcgacctgcggcgaatagcccacaatcttgcaaagggcttcgcaaaagcgcttgtggacatccagctggagggagctggtgggaactgagtgctgcaaggtactcaaatgatgttccactaatcgaagaccacaatattgtaggggaggctcctgctgcctgagtagcacttcagccagatagacaatcgtttcgaataggaataaaggtgcatatacctttggtgcgtttgtgggcagttggttacccacgaacagcgagtgatagtacatggctacagcatgcagcggaagtttctcctcgatgaggaaaacattctggcaactcatctcgtagacgcctctcgaggcatctagtttccttagccatctggcacgctgttccacgaggttgagcaggtagaagggatcccccaggaactggttggcatcctgagtcaggctttccgtaacctgctgcacgtaggatctcgtaaggtcctccttggcgtgattcatctccagcagggccaacggacgtcccaacagctgaatgaagaagcaagtgaatatgttgcgccggttgacgccgcaatccctgaatatttggctgggtgtccgcacatcctgctgcagaatttcatcgcggagcggctcccgaaagagtcccacggtgatgtagtgagccagaaggtcctccacctgttcgttttgctctatgagtcgcgcttgggcctcgtcatagccctcggagaggtattcgggcaggggcaaatccttgagatgggtgaagatgctattcaggctccactcaacggcctgcggcttgtcgcgtccctgtcgctgcagcacaacttgtagggcccgcagataggcgccgaacacattgatactgctactctcttccaagcgctccatcagttccagcataagctcatgcagtggggcgtacttggccagcagcttgagcagctcgtcagagcagtcgaatagttctggctcctgggagttcacctcgtcggaaatgttttccaagcacacgtcatggtatagatccatggctatgtggggcagcagccgagtgttcttttccgattcctgggcactttgaaacaacatccgcacgccatcgtaagctttttccagcagcagctgcttgatgagccgcagcaaattcgacgcctttgccgggtcccccacttccacctccatctcctgctcctgcattttatttatttgctttaatttttcactggtatttcacaattttattgaaaatagtcgaaaaatctaaggccgccggcatttgacagtcagcagttccctttactagctctctctctctctctctcccccctttctttcgcacgcacgcacaactcgatcgaacagctgattgtcggttgcggactctctttcgtaatgagcacacgcggtgaattcgcggctaacaggtgaattggggagttcacactacttactgagcggcagcaggagcttctgcagacgaataagcttgtataaacagcgcacgtttgccatttaagcggcttgaagtcgttgaggcaattgaaatcggtttgtttggcattcaccaggaagccacttacgttgtgttggaaagcggcgtaatccattgctgctgtagtatttttggtggttttgtttactgtagtgatttggtatatcttcagtgcttaacagcttaccttcatattccgacttttaactataaaagctaactctaatatcccataattccaaacaaactgtatgagaaaatgcgaaacactaaagaagtcgtaatcgattaaaatgttaaatatgaattctagacatttcacaagcttaaatttagctagaaaatagcagagctcgcagcattgctgttaactgcgaatgcgtaaaacggctgatgtaaacgccagcgaagttagaaatatggtcctctcccaactctggtcacactgagtcgaaactgaaactgaaactggctgggtgtgcggatcgtgaatttattaatttgttggccattttcgcaaactaacttaactcgccggatttagttagtcataaattaaaggcactccggtccgaacagtacttcgctcaggaattgctatctaggctgccgttaacaaaaaaccaaaatgccgaaggcgaagtgaaaaaaaacgcgaatatacacaaatatgctggtgaactcggagcaaaagttctaaattcacgaataacacaagaagatttaagcccaagtgccggaggaaaagccaactgctgtctgtgcggcggcgactcagtgaattttccgttttccgactccgcgacgagggtggaaacgcgtgaaaaaccgaaacgaaagtcctgctcgtgtgtgcaaataatgtgaataagaataagaaaagcctggaaaaacaaggagttggtcaaaaaataaattaaggcagtcgaaacgaaaatatgggcaaacaggcgcaatgtccgatgtgcggtttttagtgcgggagcagctcaagaatccagtttcgggctgcaaggcgtgtcaggattgaaattgaaccaccaccaacacaccaacaacagcagcagtagcagcagcaacaacaacagcgaaaacagccgctttagagccaattt

SEQ ID NO: 2888 - DNA, 2922 bp, DROSOPHILA
atggattacgccgctttccaacacaacgtaagtggcttcctggtgaatgccaaacaaaccgatttcaattgcctcaacgacttcaagccgcttaaatggcaaacgtgcgctgtttatacaagcttattcgtctgcagaagctcctgctgccgctcagagcaggagatggaggtggaagtgggggacccggcaaaggcgtcgaatttgctgcggctcatcaagcagctgctgctggaaaaagcttacgatggcgtgcggatgttgtttcaaagtgcccaggaatcggaaaagaacactcggctgctgccccacatagccatggatctataccatgacgtgtgcttggaaaacatttccgacgaggtgaactcccaggagccagaactattcgactgctctgacgagctgctcaagctgctggccaagtacgccccactgcatgagcttatgctggaactgatggagcgcttggaagagagtagcagtatcaatgtgttcggcgcctatctgcgggccctacaagttgtgctgcagcgacagggacgcgacaagccgcaggccgttgagtggagcctgaatagcatcttcacccatctcaaggatttgcccctgcccgaatacctctccgagggctatgacgaggcccaagcgcgactcatagagcaaaacgaacaggtggaggaccttctggctcactacatcaccgtgggactctttcgggagccgctccgcgatgaaattctgcagcaggatgtgcggacacccagccaaatattcagggattgcggcgtcaaccggcgcaacatattcacttgcttcttcattcagctgttgggacgtccgttggccctgctggagatgaatcacgccaaggaggaccttacgagatcctacgtgcagcaggttacggaaagcctgactcaggatgccaaccagttcctgggggatcccttctacctgctcaacctcgtggaacagcgtgccagatggctaaggaaactagatgcctcgagaggcgtctacgagatgagttgccagaatgttttcctcatcgaggagaaacttccgctgcatgctgtagccatgtactatcactcgctgttcgtgggtaaccaactgcccacaaacgcaccaaaggtatatgcacctttattcctattcgaaacgattgtctatctggctgaagtgctactcaggcagcaggagcctcccctacaatattgtggtcttcgattagtggaacatcatttgagtaccttgcagcactcagttcccaccagctccctccagctggatgtccacaagcgcttttgcgaagccctttgcaagattgtgggctattcgccgcaggtcgcacttcggcagttgggaattcatgtgctcaggcaatttgttctggccttcgatgatcatggaaagtatctcatccttaaaaatctgatggggacattgcagcacggcggactaatgggctacctcggagggatgtacaaggaccttgttgacaaggcgctagggcaatctggtcccatgccggaagtttatagcggaaagctcttccgcgagatgttgctgctctgcgtctgtgtgctgccccatgacgtgaaatccgatcttcttctgcactccgatcgcctgtgtcatgctctgaatatcctacgctactttgcggcaagagacaagaatgatgtgactggcttctggcaggctctgccggaaattgaaaaggaattgctggacccactgggaacagcgcttaacttttcgatggcccattacaaggcgtacaaggagcgcgtcgaaaagggtcagagtgcttcggatgatgaactaatgcagcgccaactcaacatgctcgccgtcaacataagcaatagcggaatggctggcggcgacgcggagagcaagctgcccgacattggacggcaggagaagctcgatgtgctggccagttccattaccagcttggaaacgctacaatctttatatctgcgcgccagagagatcatcgaacagtccgctcgcctgcgacggccgagaccattgacatttttaatagcaaggagttatggaaaggatgagaagaaagccaatctagaagactttagagcccgcgaggagcagcgcgaaagggagcgggatgcggccgatcaagctgccgaaaaggcatcacaaaaagaagcaggcggaggtggtggactgggtgcaaaaggatcagagtctacaggcccagaagatgacgccaagcaagccaaggtggatgccataagggcaaagatcctggacgctgcattgcagcatgtgccccagcagggctggacccgccaggccatcattctgggtgccgaggaaagtggctatcctagcgtggtgcacggcatgtttcccgagggtggcttcgcgctggtctcccacttcaacggcaagtgcaacgcccagctggtggaaagcctgcagcaaaagacagatggtggcaagcaggaggtggaggatcctctagattttctggtacaagcagtgcgccagcgtctggagatggttactccctacaagacgcattggccccaggcgatggccctattagcccagccccagcatgcgcccacagctctggcccaggtgctcaccctggtggatgacatctgctactactccggagatcgatctgtggatttcggttggtacacgagacgtgtgggtctggcgaccatcatgaagatgaccgagttgtacttcctgcaggacaagtccccaggacatgcgcagacctgggagttcctcaagagccgcatggacgaggctgtgcaactccaaatgatgctatcccaaacagagggcatgacgcacacgttccaacgctcctttaactcggcgttcatcacggcgcgtaatattctcggtctgggctacaatcgtaactag

SEQ ID NO: 2889 - protein, 973 aa, DROSOPHILA
MDYAAFQHNVSGFLVNAKQTDFNCLNDFKPLKWQTCAVYTSLFVCRSSCCRSEQEMEVEVGDPAKASNLLRLIKQLLLEKAYDGVRMLFQSAQESEKNTRLLPHIAMDLYHDVCLENISDEVNSQEPELFDCSDELLKLLAKYAPLHELMLELMERLEESSSINVFGAYLRALQVVLQRQGRDKPQAVEWSLNSIFTHLKDLPLPEYLSEGYDEAQARLIEQNEQVEDLLAHYITVGLFREPLRDEILQQDVRTPSQIFRDCGVNRRNIFTCFFIQLLGRPLALLEMNHAKEDLTRSYVQQVTESLTQDANQFLGDPFYLLNLVEQRARWLRKLDASRGVYEMSCQNVFLIEEKLPLHAVAMYYHSLFVGNQLPTNAPKVYAPLFLFETIVYLAEVLLRQQEPPLQYCGLRLVEHHLSTLQHSVPTSSLQLDVHKRFCEALCKIVGYSPQVALRQLGIHVLRQFVLAFDDHGKYLILKNLMGTLQHGGLMGYLGGMYKDLVDKALGQSGPMPEVYSGKLFREMLLLCVCVLPHDVKSDLLLHSDRLCHALNILRYFAARDKNDVTGFWQALPEIEKELLDPLGTALNFSMAHYKAYKERVEKGQSASDDELMQRQLNMLAVNISNSGMAGGDAESKLPDIGRQEKLDVLASSITSLETLQSLYLRAREIIEQSARLRRPRPLTFLIARSYGKDEKKANLEDFRAREEQRERERDAADQAAEKASQKEAGGGGGLGAKGSESTGPEDDAKQAKVDAIRAKILDAALQHVPQQGWTRQAIILGAEESGYPSVVHGMFPEGGFALVSHFNGKCNAQLVESLQQKTDGGKQEVEDPLDFLVQAVRQRLEMVTPYKTHWPQAMALLAQPQHAPTALAQVLTLVDDICYYSGDRSVDFGWYTRRVGLATIMKMTELYFLQDKSPGHAQTWEFLKSRMDEAVQLQMMLSQTEGMTHTFQRSFNSAFITARNILGLGYNRN

SEQ ID NO: 2890 - DNA, 4080 bp, DROSOPHILA
aaacggagtgggcggaggccccactaaaaccaccaccaacggaatgtcgaatgggacctacaagtcggcccaggcggttaagcagaaactggacctgctcatcgatgcccagatggagagtgtggtgcccagggagcgtgtggagtccaagctggagcgctccagcaccttttgcaaagacagcgccgatctggacatcagcgaattgcagatagtggagtaatcaaaaaacaaaacaaaaaaagaaagggaagaaaagcaagcgcatcaaatggggtgagcataacgactgaagctccaaataagcatggtaaccatatcgaggcacttatctttccaggtcgtatcaaatatggccccgagcagatgcccaaccggatccagaaccgtacacgtcccataaggcaacactagtcaataatctagcatgcagctgccgttgcagttggcgcatgaaaccattatacaataacgataataacgagatgatgttactaccagcagacaaacgcgataattaatacgttatgacagacatccggaacccaaaaaacaaaaacaaaaacaaaacaagttattgccgtttaacctaacccactcctatattagcttattgcgttagggaagttagcgatgaattgtatgcaaagcggataagacagataaattgcaaaaacgaaacaaaaaaaaaaaaaacaaaaagaaactgaaaatgaaaacaagtatttggtgatattatttagagtgcgctttatgtttacgttaaatgccaagcgacaagtgcttataacccgaactctctactcaaagtacgatccagtggatcgaaggatgctctactatatgctttatgcgctttgcagcctgcatttaaggtccttttctctctatttccgctttattgtcaaagcccgcccaatacaagtctcggtctacatatgagatgtggatgtggatggatgatagccatctctataatttaagcttgaactttttatactgttgtttatttaactcgtactcgtaacaatggcgcattacttcagcaaggcaaccaaggaaacgtctctaacattttatttttaaaattatttataaattttacttatttggtaaatattgaacgaagcgagcgaaagtgaatttttgtaagcaacggcattgatacattgataatgaagtgcaagagtaataaatgtgtgtatttattaaaagttaccatatattaaacatggctttcattttcattcggctgggaggaggaggaatcaactaccaacttatagtgaaatgcttactaaatgaaaacaaattacttattaattagtattaattgggcctcataccaaatgctttgtaaattcttattcttccgttctacatgttatctattagctattttctacaattaaagtatcatacaaagcgcgttccgcattcatttaaattccccacagatggtaattagtattgaatctgggattacaataaatttcgtatagttaagtggcttccagtcatataatccctaataatattcgttcagcatgccgaatgtgggcttgccaggctagagctgtgcagcgtatgcaacgagtttaaatctacattcgacgtagcgggtggcagctatgagttcatggatattacccagtggttgaatacattccggcagtggatgacgacgcactcgttgctgcagtactcgtcctcccagtccggatttatgatagctggcttattgcactgttcccgtgtgcacttctgcaccctagccgcttcggtgaggagctgtatctgatcgggcggcggctcctgctgggcatccaccgactgttgcagatcctcgacagactccaatttggttgtgactagaggaggtggctgattggtagctactgctggtggggcctctgcctccgacgtaccctccgactcggacagctggtggcgatagcccctcatcagacggacatactcgcgcttctcctgctcgtgccgtagggcatagacgttcttctgcgtctcgtccagggactcccacatggtttgcactatcacttgcatttgctccaacgaacaggtcggattctgctgcttgatggccgtcacggtgtctcgaaagaacagagcgaagggcgccagaggtttaggaggtgcttgcgccatggcctggttctgctgctgctccggctgaaccagcaagttctgcccgccgccgctggcatatgtgtcgcaattttcctcgtcatcgtcgttcaacatggattgatccaggctaagcattctccgcgactgcaaagatacaaagggcataacattagtggctgatgaatgactccagtcccagtgcgctcactagaaacttcttcatcccaatcagagagtgagcaactaaactaatgtacaaatcgcttgcccaagcccagatcagttggtcgggcgtagcgggggcgggactgtagtgttgtgtgcgtgtagcctgcgctactgattgtgcgactctgtgtgcgtgccgcttgctgataagaagctgacgcggcgtttgtcccgcgcgcccaagcgataacccagcggctgggggtgggggagcagtggagagatagctcctccagctggtcgctggcccgcagaagctacaacaaactagtgtgtcgcggtattccgattgcgatctctcccgctcattaaaaaaccattacgatgcgccatcgatgcgcgtcaattaaggcggacggtggtcggtcagctgtgaaaactcccattgcagccggtgtacatttgtccagttggccgccctgctcctacggattggaccctaaatggaatgaccctcctccacttacggcttggctggggctctggctctccgccggcgtgtcggtcagctcaaacacctcgtcgccgaatgagggagtgtggaactgattcatgacgctcctgcaattctcccaggcttatttacaaataaaattaaacaatgccaggcgttttattatcgtgggccttaattagtgtgaccgccggcgggtatgtgctaaatgcgttgggacagtattttcaagcactggcttgctcctcaaatggaaccagttcaaattcataactgacaaatatttgttgtttaactatgctaaacttttttgaaaatatatatgtattttcttaacaataattcaataatttaagtttttgaaaccaatataatagctgtatagaaacgaaaataaaagagaaccacttctgttccagcacagttccggttccgcttctgaagtaccgttgttaaaaatattcagtcgacgctgctgtaatcaaaattgacagttttattaaaaatagattagatgcaatagaattattttttggaccgtaaagtgcaaaattttcatatgatctgtgtcaaaagaatgccgtggagcaatgttcgcatatttctgaagctcgcttcccagcgatgccagctcctaagtgtgggctccatccaagaggcgtctgcaggacaccgatcgggctccttcgaatcggatgccctgtcgagcacttcgaatgccaggcacatggagtgcctgttcgccaagtggctgggggacactagctcggtcaatggagtgggttatatgacctgcggtcaaaatacctatttacattgccttttgatttcgcagacctggcagaatttcttcaagggaatggtagagaaacaaatagactcgcaaccgcctcggaataaagaagcagaaggagatgttcttccctcggtaatttcgatcttctttaatatgctttttattcttcaatttctttctttaatcacagataggaaccacaacgccaacagatgcagcgattggggctccagttttgggaaggagaaaagcagtctcttcttcggcacagcagagtcctttggacacttcggaagcggacttcaacagttgcgtggctcagtctcaaaagcatgatattggagtgctttcacactcaacggatatcagaacttctggcatatacgacaaacagaaactgcccacattgcccaaagatggcattctgaaaggctgttcaataaacggatca

SEQ ID NO: 2891 - DNA, 1491 bp, DROSOPHILA
aggagcaagccagtgcttgaaaatactgtcccaacgcatttagcacatacccgccggcggtcacactaattaaggcccacgataataaaacgcctggcattgtttaattttatttgtaaataagcctgggagaattgcaggagcgtcatgaatcagttccacactccctcattcggcgacgaggtgtttgagctgaccgacacgccggcggagagccagagccccagccaagcctcgcggagaatgcttagcctggatcaatccatgttgaacgacgatgacgaggaaaattgcgacacatatgccagcggcggcgggcagaacttgctggttcagccggagcagcagcagaaccaggccatggcgcaagcacctcctaaacctctggcgcccttcgctctgttctttcgagacaccgtgacggccatcaagcagcagaatccgacctgttcgttggagcaaatgcaagtgatagtgcaaaccatgtgggagtccctggacgagacgcagaagaacgtctatgccctacggcacgagcaggagaagcgcgagtatgtccgtctgatgaggggctatcgccaccagctgtccgagtcggagggtacgtcggaggcagaggccccaccagcagtagctaccaatcagccacctcctctagtcacaaccaaattggagtctgtcgaggatctgcaacagtcggtggatgcccagcaggagccgccgcccgatcagatacagctcctcaccgaagcggctagggtgcagaagtgcacacgggaacagtgcaataagccagctatcataaatccggactgggaggacgagtactgcagcaacgagtgcgtcgtcatccactgccggaatgtattcaaccactgggtaatatccatgaactcatagctgccacccgctacgtcgaatgtagatttaaactcgttgcatacgctgcacagctctagcctggcaagcccacattcggcatgctgaacgaatattattagggattatatgactggaagccacttaactatacgaaatttattgtaatcccagattcaatactaattaccatctgtggggaatttaaatgaatgcggaacgcgctttgtatgatactttaattgtagaaaatagctaatagataacatgtagaacggaagaataagaatttacaaagcatttggtatgaggcccaattaatactaattaataagtaatttgttttcatttagtaagcatttcactataagttggtagttgattcctcctcctcccagccgaatgaaaatgaaagccatgtttaatatatggtaacttttaataaatacacacatttattactcttgcacttcattatcaatgtatcaatgccgttgcttacaaaaattcactttcgctcgcttcgttcaatatttaccattagagacgtttccttggttgccttgctgaagtaatgcgccattgttacgagtacgagttaaataaacaaca

SEQ ID NO: 2892 - protein, 250 aa, DROSOPHILA
MNQFHTPSFGDEVFELTDTPAESQSPSQASRRMLSLDQSMLNDDDEENCDTYASGGGQNLLVQPEQQQNQAMAQAPPKPLAPFALFFRDTVTAIKQQNPTCSLEQMQVIVQTMWESLDETQKNVYALRHEQEKREYVRLMRGYRHQLSESEGTSEAEAPPAVATNQPPPLVTTKLESVEDLQQSVDAQQEPPPDQIQLLTEAARVQKCTREQCNKPAIINPDWEDEYCSNECVVIHCRNVFNHWVISMNS

SEQ ID NO: 2893 - DNA, 4899 bp, DROSOPHILA
ggggccaaaactatgccacgataatcacgacgaaaccgaaaactgaaatcataaacgaaaactgaggctgcgacaaaatctcggatgcatattgtttaaatgaacttatttagaaaattaacatttaacattgtaacatttaaacctacgaaaagttactaaaagaaccaaagacagagctttatcgaaggtattctattcgtatttctaaatcataatataagaaacctttaaaattaagatttaaagctgtaaaatgaagaaggtattgtattgctttaatctttcttaattatatattatcgtttctacgcacaaacattttactaccaaagtattactcactattttgagatactttttatacaccccatttatgttttaggcataatttgacatgaacacttcgcccctgaaattatgcaacatttttacagccttcaaaaacatgaaaagcctaaaagtgttttaaaaatccaagactctagtagctgcataaaataaataacccatcaaatcataattctccaatgaagaggtattacttagtcggatacacgaaaaccacctgccagttaaagaataaaatgcttaaatcaggtgccacagttcgatatgtttgtgctgtttatttcgacagatctacgtgccttcgagcgtgtatatgatagatatataaatatatatgtatatatatatatagttggtattggtataattgtttacaaaaaaaagacgcctagcaaaacaaaagtccatataaaaggacgatacacgtatataatacactaaaacagttaacatcctttcgattttccattccgatttggtagcactagtttcgttcgtttcgttttttttttttctttttggaagccacattcttgtcctgcatccggaaaacttcgagcccaaatacatatgtaggatatatgtgtatatatcggaattatcacaaatgcttatgatctagctaaaatagcgtatagttaggcttgcttcaagcgcgctgggatcgtgagttgcgtgtgggtggtgtcttcgaccagctttgctcctcggcgctggcgaagatcaggtagatgaagttaccggctatattcaagcccgccgccagccagaagaccagatgccactgtgtcagagtctcgcgatgattgatgattagaccgatgacatacggagccaggaagccacagatatttgccgccgaattggtgatgccatacatggtgcctgcatatcgtggactgagcgctatgtgattcatctggttgccagcatagacggcgccgccgaaagagcccacgccggccaacataaaggtgacccacacccaatcgcagcccacatagatgatgccaatcaggcccagtgatggcaccacggaggccaccgtgttccacaacttatacgagttcagcagcgatatgtagcgtctggctagcatccaatccgccagggcggagcaggcaatgcccacgaaccaggaggttagatacggcaccgcattgagcagagcattcgactggatgtcaaagtgtaggatgttgctcatgtaggtgggcagctcggttagctgcgtgtagaaggcccatccctggccgcattgcgtcaacaagatggcccacagaggtacggatgtgagcagcgatgaccagggtatcggttcctccggcggcgcccgcagactcacttcatcctgtccctcctcttcctcggcctccgctagatcctgatttattagcctctgaacctgtagactcctttcgatatactctcgctccgattctgagatcctgggatgatcgctaggcttgtcgtacaccaaatacatccatgcgatgaaccacagaatgcccaacagtccgaagatgtagaaagccgacggccagccacccaggaagtccagcgagcacagccatccggccagcggcatggaaatgactgttccgatattggagcccgcatagacgattgcggcgaacttgttcctctccagcggcggtatccagtgggcaagcatggcgtgcatagctggataggtgacgccctcgcccattccctccaggatgcggaccaggaccaacagcggcagatcccagtgggcagccaatggagttataagcgtaaagaccgccgtgatcaacactccatagccgtagatcttcttcccaccatacagctcggccatccgtccgccgggcacttgggttagcacatagccatagaagaaactgccgagcaccaatccctgcgtggcctcgtcccacacaaactcgccctccttctgcggattgggatcgctaccattgtgatgtggtgccggtagtggacacgtgtccgtatcaatcaccgatgagttgctgtgcggaattgccgtttggttcaccatggccacaatggccaccgacagattgacccgcatcgcgtagaccacggcgaatcccaggaagcccatgaatccgaaaatgtgacgcgtctttgggccacagccatggttttctgcagggtggagagaggagagagtggatggttagtaagctatggtttaggaggcgtaataacgatatcagttccggttttacttaaaagttctcgccgttctcgataaggcccaatgttacactgaaaatccctaaataccattcaatgtgttatcattgcatagtttaaattgcctcaatttcttcacttttttattcctttagaaatgtttacatgagatgccattgccagtgaatttaatttcttttcagatacttgttcataggaatcgctcaagtataaaatctaaaataaaaatattacgatctgataccatcgaaaaagttatcggccctccgttccatttgaaatgcagatttgtactgttctataaagttcagaaaaacttcgcttcatatcagtaaatgtaaacaagtcgtaatttcggcccttggcgaataaattatacataggcataggctgttaactggataactggatagtattacgtgaaaattaaaatttatgcgtaattattaggttattttatattatatgtatgttatgttatatgtataaaaacattttaattatttttattagttattgaaatctataagccatataatatcttactttaagattaaatgagaattattataaattgaaagatacaattttagagtgtcttggatatacgtaaaatgaaatttgtttacaacaaaaagtatctttgcgttgagtactgtttttttttacacagatattccgagagtttatgtttaataaaagtactgacccaggacatatgtatgtacaatacataaatgcaaatcaatatgaagcagaaatagcactaaagatttaaataaataaaggtatcttgagcttgtaatacgcatatctacgttgctccacctacatatgctatagctaggtaaatatctttccccatctgtgtatcttgtagctactcaccctccgcagcgccgctggagcggattagcggtcgttcgccggagcaaaacgcctcccgttcgtcgtccgcttcgtcgtcggagcgctccgccgaggcggatgaattggaggaggtggatggatcgtagtaacaggaggcgtcccgcgactcgtccgtccatttgtgcggtggcatcgtggcgctctatttggtttcgtggattccgattggagatgttggtgcttggcggtctgtgcttttcgagcgtcttttgagcgtttggaactgcaactgccaacgcattttctctgccggagcggcagctgtagtgtagttattgtatttgtatcgccagcggtggcggaagcggtttgcttgtccaccaaaatcaagagccgtgtgagcgggagcgggaacgggagcggcaacgcgagcggacacctcaccacgccagcgggaaccagcgcagactgacggactggcaaatggcaacgggcaacggacagcgcaacaacaaacctaagcaaaaggcagcgccagcaaacgtagcttctaaccacaagaggggtaacagtggcgtagttgtggggtggcgagccaaaatcacagaggggattcctcgagtgagaagagtaaatactttctggcgatagaatgatggcgtagttctttgggaatttcagtcattgtttagttgccccttttgctgcgccactgcgtttggagtcaccacagctcgctccctctctaatggctggctctgtggcgttctcgctctctcccgtgtgaaagtggagcatgaatggtgcggcgctacgtcacagaaggggatgcaagaacgaaagagagtgggtgagagagagagcattagagagggccaaagagaaagggggtgatgtgcgagaagagaagagagtgcagtgtgaattgtattgttgtgaactaacttaagtatactatctttgtttagttacagttagtttacacacacacacaaactataaacggcgatatggtatatttgccagcactgaaaaattactatttgtaagaaaataaaaacaataaaacaaaactaatttccagatagtcgaaatcaaaaagggaatttgtactaaaatcttgagaataaaaacaacgaggagagaaaggcaaagtatactttagttgccaacacaaatacacgcacactcaaacaactcaggctaacacaatagctacgtttaagtagccaagctcttttaatgtatgtaagtcaattcaagcaggctctagttagagaacaaaagaaatgagcaaaaacctaaattccacacatagtatgtacatttctacatctggaaatttttccatatttgttgtccgtttacaatgaaatagataagataaagggttaagttgatcgatcgctgcgtagctcgcacaaaacaaaatgttcttttaaaaattttcat

SEQ ID NO: 2894 - DNA, 1939 bp, DROSOPHILA
ctggcgtggtgaggtgtccgctcgcgttgccgctcccgttcccgctcccgctcacacggctcttgattttggtggacaagcaaaccgcttccgccaccgctggcgatacaaatacaataactacactacagctgccgctccggcagagaaaatgcgttggcagttgcagttccaaacgctcaaaagacgctcgaaaagcacagaccgccaagcaccaacatctccaatcggaatccacgaaaccaaatagagcgccacgatgccaccgcacaaatggacggacgagtcgcgggacgcctcctgttactacgatccatccacctcctccaattcatccgcctcggcggagcgctccgacgacgaagcggacgacgaacgggaggcgttttgctccggcgaacgaccgctaatccgctccagcggcgctgcggaggaaaaccatggctgtggcccaaagacgcgtcacattttcggattcatgggcttcctgggattcgccgtggtctacgcgatgcgggtcaatctgtcggtggccattgtggccatggtgaaccaaacggcaattccgcacagcaactcatcggtgattgatacggacacgtgtccactaccggcaccacatcacaatggtagcgatcccaatccgcagaaggagggcgagtttgtgtgggacgaggccacgcagggattggtgctcggcagtttcttctatggctatgtgctaacccaagtgcccggcggacggatggccgagctgtatggtgggaagaagatctacggctatggagtgttgatcacggcggtctttacgcttataactccattggctgcccactgggatctgccgctgttggtcctggtccgcatcctggagggaatgggcgagggcgtcacctatccagctatgcacgccatgcttgcccactggataccgccgctggagaggaacaagttcgccgcaatcgtctatgcgggctccaatatcggaacagtcatttccatgccgctggccggatggctgtgctcgctggacttcctgggtggctggccgtcggctttctacatcttcggactgttgggcattctgtggttcatcgcatggatgtatttggtgtacgacaagcctagcgatcatcccaggatctcagaatcggagcgagagtatatcgaaaggagtctacaggttcagaggctaataaatcaggatctagcggaggccgaggaagaggagggacaggatgaagtgagtctgcgggcgccgccggaggaaccgataccctggtcatcgctgctcacatccgtacctctgtgggccatcttgttgacgcaatgcggccagggatgggccttctacacgcagctaaccgagctgcccacctacatgagcaacatcctacactttgacatccagtcgaatgctctgctcaatgcggtgccgtatctaacctcctggttcgtgggcattgcctgctccgccctggcggattggatgctagccagacgctacatatcgctgctgaactcgtataagttgtggaacacggtggcctccgtggtgccatcactgggcctgattggcatcatctatgtgggctgcgattgggtgtgggtcacctttatgttggccggcgtgggctctttcggcggcgccgtctatgctggcaaccagatgaatcacatagcgctcagtccacgatatgcaggcaccatgtatggcatcaccaattcggcggcaaatatctgtggcttcctggctccgtatgtcatcggtctaatcatcaatcatcgcgagactctgacacagtggcatctggtcttctggctggcggcgggcttgaatatagccggtaacttcatctacctgatcttcgccagcgccgaggagcaaagctggtcgaagacaccacccacacgcaactcacgatcccagcgcgcttga

SEQ ID NO: 2895 - protein, 559 aa, DROSOPHILA
MPPHKWTDESRDASCYYDPSTSSNSSASAERSDDEADDEREAFCSGERPLIRSSGAAEENHGCGPKTRHIFGFMGFLGFAVVYAMRVNLSVAIVAMVNQTAIPHSNSSVIDTDTCPLPAPHHNGSDPNPQKEGEFVWDEATQGLVLGSFFYGYVLTQVPGGRMAELYGGKKIYGYGVLITAVFTLITPLAAHWDLPLLVLVRILEGMGEGVTYPAMHAMLAHWIPPLERNKFAAIVYAGSNIGTVISMPLAGWLCSLDFLGGWPSAFYIFGLLGILWFIAWMYLVYDKPSDHPRISESEREYIERSLQVQRLINQDLAEAEEEEGQDEVSLRAPPEEPIPWSSLLTSVPLWAILLTQCGQGWAFYTQLTELPTYMSNILHFDIQSNALLNAVPYLTSWFVGIACSALADWMLARRYISLLNSYKLWNTVASVVPSLGLIGIIYVGCDWVWVTFMLAGVGSFGGAVYAGNQMNHIALSPRYAGTMYGITNSAANICGFLAPYVIGLIINHRETLTQWHLVFWLAAGLNIAGNFIYLIFASAEEQSWSKTPPTRNSRSQRA

SEQ ID NO: 2896 - DNA, 6455 bp, DROSOPHILA
tttgacgattaggtaattttatgctagatttttgggaagaagatagaacattatatgtcttaaaaatagatttttttctataaaaccggaattatctaatataagcttaaagagagatgagattacataataatttaattaaatatttaataattatttaataacatgtttaatgacatacttgagtaatatgaagcggaaatacctatttttatcaagtggtgtgaatatgacattttgaaattcgatatgatgtacattggtatttattctgcggctggatggtatttttattgttatcggccctggcgcacatatggtaacactgtgctcaaagtcgattagtcgtttttcgttggagagcttgctgttcgcatttatccgcctgctcgcgcgtagaaaagttgttacttaatgttcattgctgccacacgtgcttgattattaattgcagtgcgctaatcagtcgcttgtcagctgagcagaccacaaaaaacgaaggcaattatttaggctgccctttcagttcggcattacataagaaacgaatggccaaacgaaaataattttgaaacaatttcggagttaatattgcatcagcaattctgaacagcagatacacaaaaagggcagcaatttggccaacaaagtcttcataaacgacaacaaacgagtgaaaatatgagctgggcaacaacaaagcaaaggcacaaatgtttcaactgtagcagcggcagcaacaaaaacaaccggagcagcggcagcagcagcaacaacaacaactgtgcgcctagcaacaagataatttcgacgagcgatttcctttgatttgcgcccatctgtgtcgaaagcagccgaaaagccaaagagtgtaaatagcacgtagttttagtacaattcactgtagcaaaagtgagtttcaaccggggcagccaataagcctgcgatagcaacaataatacagaacgagcgcaaaagaaatcaccagagattgcacaatatgaatccgatcaaggcacagtcaacgggcagtcccaagaaattcaacgtattcgcacacgtcaagtacgagcatttggttgccggagtatccggcggagtggtgtccacactcattctacatcccctggatttgatcaagattcgattcgcaggtgagtcatccacacgcctcggggaattccacgatttccgtgagcaagcagtagtacactaatataacatcttatagggaaatatatttgttgaataatccaaaatgccagtgctctaatttaagtattgtgtttcgcaatatggctctgtaatataggcacctttctgattaatctgggcttaaaatagaatacaaaaactatacctattaaaagaaaattgtcaactgatagagaaaaacgtatatgtcaccataggaactagcactacgtatattgctgtgtagtaaagagcactcggcacgtgcggggaaatgccgccagtctggctgcagattattgttgcactttactcgccgctcgcgttttgtttgcgcaatgctttacaaattttccatggaaagtttgagacgctactcgggtatccgagaattcgcacttgatttttttttttgtgcaccatggaaaatttgagaagcccgtgtagtcaagtagtgacgtgcatgctttcgcacataaacaatgctgatgaatggggccacgggcacgtgaaaacatagtttttcctcaatgcgatagaaagatgaaatttatggttgtgttgacaattgtgtgtggaatctcaaattggtctaatctggattttgcagacaggaaacgtggggcaacagcagttcgaattgtttacttgcttttacttttatgccgcctggccaaagatcgatacaagctatcaacctttgatattaatggctataatatgagccatcagcttacgcaggccattgtgtttatgactatttgctgaaaactacttctttgtagtcaatctgaatcatatgtttggcctcgtttgcgtttcatgcgcaaaatacatgaacaacatttccgtatagtctgcttcgggataccaaaacaacaacaacgaaccgagagcgggtttcttgattattaaatattgttgccgtccagtttgcccggatcagtgctaaaaatcgttaacgcagtaagtgaatatgtaaattcaccagaaaagtggcttgtaaacaataacaaccagcacacgagttgtttatgcgaattaaagtcacaccatgcgagttttgtgaactgataaagcgaacccaagttgggatggttagaaaatccagagctagtggtttcgccgcaatgaacctccttgaatccggtggcttctcgatttggcaacagctgttttctattgacttgcgcaaggcctttatggcgatgacgcattttggccaaacgaaacccgtttatcttgcttttgattttctgctcttgctcgtttttaatcacgtgaccacttgactcgactgtacattgcaatggctttgttaacggcaactttcagcggcaactgtccggtttatgtggcacaagcgccagttccagtggctaaaaacgagttccaactgttgccatgcgggaagtcgactgattcagcactctgcgaccttatcgctgcgactttatcgagtgcatgtcgaaaaactctttacgctggccaaaaccaatgtggttgcttagtcgtaaataccccaaaagaacttgcctcttgggctgtccagtctcctttcaaggtcacccatgaggatgctataaatagtctagaagcgaagacgagcccctttcttctgcctggtactgttgtcaggccagatcttatgattgcccagctcatatagaatatgtcgtcccatataaatagctaagtatctgctaatgggcgcgaaaacaagtagagtggctgatttcgacgctcccagcttatcgcatccgctggcaattaatgctatctatctgcttttggcgaaaacaactttggccacgggcctggacttgttggtttcggagtcaacaactgatattcccgtagacgtacagttgcctaggtgaagagcaatacacacaatatgacgcattcgccggcccttcagtgacagtatccataatcataatcgtgccagacccaaggctgcaatgtctagacatgtttatcatttacgagcgtgattccttctccacttgcagttaacgatggccggacagctacggtgccgcaataccggggactgagcagcgccttcaccacgattttccggcaagagggcttccgcggactctacaaaggcgtcacccccaatgtctggggatcgggctcctcttggggcctgtacttcatgttgtaagtactttgctctactgataatggtaacaaacctaaatgtaaatactcccttcagctacaacaccattaagacatttatccaaggaggaaacacgaccatgccattgggccccacaatgaacatgcttgcagctgctgagtcgggaattctcaccctgctgctgaccaaccccatctgggtggtgaagacgcgtctctgcctgcagtgcgatgccgcgagtagtgccgagtacaggggcatgatccacgccttgggccagatatacaaggaggagggaatccgtggcctgtaccgcggctttgttcccggcatgttgggcgtctcccacggagccatccagttcatgacctacgaggagctgaagaacgcctacaacgaatatcgcaaactgcccatcgacacgaagctggtgagtaggcagatcacaaatgaccaacccatcacatgaccaagctgcgcgtggcgttgacatcgcctatatactaaattgggtgaacagatgcggttaacttaatagcacaaaattattacttatacaaataacaaaatactttgaagtctttaagtttaatgcgtaacgttcaaaaattgaaaatctatcgagtacttttttttcaattacttttttcgttagaagactttcttaatcagaaaaatatttgttcgctttgttatattttgtgtgaccacatctgtatctgtatccgaatatatctggttgtgatgacgtctccgccatttggcagccattcagctcattctgttcgcctcactaatgtgtgctccctcacccacaggccaccaccgagtacttggccttcgcggctgtctccaagctgatcgcagcggcggccacctacccgtaccaggtggtccgggcacggctgcaggaccaccatcaccgatacaacggcacctgggactgcatcaaacagacttggaggtacgagcgcatgcgaggtttctataagggcctggtgccctacctggtccacgtcacgcccaacatctgcatggtcatgctgatctgggagaagctgaccagctagatggagtattagtactagatcatcgaatctggaatctgacagagaatttaagctaagcacctagaatacacgaatctttctcgtttcctccgatgtgcagctaacagcagaaaatgacaaacttattctgtattattgttgtaactcgatttcggtttagccctagcaccttactttagccttaagtgtattccatatctagtttattgtacatccttcactcccaacttcgaaagtaactgatgtgatcggggcgtcgtcaaaatagcccctgcccatgaaatgtaatttcaaaaacgcatttcttgcactcttcatcaaaacaaacacatatttagttcttagtttagttaaattatttattctataacggcttggaattgtgtaagcacaaagaaaaaccagttactgtttagttgatacaaaatttcgttttggcaaaaagattcttcatagtttttgaaaatggtttataattttaaggataaaccttgacatttatgtaaataagcataaacgcattgtgaaaccaacttagtcctacagtggaacaatcttattgaaatcaaagaaaagataagaaatgcgaaattacttacccatattaaaaggccacgatggcagacctaaatgaaaaccaagaaacaaactaaagcaaacactgtcagcgcgtccagcctgcgtcttttcatttgtccaagggctcatggcagcttgagtaagtagtccttgctccttccgctccctaagtcttcgatcacccccttaattgtgcagaatctctttgctaatctgaaacagccaatgcgcccttactgtaagtagatgtagctttcagttctcagtctctaaccgcattgtgtttggttctctttgcaggtttgagggctacagaggcttctacaaggggctgaaggcgagtttaacccgagtagtgcctgcctgcatggtcacctttctggtgtacgagaacgtctcgcatttcctgctcgccaggcggaagcgaattgagactaaagaggatgcgtcggacgtgtgattttcctttggttggattccttttaggcttctaagatacatatatcacctcacgacatttccatatgtctctatagtcagcgggcagttgcaatcgtgctgagcatgcgcagctgcttttagtttaagtttagttagttgttgcgaagacttatttggtcttttcgtagtaagtaaagtgattgttgttcctaagtgtggatcagaatggatttgtgattgaattcagacgaaagtgttacaatatacctgtgaaatataagtccatagcctcactcttgcaaataaaccaaatctttgtgagccaaagaatgcctttttctgggtgtgatatccttgtttaaatgaataataataaaaaaaataaactatctggaaaattataccatctggcatctttatagatcgtgtaagctttgcaaaaagcaaccacagtggtatccctctaggagtagtatatatttttatatttgaattaacgccgctctaacttaaaaatcgatttaccgccaaacgatgcggatttcaatctagtccgactcggagtccgtttaacggttttctacgtagagcttttcgcaaagctctcgctttcggatttgttcgtgcgacaaagttttccttttgttttcggttcagttataaactgaaattactggaggtcggacgtctcgaggctcggaatcactgttgttgttgttttgcgccgtcttggctcgtgttgttgttgtcttgcgtagtattgcgtgcctggaaatcgaacgtgtgtgaatttaatttacgattcgtataattatcagcaagagcaaacaatataagttgcaaacgaccgtttaagccctatgacactaagatccaaagtaagtggctaccaccgaactgttccatttgcatttgaaaccagtttccagcgattcgagtgcatgaaattgtccaaaaaagtgcaacggtcgagttcaacaaaccgatcgattgagataacaccgcaaatatatagctgt

SEQ ID NO: 2897 - DNA, 1083 bp, DROSOPHILA
atgaatccgatcaaggcacagtcaacgggcagtcccaagaaattcaacgtattcgcacacgtcaagtacgagcatttggttgccggagtatccggcggagtggtgtccacactcattctacatcccctggatttgatcaagattcgattcgcagttaacgatggccggacagctacggtgccgcaataccggggactgagcagcgccttcaccacgattttccggcaagagggcttccgcggactctacaaaggcgtcacccccaatgtctggggatcgggctcctcttggggcctgtacttcatgttctacaacaccattaagacatttatccaaggaggaaacacgaccatgccattgggccccacaatgaacatgcttgcagctgctgagtcgggaattctcaccctgctgctgaccaaccccatctgggtggtgaagacgcgtctctgcctgcagtgcgatgccgcgagtagtgccgagtacaggggcatgatccacgccttgggccagatatacaaggaggagggaatccgtggcctgtaccgcggctttgttcccggcatgttgggcgtctcccacggagccatccagttcatgacctacgaggagctgaagaacgcctacaacgaatatcgcaaactgcccatcgacacgaagctggccaccaccgagtacttggccttcgcggctgtctccaagctgatcgcagcggcggccacctacccgtaccaggtggtccgggcacggctgcaggaccaccatcaccgatacaacggcacctgggactgcatcaaacagacttggaggtacgagcgcatgcgaggtttctataagggcctggtgccctacctggtccacgtcacgcccaacatctgcatgcctgcgtcttttcatttgtccaagggctcatggcagcttgagtttgagggctacagaggcttctacaaggggctgaaggcgagtttaacccgagtagtgcctgcctgcatggtcacctttctggtgtacgagaacgtctcgcatttcctgctcgccaggcggaagcgaattgagactaaagaggatgcgtcggacgtgtga

SEQ ID NO: 2898 - protein, 360 aa, DROSOPHILA
MNPIKAQSTGSPKKFNVFAHVKYEHLVAGVSGGVVSTLILHPLDLIKIRFAVNDGRTATVPQYRGLSSAFTTIFRQEGFRGLYKGVTPNVWGSGSSWGLYFMFYNTIKTFIQGGNTTMPLGPTMNMLAAAESGILTLLLTNPIWVVKTRLCLQCDAASSAEYRGMIHALGQIYKEEGIRGLYRGFVPGMLGVSHGAIQFMTYEELKNAYNEYRKLPIDTKLATTEYLAFAAVSKLIAAAATYPYQVVRARLQDHHHRYNGTWDCIKQTWRYERMRGFYKGLVPYLVHVTPNICMPASFHLSKGSWQLEFEGYRGFYKGLKASLTRVVPACMVTFLVYENVSHFLLARRKRIETKEDASDV

SEQ ID NO: 2899 - DNA, 5119 bp, DROSOPHILA
gcccttaagaaccacaagaccatgcaccataattaatgcgatcctacaagtgtccccgatgccccaagatcttcaacagaaactctgcccttaagaaccacaagaccatgcaccataattaatgcgatcctacaagtgtccccgatgccccaagatcttcaacagaaactctgcccttaagaaccacgagaccatgcaccataattaatgcgatcctacaagtgtccccgatgccccaagatcttcaacagaaactctgcccttaagaaccacaagaccatgcacaccataattaatgccaaaccaagaagaacgaccatgatgttaaaagactaatgcaacgtgttaccaaagtatagggaacttcgaaaagcgaacacctccaaagaacctcacaacgattatactcattttttgtcaatccgatatatgatcgttggaataaatactaaacgctgggacactgtatttggtagcagtttttatttaaaggtttatgtataacaatatacagcatatagtatatacaacatgatttcataaaattaggtactagagttttatataattataactatgaagtactatgtataactctctctcttcgtcacgcgcgaaatttccaaacctttggaataaattaaaggactaaaatgtacacatcatgaaacaaaaatatgataaaaataggttgaattgatttgcacgcttcaagttgcacgtcatgttttcctcgattttgatttgtttgtttgttttttttttttaacttttataactggaacacattgtgagtgaaaaatgtggtgcagagtaataagtacatgtatagataacgatccgaaagagtcgagggtgcagatgagtcgatgctataaatatgtgggcattgtttgatagacaagaaatagataacatgacaaaatggagggtataaataatcggaaatggtcggatctcggctcaggacttaggcgaggcgtttctttcgactaggcgagaggatcttcagcattgtgacgacgggcgcctcgaaggacatcgacaccacgaaggacaggaagtaggaggccaccgtcagaccgaagaacatgacaacctggaataagcaataaataagttatgataaacccttttcgttgtataaccaatttaatagattttgttttcttagacagcgattctacagcgacttcatcttccaactcaccatcagatccccgcccaggtgaagcggcgcgtccgaattgagcgccatggagcggatgactatcgggtggaccaagtaggcgcagtaggtgacgcgggagaaaggatagaggcagggcgccgagagcagcgagttgatgtagccgccgtagcccgtggagcaggcgatggtgatccaggccagtgacagcgcccaggccgaatggctgagcgaactgtaggcggcggcggtgaactgtgacaggtcggccttgtacagcccgaagaccaggacgaacagattgagcatggccagggtccaggcggttgccaccgtcagcttgggcagtcggatcttgcagttggtcctgaatagaatccagcccacggccatgccgatcagatagggacccaggcgggtccatggcttgtcgtagatcttgtcgaacagagccagcggatcgtccgtgttcggtcgatgattgttggtgaacgcaatcaccgccgtggtgatccacgacagcaccaggaacaccagtgtcgtgatcgccgacagcttaaagtgacgcacgcccacgatcaggatgatggcaccgatcatatagaactgcgtgtcattcgccaaataccaactccagagcatgcactgcggatttagagaaatgaggaggaattttatattatacttgtgacgttcgtaaattgttattcaaaaacagaagcccaacagttctcaaatgcatgagtgtgtatgggtgattacaagtccctttgtcttttgagcaccaatttatacttaaggctaacagctatgttgaataacactcaccatctcatcgacaggaaacagggtgttgatgtagagaatgttgcgccaccagtaatccggacaggtgatgtgatccatggtgggtggatcaaagatcgagtaagtggccagatacttcatggtcacctggacaacgcccaggacgaacagatagggggcggtgagacgcataaaccgataggcgaccaggccgaaaaagtgagcagttccagcggtgaactcattggctcccttgcttaacttgttcagcttgcctttggcattcgttcggaagtaaatgtacgagatcaggaagccactgatgaagaagaaggtgtccacactaaacggcccattggtgatggcctgaaagaagaagttctgctccacctccttgcgcatctccatgttatcggagtacttgaagaccacgatgcacgtgtggcccaggatgacccaggccatgctgaaggctcgcagtccatggatgcacggaatggtgtccgcacccacatttcgatcgcagatcgcattgaagttcgttatcgccgagaaggagagcagcagctccgagtagatgctcaacttttccggctcgtgcagatgcccctccaagtgctcatccgagttgctattgttgctcccgctgcgatgatgatcgtggtgatcgtgttccgcatcgtgatcgtgatggtgtccattgccgctgtcattatcgttcggtggcaaattcagtaccaaagcatccaattgcttcagcgaattcgacgactgcgagtgatccgattgcttgagcggatcatcgtgagcggtcatcgtgtcactgtaatcggacgacgcacatccaattcccgaactcgtctcgctgttgttcatcatctccttgtcctggcgacgcagtgcctccttcagtttgcgcctcaggtaaatctcgaatagggtgccgcagcaaatcaagcccaacacaatgctagataccacgctaaaaattatataatcagggatattttgttataactatgttttataactataatatgttagaatcgttaagtcgtgattttactttatatgaaatattaaattattttcttctttaacatataacatgtgtaaaatgtactatgcctttcatcaattgagcaattaaaattccatgtttatagagaaatgcaaataattattttactttaggaaattattctccgtgcagtttccaccgacatgggcaagcatataatcatattacccgctaatattttaagttaacaaatggagtttcgctttttattataattcgattttggggggaaacgaaatttcacacaaatcgactgactcaagacaccactgacttgacgctaatgtccaaagccaactgcccaaaagctgcgcattgtgtttgttcaattgtttagtgtttggactgtggcatttttgaaagtgatattttgattgctactttggttgcgatcgcagccacttacatcagcagacagaaggtcttgtccgcccaaatgttgaactccttgtcggtgggcacacggatgtccaggacacgcaaatcccgcgatggtagctccacatgggccctggagctcatctggccgatgtccgcaatggagcagctggatggcaggcacatgcccacgtaaatgatgcgcagctggataaacacgaagacaacaacattaaatttaatttaaaatttttaaaatcttattaacaaaagttaaaagttgcaagtgtgtagactttcttaccacttgggtgggcagcgtctcgttgagctgcatcttgatcacatagaaaccgggaacgaagggcggcggagcattgtagacactgctgtatccttgggtatgagcggcggcgaagggcagaccgctgttcttcgtctcgctttctggagaggatgcggccgaggagctgttgtccttgccgggagcaacgatctggccgtcgtcaatggcatcgcacagggccaacgaacccatccagtagttgttgccgtagaagaaaccggatgtatagtgaccggaagcatcgtccactgcgcaaatcgacgaaaaaggatgcaaagagaagggcaggaaatggaacggaatggaagtaaagggcatcagaagtgtgtaatagtgtgtaatataataaatttaaaaaaaaaaaacataaaactggccattatgcaattgcagcgcagccgtcaagctgccaactttaaaatgccgccatcatcttgatgacttgtcgactgagcgaccaaagagattccctattaagctttaagttgtttaatattatatatatatatatatgaagaaaatgtagaaaatcaaactcgaattgttttgtttgatgtgtaaagaacgatcaatctttcagtcatatatcgcctttcaattgttgactgccttttgcacatcaattaaatgccaattaattggtaaataaatcagttcaactaaaaggctgcagtggattcagattcagatacaagaaaatccttgcccaactgctgatttatttgcacgaagttttgaggctgttatgctattttattttcgttttcttgcaaccagttgccaaacagatcggtggacttgagacggcgactggaactgggactgtgggtccaaccagttttctttttttttgttaattttttttttttttttatcgctgctttgaaaatggcaacttaagtcatgcaatggtcttttgttcggctggcgtggtgacacggggaaaatggcaactcttacgtgagcatccattatccattagccgccatccaccatccagtgtttagcatccacttccacttccccaatggcttggccaaaagcaggaactgatctctggtgatctctgggttacacaagagacccggtcatgaccatgaggagccaatgaaacggaaatgtttgccagcatttgcatgtgccgaaatcagaagtgtttacccatttcagtggcggtgaacaaacgcggaaggaaaatgattttcatttgcttagcctccggattgtttaagttgttgaatttacgaaaacaatatgttcaagaaaaatcaattctctgtgtttcatgaaattgcactttgtttttattgctccgttg

SEQ ID NO: 2900 - DNA, 2334 bp, DROSOPHILA
atgccctttacttccattccgttccatttcctgcccttctctttgcatcctttttcgtcgatttgcgcagtggacgatgcttccggtcactatacatccggtttcttctacggcaacaactactggatgggttcgttggccctgtgcgatgccattgacgacggccagatcgttgctcccggcaaggacaacagctcctcggccgcatcctctccagaaagcgagacgaagaacagcggtctgcccttcgccgccgctcatacccaaggatacagcagtgtctacaatgctccgccgcccttcgttcccggtttctatgtgatcaagatgcagctcaacgagacgctgcccacccaagtgctgcgcatcatttacgtgggcatgtgcctgccatccagctgctccattgcggacatcggccagatgagctccagggcccatgtggagctaccatcgcgggatttgcgtgtcctggacatccgtgtgcccaccgacaaggagttcaacatttgggcggacaagaccttctgtctgctgatcgtggtatctagcattgtgttgggcttgatttgctgcggcaccctattcgagatttacctgaggcgcaaactgaaggaggcactgcgtcgccaggacaaggagatgatgaacaacagcgagacgagttcgggaattggatgtgcgtcgtccgattacagtgacacgatgaccgctcacgatgatccgctcaagcaatcggatcactcgcagtcgtcgaattcgctgaagcaattggatgctttggtactgaatttgccaccgaacgataatgacagcggcaatggacaccatcacgatcacgatgcggaacacgatcaccacgatcatcatcgcagcgggagcaacaatagcaactcggatgagcacttggaggggcatctgcacgagccggaaaagttgagcatctactcggagctgctgctctccttctcggcgataacgaacttcaatgcgatctgcgatcgaaatgtgggtgcggacaccattccgtgcatccatggactgcgagccttcagcatggcctgggtcatcctgggccacacgtgcatcgtggtcttcaagtactccgataacatggagatgcgcaaggaggtggagcagaacttcttctttcaggccatcaccaatgggccgtttagtgtggacaccttcttcttcatcagtggcttcctgatctcgtacatttacttccgaacgaatgccaaaggcaagctgaacaagttaagcaagggagccaatgagttcaccgctggaactgctcactttttcggcctggtcgcctatcggtttatgcgtctcaccgccccctatctgttcgtcctgggcgttgtccaggtgaccatgaagtatctggccacttactcgatctttgatccacccaccatggatcacatcacctgtccggattactggtggcgcaacattctctacatcaacaccctgtttcctgtcgatgagatgtgcatgctctggagttggtatttggcgaatgacacgcagttctatatgatcggtgccatcatcctgatcgtgggcgtgcgtcactttaagctgtcggcgatcacgacactggtgttcctggtgctgtcgtggatcaccacggcggtgattgcgttcaccaacaatcatcgaccgaacacggacgatccgctggctctgttcgacaagatctacgacaagccatggacccgcctgggtccctatctgatcggcatggccgtgggctggattctattcaggaccaactgcaagatccgactgcccaagctgacggtggcaaccgcctggaccctggccatgctcaatctgttcgtcctggtcttcgggctgtacaaggccgacctgtcacagttcaccgccgccgcctacagttcgctcagccattcggcctgggcgctgtcactggcctggatcaccatcgcctgctccacgggctacggcggctacatcaactcgctgctctcggcgccctgcctctatcctttctcccgcgtcacctactgcgcctacttggtccacccgatagtcatccgctccatggcgctcaattcggacgcgccgcttcacctgggcggggatctgatggtgagttggaagatgaagtcgctgtagaatcgctgtctaagaaaacaaaatctattaaattggttatacaacgaaaagggtttatcataacttatttattgcttattccaggttgtcatgttcttcggtctgacggtggcctcctacttcctgtccttcgtggtgtcgatgtccttcgaggcgcccgtcgtcacaatgctgaagatcctc

SEQ ID NO: 2901 - protein, 716 aa, DROSOPHILA
MPFTSIPFHFLPFSLHPFSSICAVDDASGHYTSGFFYGNNYWMGSLALCDAIDDGQIVAPGKDNSSSAASSPESETKNSGLPFAAAHTQGYSSVYNAPPPFVPGFYVIKMQLNETLPTQVLRIIYVGMCLPSSCSIADIGQMSSRAHVELPSRDLRVLDIRVPTDKEFNIWADKTFCLLIVVSSIVLGLICCGTLFEIYLRRKLKEALRRQDKEMMNNSETSSGIGCASSDYSDTMTAHDDPLKQSDHSQSSNSLKQLDALVLNLPPNDNDSGNGHHHDHDAEHDHHDHHRSGSNNSNSDEHLEGHLHEPEKLSIYSELLLSFSAITNFNAICDRNVGADTIPCIHGLRAFSMAWVILGHTCIVVFKYSDNMEMRKEVEQNFFFQAITNGPFSVDTFFFISGFLISYIYFRTNAKGKLNKLSKGANEFTAGTAHFFGLVAYRFMRLTAPYLFVLGVVQVTMKYLATYSIFDPPTMDHITCPDYWWRNILYINTLFPVDEMCMLWSWYLANDTQFYMIGAIILIVGVRHFKLSAITTLVFLVLSWITTAVIAFTNNHRPNTDDPLALFDKIYDKPWTRLGPYLIGMAVGWILFRTNCKIRLPKLTVATAWTLAMLNLFVLVFGLYKADLSQFTAAAYSSLSHSAWALSLAWITIACSTGYGGYINSLLSAPCLYPFSRVTYCAYLVHPIVIRSMALNSDAPLHLGGDLMVSWKMKSL

SEQ ID NO: 2902 - DNA, 6261 bp, DROSOPHILA
tcccattcccatccccgaacccatcccaatcccaatcccaaactgattccccgagcgatatgatgttcgtagatgtttatgggtggcatgtgcgatgtgtgtttttccgagcttctttgttgtttttgtcaccacgaattaaaatctcagataattgcgagagattctcgctaagaattcctgtagcgccgagccaaacgccttgacaatcaattatgagaaatgtccgatgatcttgggcggaatgtttttgtttcgttttctatatatccgagatatatgtatgtatatatacagatcaaatgcaggccactgcacggcaaaatcccgccaaagttttattaatggcacgcatttctctggggagaatttgagggtatttttggtggctatttggacactgatggaggagtgggtggcatctaatggcgactgctgattgagctgtttgcctgaccctggtaggtcgtgcactattcattcatcggattgctcagataggcttttataaataaaccggacaacggggaggaggatcgagattcgcgggaagcatcaatcgtcgaatggcaagcatcggaataaacagatccataaaagttttatgagtaattggctttggagcggcccaaaatagaaccacctcgcataactgaaatattctccgctttatttatcaataaatagcttgtttataattacacatacagattatacttagatgtaaacgaaggcctggaataagttacactaaacactaggatacacataagactaggctactactacgttagatatatgtacatatatagaccgactaggacgaatcactcactataacgtaactgaatgtcgagttgagatccttaaaaaattacctcgcatggcggacaattttttaattgcactcaaagttggctggacacacgggacaatggacacgggacacgggacaccactgggtgggattcggtgggttggtttgctgttctgctggtgtctacaccatgttccatatgctgtagctggccgcccggcgctcctcctcggccacctgctcgtagtcgatctccaggtactccttggtgccaaagcgcaccttccgcccggtgtacttcttgatatagctgacgtgggcgggcacctcctttccctcgatctccagcttgtacgagatgctggtgatccgttccagtacacggccgcgcttccagcgcacctgcgtcttacgatagcgctccgcgtagagcaccaggtcgccaatcttgtactcccttacgtgcaggcaggatttgagttcattgacaggctcgggctcctccgctggcgccttggggtcctcctcgtcgtccgtcacgtaggctatggcccgctcgatggtctccacctccgggatggcaggctcctccggctcgggctgcaggaagaatgtgtcgccgacggagaggcgtcgcttctgtctcttgatgatcaccttctttttgatcttgcgcggcttcttgggctccggcgcaggctcgacttcaggttccggttcgacctcctctagagctggggtttcggcagttgtttcctccgcgggagttgcttcttcgggcttcgcgctatcctcatttgcagtcgttgcctttttcgcctcctcctttggtttcgcttgcttcttgggcggagtaagcttgttgatcctggaggacagctcgttgatcttgttcctgtcgcgcagtatgttgctcagcttgctggagtcattcttctcctgcttctcgggctccttgtcaatggaattcttgcgcaccagtttcttcagatgcgtaggcttcttctttacgagcgactcctgattcttggccgcatcgtgcggctgctcgaccgtctcgatcttgacgggctgcaccggtccggcgagtactttcagctccggcatggtggctagactgtcgccgggaggcggctgctctccggcttttgtagcttcggcggacgactgtgactgctgctctggcgatgactcttcgtgcaccaatgtcgctgctatttgcggcgcaatgtcagcgccgatggccacctgttgcggcgtcgctggcaccagagcctcctgatcgatgatgggttccttggactcgggcaatggatcttgcggggctgcggtagctgccggcaccaccagcaccgtttcaccaaccaactccgctagtttcaggctggcgcgtctggttccttcgcctgctggcgctagattgtcaatcgccggatcggcatcgatctttgatttggccgctggtgttgcagttgtcgccggtgttgctgctgcaactacaacttggccgctcttggcactgggcaacttggctggcaccgcggtgacctctggcgtagccaattgttcactggtggccgtctccttctcctcggctatcgatgccgtttccctcgagttgccaatgcaatcttttgttgtcgatgatgctgctcttggggatgtgcatgtagatgtggatggggcagccgtgtcgcccattaatttcagcttcttcttgcgcttgacaatcgcctccgagtcggagggtcgcctctgagtgatgagaacatcgctctgctcgacggccggctccaccttgatcttggatggttccacggcggcgatcgaggcgcgtctggggttcttcaccttcacgatgactttcttcttggtcttggacgctggtggcgatgtgggtgactcatctggctcagatggtttgattacggacacatcattacttttgtcaacttctgtagttcctttgggttccgattccttgggagtcgcttctcttttgggagagaaccccttatgggtttcttccttggtagtttgctccttgggagtaacatctttgacggattttgacttgagttcactctgcaccttggccaggaactctattttggcctgggttttgcttttctcgggttgcttgacttgttcgcctgtcttcggaagttctccattcatttttggttcttcaccttttacctctgagattttagtatcactagattcattagaaggcgattttgaaacatcctctccaagcttcaccgccagtggctcagaatattccttactttccattggcggcttgacatccaaataatcttggtcctttggcagctttccatcttggttttccaactctttcgattcttgattatcattcttttcttcttttttactgacttcgattacctctttaaaatccttttcactagtttttgtttctttgcttgcattaagtttctgctttccatttgtttgagcatcccgttctgctgaatcttccaagagctccctagcaaatggtgtctgttctctttgcaccttagtatccttggaggcatttaccagttcctctccagcttgctccttttcctcctcggcctcatcgaagtagctgcgtcgccggactttcttcacaaatcgaaaggacactggagcagcttgatctccaactggtgtcgactgggtctgctccgccgcagattccgcctcgctctccgtgctgtactgcttgagcactcccttcacctcgctgagtgcaccggagattcttgccttgagcttgttcagccgctcgatcacatcctcgggcttctcctccacggagtcctgcgagcggacgcgtcgctggcgccgcagacgtgtcctttcgggtagcacagaatccacatcgatggaggaggtgctgtcgcggctgatggatgtgcgctttatatcgcccagcaacggagcatgcgtagcgggagcactaggctccacattgcgtatactacgactcgtggcacccaatctagtgactggcgactccggacgcggactcctgctgggcagtgatggactgggtgtcttcagctcgtatttcatctcgctgggctgctgctctgtggcgctagtattgttgttgtcatccgcctgttccgtcggctgatccagtagttgctcggcggggtaaacctcgaccaccgtatctgtctcccgctcctcgctgactttgctcacggtcatgtccgctccggcggccacctcgctccaaaggttacccgtctccggatgggcacagatcacttcgatggcgtcggtcaaaaggtcgagcagctcccagtcccaatcccagttcctctcggtgaggaaggcgcgcacggagcttttcagtaattctatatttggccgacttcgattcgcgttcggatttggattcggattcggatttgggtttcgctcgcgggtcagtagccgaccgagatccacgtccacttgctctggcgacgattcgcgggcgtctgagagatcgccgtactgctggtggttggtattccgattcagattctgattttggtgctgctgctgctgctgatgctgttgcccattcgcatctattgtctgctccctggccaaacatattgactgctgctcgcgatctctcatatttggctcattatgatcttcggccttctctaatttgctttgctcgcatatttcgcgtttatttttggccccatccatggcgtcgtcgtttttgtggtcgtgtcgccgctggccgaaggcgtcattaagattttccgcctgttgatgctcgatttcccttgccacgttcaagtttaatgcgaatgagagtgcttctgccgccgccgtctgctcctcggcctcgggttcattatcaaacatcggcggcaccttatgtacaccagctcctcctccgcctacatctatttcgtctattttgtctatttcggtgactttgtcgaggcccggctgcgtcattgttgttgtggcggcggtgggtggatgtggatgtgggtattcgggctcatcttcagacattgctcgataattgggaaagctaacaaatcgttttttaattatgggaaattcctgggacgcctgctcagcgtgtgagctggccacctgtccgcgtcgggtcatggtggtgctcatttctgggaaatggccgtcggaattcttgcggggcaattgcagcagtctgggaaagttcatctgccacggggcgtatacttgatgtatggggaatcttgctgtgcacggtgcgtatacatgatgtgggctgaatagttgagtttcatctaaaattgtgtggttctctgcttctttctggtgcttgaagaaaaacaagggaaatccttggttgctccttgatttcagatgcaagggaaactttcctgtttgcattgtttggtaatatgtctggcagacctgcatgttcctgcttccacccgcgtgattcatgggaaagctgctctgccaagcgattccttggccaaccggaaattgccctgccattccgagcacttccggcgccgccgcctttgaccaacaaaacacggctgactcagctccctgatttgcgatgccatcaacaagccactgcgaattatgaatattattattagctgctgcctgcgacatcaatgtctgctcctctgcttcccccgattctgccggccaatccgcctgctgtgtctttgtcatcatcctgctgacctattgtcgtggccaacacgcgaccaaagcgggcttattcctccgatcacaatcgactatgtatcactcaacacgttgcaagctaaactggcgcaatccgtcggcggatgcaccgtgatccgtctatctcaattcgttcccagtggctgcgcctcgctggcaaccatccgatcattgatcagtctgcaatctatgtaattgcacatgagttgtgcggcgtcaggtgagcataaggatcgaattaacaatgccctgcagatgggtacttatagtggttgttttcaattcaccaaaataaaactgttcaaatcacttggtgctataagataaaaacaagccagctatttgttgttcaagaaagtgtttagtatttataatttataataatgttctctcagctaacgtaaacataattttattatcttctcagtgttaaaatatgtgctattcgtttattaaaaaattccctccactcagcaaaatgtagataatactaatctgctcgacttatctaagccaactgaaataactggacatgattcctatgtagactcatggaccacatggatgaattaactacagggcatatcaatgttgatagatcttgtaaaacaatagaaatcaaagtttggtcaggggaggtcgcgcgtgtttcggatgctgggcagaccgaggagcgctcttgtatatgcacatcggatagggtctgctatatagccgaa

SEQ ID NO: 2903 - DNA, 4261 bp, DROSOPHILA
gaacatgcaggtctgccagacatattaccaaacaatgcaaacaggaaagtttcccttgcatctgaaatcaaggagcaaccaaggatttcccttgtttttcttcaagcaccagaaagaagcagagaaccacacaattttagatgaaactcaactattcagcccacatcatgtatacgcaccgtgcacagcaagattccccatacatcaagtatacgccccgtggcagatgaactttcccagactgctgcaattgccccgcaagaattccgacggccatttcccagaaatgagcaccaccatgacccgacgcggacaggtggccagctcacacgctgagcaggcgtcccaggaatttcccataattaaaaaacgatttgttagctttcccaattatcgagcaatgtctgaagatgagcccgaatacccacatccacatccacccaccgccgccacaacaacaatgacgcagccgggcctcgacaaagtcaccgaaatagacaaaatagacgaaatagatgtaggcggaggaggagctggtgtacataaggtgccgccgatgtttgataatgaacccgaggccgaggagcagacggcggcggcagaagcactctcattcgcattaaacttgaacgtggcaagggaaatcgagcatcaacaggcggaaaatcttaatgacgccttcggccagcggcgacacgaccacaaaaacgacgacgccatggatggggccaaaaataaacgcgaaatatgcgagcaaagcaaattagagaaggccgaagatcataatgagccaaatatgagagatcgcgagcagcagtcaatatgtttggccagggagcagacaatagatgcgaatgggcaacagcatcagcagcagcagcagcaccaaaatcagaatctgaatcggaataccaaccaccagcagtacggcgatctctcagacgcccgcgaatcgtcgccagagcaagtggacgtggatctcggtcggctactgacccgcgagcgaaacccaaatccgaatccgaatccaaatccgaacgcgaatcgaagtcggccaaatatagaattactgaaaagctccgtgcgcgccttcctcaccgagaggaactgggattgggactgggagctgctcgaccttttgaccgacgccatcgaagtgatctgtgcccatccggagacgggtaacctttggagcgaggtggccgccggagcggacatgaccgtgagcaaagtcagcgaggagcgggagacagatacggtggtcgaggtttaccccgccgagcaactactggatcagccgacggaacaggcggatgacaacaacaatactagcgccacagagcagcagcccagcgagatgaaatacgagctgaagacacccagtccatcactgcccagcaggagtccgcgtccggagtcgccagtcactagattgggtgccacgagtcgtagtatacgcaatgtggagcctagtgctcccgctacgcatgctccgttgctgggcgatataaagcgcacatccatcagccgcgacagcacctcctccatcgatgtggattctgtgctacccgaaaggacacgtctgcggcgccagcgacgcgtccgctcgcaggactccgtggaggagaagcccgaggatgtgatcgagcggctgaacaagctcaaggcaagaatctccggtgcactcagcgaggtgaagggagtgctcaagcagtacagcacggagagcgaggcggaatctgcggcggagcagacccagtcgacaccagttggagatcaagctgctccagtgtcctttcgatttgtgaagaaagtccggcgacgcagctacttcgatgaggccgaggaggaaaaggagcaagctggagaggaactggtaaatgcctccaaggatactaaggtgcaaagagaacagacaccatttgctagggagctcttggaagattcagcagaacgggatgctcaaacaaatggaaagcagaaacttaatgcaagcaaagaaacaaaaactagtgaaaaggattttaaagaggtaatcgaagtcagtaaaaaagaagaaaagaatgataatcaagaatcgaaagagttggaaaaccaagatggaaagctgccaaaggaccaagattatttggatgtcaagccgccaatggaaagtaaggaatattctgagccactggcggtgaagcttggagaggatgtttcaaaatcgccttctaatgaatctagtgatactaaaatctcagaggtaaaaggtgaagaaccaaaaatgaatggagaacttccgaagacaggcgaacaagtcaagcaacccgagaaaagcaaaacccaggccaaaatagagttcctggccaaggtgcagagtgaactcaagtcaaaatccgtcaaagatgttactcccaaggagcaaactaccaaggaagaaacccataaggggttctctcccaaaagagaagcgactcccaaggaatcggaacccaaaggaactacagaagttgacaaaagtaatgatgtgtccgtaatcaaaccatctgagccagatgagtcacccacatcgccaccagcgtccaagaccaagaagaaagtcatcgtgaaggtgaagaaccccagacgcgcctcgatcgccgccgtggaaccatccaagatcaaggtggagccggccgtcgagcagagcgatgttctcatcactcagaggcgaccctccgactcggaggcgattgtcaagcgcaagaagaagctgaaattaatgggcgacacggctgccccatccacatctacatgcacatccccaagagcagcatcatcgacaacaaaagattgcattggcaactcgagggaaacggcatcgatagccgaggagaaggagacggccaccagtgaacaattggctacgccagaggtcaccgcggtgccagccaagttgcccagtgccaagagcggccaagttgtagttgcagcagcaacaccggcgacaactgcaacaccagcggccaaatcaaagatcgatgccgatccggcgattgacaatctagcgccagcaggcgaaggaaccagacgcgccagcctgaaactagcggagttggttggtgaaacggtgctggtggtgccggcagctaccgcagccccgcaagatccattgcccgagtccaaggaacccatcatcgatcaggaggctctggtgccagcgacgccgcaacaggtggccatcggcgctgacattgcgccgcaaatagcagcgacattggtgcacgaagagtcatcgccagagcagcagtcacagtcgtccgccgaagctacaaaagccggagagcagccgcctcccggcgacagtctagccaccatgccggagctgaaagtactcgccggaccggtgcagcccgtcaagatcgagacggtcgagcagccgcacgatgcggccaagaatcaggagtcgctcgtaaagaagaagcctacgcatctgaagaaactggtgcgcaagaattccattgacaaggagcccgagaagcaggagaagaatgactccagcaagctgagcaacatactgcgcgacaggaacaagatcaacgagctgtcctccaggatcaacaagcttactccgcccaagaagcaagcgaaaccaaaggaggaggcgaaaaaggcaacgactgcaaatgaggatagcgcgaagcccgaagaagcaactcccgcggaggaaacaactgccgaaaccccagctctagaggaggtcgaaccggaacctgaagtcgagcctgcgccggagcccaagaagccgcgcaagatcaaaaagaaggtgatcatcaagagacagaagcgacgcctctccgtcggcgacacattcttcctgcagcccgagccggaggagcctgccatcccggaggtggagaccatcgagcgggccatagcctacgtgacggacgacgaggaggaccccaaggcgccagcggaggagcccgagcctgtcaatgaactcaaatcctgcctgcacgtaagggagtacaagattggcgacctggtgctctacgcggagcgctatcgtaagacgcaggtgcgctggaagcgcggccgtgtactggaacggatcaccagcatctcgtacaagctggagatcgagggaaaggaggtgcccgcccacgtcagctatatcaagaagtacaccgggcggaaggtgcgctttggcaccaaggagtacctggagatcgactacgagcaggtggccgaggaggagcgccgggcggccagctacagcatatggaacatggtgtag

SEQ ID NO: 2904 - protein, 1408 aa, DROSOPHILA
MQTGKFPLHLKSRSNQGFPLFFFKHQKEAENHTILDETQLFSPHHVYAPCTARFPIHQVYAPWQMNFPRLLQLPRKNSDGHFPEMSTTMTRRGQVASSHAEQASQEFPIIKKRFVSFPNYRAMSEDEPEYPHPHPPTAATTTMTQPGLDKVTEIDKIDEIDVGGGGAGVHKVPPMFDNEPEAEEQTAAAEALSFALNLNVAREIEHQQAENLNDAFGQRRHDHKNDDAMDGAKNKREICEQSKLEKAEDHNEPNMRDREQQSICLAREQTIDANGQQHQQQQQHQNQNLNRNTNHQQYGDLSDARESSPEQVDVDLGRLLTRERNPNPNPNPNPNANRSRPNIELLKSSVRAFLTERNWDWDWELLDLLTDAIEVICAHPETGNLWSEVAAGADMTVSKVSEERETDTVVEVYPAEQLLDQPTEQADDNNNTSATEQQPSEMKYELKTPSPSLPSRSPRPESPVTRLGATSRSIRNVEPSAPATHAPLLGDIKRTSISRDSTSSIDVDSVLPERTRLRRQRRVRSQDSVEEKPEDVIERLNKLKARISGALSEVKGVLKQYSTESEAESAAEQTQSTPVGDQAAPVSFRFVKKVRRRSYFDEAEEEKEQAGEELVNASKDTKVQREQTPFARELLEDSAERDAQTNGKQKLNASKETKTSEKDFKEVIEVSKKEEKNDNQESKELENQDGKLPKDQDYLDVKPPMESKEYSEPLAVKLGEDVSKSPSNESSDTKISEVKGEEPKMNGELPKTGEQVKQPEKSKTQAKIEFLAKVQSELKSKSVKDVTPKEQTTKEETHKGFSPKREATPKESEPKGTTEVDKSNDVSVIKPSEPDESPTSPPASKTKKKVIVKVKNPRRASIAAVEPSKIKVEPAVEQSDVLITQRRPSDSEAIVKRKKKLKLMGDTAAPSTSTCTSPRAASSTTKDCIGNSRETASIAEEKETATSEQLATPEVTAVPAKLPSAKSGQVVVAAATPATTATPAAKSKIDADPAIDNLAPAGEGTRRASLKLAELVGETVLVVPAATAAPQDPLPESKEPIIDQEALVPATPQQVAIGADIAPQIAATLVHEESSPEQQSQSSAEATKAGEQPPPGDSLATMPELKVLAGPVQPVKIETVEQPHDAAKNQESLVKKKPTHLKKLVRKNSIDKEPEKQEKNDSSKLSNILRDRNKINELSSRINKLTPPKKQAKPKEEAKKATTANEDSAKPEEATPAEETTAETPALEEVEPEPEVEPAPEPKKPRKIKKKVIIKRQKRRLSVGDTFFLQPEPEEPAIPEVETIERAIAYVTDDEEDPKAPAEEPEPVNELKSCLHVREYKIGDLVLYAERYRKTQVRWKRGRVLERITSISYKLEIEGKEVPAHVSYIKKYTGRKVRFGTKEYLEIDYEQVAEEERRAASYSIWNMV

SEQ ID NO: 2905 - DNA, 4452 bp, DROSOPHILA
ttgaaaatctactaagatagcccgatagattacagtgttgcccttttttcgaagacattgaaatttatggctttttattcatcctagcagtcgatttagagtccaaaatttgctgtgtgggatctttagaatccaatattgtatattaaattcgtaaaatgaaatgtaaaaggttggtcgaaatttctatgatttttttcggtttacgctaaaatttccatttttcgctttgactttttattggtgattttaagtactgaatatgtactaatatgatatgtactaataacatgtacgactaaaaaatacccactctagcaaaatatgtattttcccaaccaagcatttcacattaaacctggtgatagtttggtgctggtaatacgttttttatattttgtatttagacacaattcgtttaaaagcgtaaataccatttgagcacgagtcaatgatacatgtatatattatgatatggtattctgttcctaaagtaataggtgtagaaaaatatatatgtatattataataaagaaaagtagctacaactttctcggtaggctagcaggttttttcaatagtggtagaatcagatccgaacattttccagtcttttaaacagagtgtcgaaacgaataaggcgagtctacgtgtatttttaataatttttgtgggtgatgttattctctaacatacctatcagccccaattttaaaatttctaataccatatattcatcatttaatttttaggtatattgggattggagataactcattttcatcaaacatttttttaaaaatgtgcgtgggtttgtgaagttcttagcactggcattggcgttagtagattatgcatgcttagtcttaattttaatgtttttagttccagagataacgataacagaggaaaaacttcgtttaacctcttaccaactttacaagtaattaaaatgcaaataatttattttattttgaacgtatttatatttatatatttaagcagtttcgtacagagaagacacacattctctaaaaacaactaacggtctatctccccaaatacgacatccaaagttccaattattgcaacgacgtcggctagcatgtgctgctttccaatcttctctaaagctgccaagtgagcaaaccctggagctttgattttgcaccggtatggacgactggacccatctgatataaggtaaactccaaactcgcccttcggagcctctattgccgtgtatgttgccccgggtggaacttgatatccttgggtaaataacttgaagtggtgaataagtgcctccatggatgtcttcatttcggaccgtgacggaggcgccaccttggcatcatccgttttaatttctccagcaggcatttggtttaggcattgatcaataattcgtaatgactggcgcatttcctcgacccggcaaagatatcggtcgtagcagtcccctttggtgccgatgggaacatcaaagtttaccaaattataggcatcgtacggctgctgctttcgaagatcccattttatgccagatccacgcaacataactccactgaagccatagttcaaagcttcttctgcagttacgatcccaatgtcctcggtccgctgcacccagattcgatttgtagttaacacatcctccacttcgtccaaccgctcagcaaactttgatgcaaactcatagatatcgtccataagaccaagaggcatatcctgacatacaacgtaagacaattaaattatttttcaatattcatgcgaatgcattaccaatgacaccccgccaggacgtatgtaggcagcatgcattcgggcaccagaaactcgctcatagaattccatcattttctctcgctcctcgaatagccaaaaaaatggcgttagagcaccaacatctaaggcatgtgttccgacggccataatgtgattgagaatacgagtaatctcggcaaagagagctgcgcaaaaaataacaatttcacataattattacaaatttacaattttagtgaatggtgaagaagtggtgacaaaaagttatttttttcgatcaatttatatttggctggctaaaattcttcaagcggtccgacgatcattaattcgataagaccgtaaattcataccgtcctaccaatgagcgctgcaagtcagttttcccagaaaagaatataatttatagtctcttctaattatcttttatattaccctgatatcttggctcatttttcaagcttcgaaatatgtatgttacatggtttgagcaaggacactagaattattctagtgtctttggtttgagagacaagaactacacgaaccattggttttaatatatttttgtacaagaaaaacaattttcagtgccaaaaatagtgggtactttttcatctcactttaaattttagattaaaataattttaataatcaaacccaaatttaaaatattttttttttggtaatcaaaaattaaatagaacttttaaaaagattttgttgcgtaagatttatggcgatggtgacaatgctaaattataatatatatatacatatattaaaaaagcgaaactattgaaatcttcttaatgactacaaagtcaagagcaagagaaaattactttgtattcttacttcgaatgtacttagcacggagaggcacatcaatattaaggagtttttctacagccagagagtagcattgctcgttgcacatcatcgagacgtagtccagccggtcaaaatacggcaatgcctgggtgtatgtcttgtactctatgagcttttcggtcccacggtgcagcagcccaatatgcggatcggcacgcataacggtctgcaataacagaggttttaatttacacaagacctgtggtcgattaacagcttaaacctctccatccagctccagcacaagacgaaggactccgtgggcggcgggatgttgtgggccgaagttcaaggtcagattacgcaccgacttttcgacaggcgttactttgcctagtagaggaggtaagtcaagcgattagttcaagggtcagtttaatattgggttaccaactaactgttccatggtggcactgtccaaagtgatgtgacctcgtctggatacatcaccgggccgctaaactgcttcatgaactcagggtctggataccacttggctgctccccgtcgcgtctcctgagaactaaacaacgagtttccaattggacaaatataaatgatatattcgaattatgtaagcatttactatttacgttaacgcggccgatccagctgcaacaagttgtggccgcagcctcaagtgtgaaagtccaggaatcaacgttcttctcattatattggccatcctgatagtcaaattcctctatttatgtttctttagtaacaattcaggaatctaatacaaccaaatagttatccgcaatcggaattctatccaaaaaatatcgaaaattactttaaacaccgaatctcgtacagcttatatactatttacaccaataatatatcgcaggttgttgcttcatgaaaatgaagtgcaaaacacataaattcccttatatatattacacactttgtcatcctgctcgtttacccaagtttttatttatctttatataatgttataaacaataattgcaattaatttttcgaagacctgaattttacatcatcccaatgaagcgaattttgcgttaatggagcactataaaaatataattactagagataataatgatagcttctgcaaggctaaacttatatatcttagcagtatctcagcagagcgaatgtggacatttaatgactaaaaacaacgaaactatttaaattctttaattaacaattgatttctggacttttcgtccgatgactaaacttaagaaaacaaaattatgaaaactcttttaacttgaacaaaaattttatgcagtcaagaaccggtgctaagagatagtaacgtaaaaacggatgatcggacagacggtagtgctgactcggctcttgatactgaccatatatatatttacttcaaattcttaactctttcactgggtttcaaacttcttacaccaatcaaaataggttcgacacgggtaatagataaattttaataattataaaattattcttaaaacataaaatagtgcttaagcctagctaaaaaatttactaggaacttacataatggttctgctacaacaaatgtcaaataaaatctttataagacagtttcctatcaatatggtatggtttttactgtgaatattacttatagtagaaattcgcatatgttaaattcaaaaaaaaaaaaaaaaaccaaaccatttgacttatattataagattatacgggcctttggaaaaaaatcgctatcgattgatttgtaaaattatcgatgcccttaagtttctttatacatcgaaa

SEQ ID NO: 2906 - DNA, 1482 bp, DROSOPHILA
ccgattgcggataactatttggttgtattagattcctgaattgttactaaagaaacataaatagaggaatttgactatcaggatggccaatataatgagaagaacgttgattcctggactttcacacttgaggctgcggccacaacttgttgcagctggatcggccgcgttaacttctcaggagacgcgacggggagcagccaagtggtatccagaccctgagttcatgaagcagtttagcggcccggtgatgtatccagacgaggtcacatcactttggacagtgccaccatggaacagcaaagtaacgcctgtcgaaaagtcggtgcgtaatctgaccttgaacttcggcccacaacatcccgccgcccacggagtccttcgtcttgtgctggagctggatggagagaccgttatgcgtgccgatccgcatattgggctgctgcaccgtgggaccgaaaagctcatagagtacaagacatacacccaggcattgccgtattttgaccggctggactacgtctcgatgatgtgcaacgagcaatgctactctctggctgtagaaaaactccttaatattgatgtgcctctccgtgctaagtacattcgaactctctttgccgagattactcgtattctcaatcacattatggccgtcggaacacatgccttagatgttggtgctctaacgccatttttttggctattcgaggagcgagagaaaatgatggaattctatgagcgagtttctggtgcccgaatgcatgctgcctacatacgtcctggcggggtgtcattgtttgctgagcggttggacgaagtggaggatgtgttaactacaaatcgaatctgggtgcagcggaccgaggacattgggatcgtaactgcagaagaagctttgaactatggcttcagtggagttatgttgcgtggatctggcataaaatgggatcttcgaaagcagcagccgtacgatgcctataatttggtaaactttgatgttcccatcggcaccaaaggggactgctacgaccgatatctttgccgggtcgaggaaatgcgccagtcattacgaattattgatcaatgcctaaaccaaatgcctgctggagaaattaaaacggatgatgccaaggtggcgcctccgtcacggtccgaaatgaagacatccatggaggcacttattcaccacttcaagttatttacccaaggatatcaagttccacccggggcaacatacacggcaatagaggctccgaagggcgagtttggagtttaccttatatcagatgggtccagtcgtccataccggtgcaaaatcaaagctccagggtttgctcacttggcagctttagagaagattggaaagcagcacatgctagccgacgtcgttgcaataattggaactttggatgtcgtatttggggagatagaccgttagttgtttttagagaatgtgtgtcttctctgtacgaaactgct

SEQ ID NO: 2907 - protein, 452 aa, DROSOPHILA
MANIMRRTLIPGLSHLRLRPQLVAAGSAALTSQETRRGAAKWYPDPEFMKQFSGPVMYPDEVTSLWTVPPWNSKVTPVEKSVRNLTLNFGPQHPAAHGVLRLVLELDGETVMRADPHIGLLHRGTEKLIEYKTYTQALPYFDRLDYVSMMCNEQCYSLAVEKLLNIDVPLRAKYIRTLFAEITRILNHIMAVGTHALDVGALTPFFWLFEEREKMMEFYERVSGARMHAAYIRPGGVSLFAERLDEVEDVLTTNRIWVQRTEDIGIVTAEEALNYGFSGVMLRGSGIKWDLRKQQPYDAYNLVNFDVPIGTKGDCYDRYLCRVEEMRQSLRIIDQCLNQMPAGEIKTDDAKVAPPSRSEMKTSMEALIHHFKLFTQGYQVPPGATYTAIEAPKGEFGVYLISDGSSRPYRCKIKAPGFAHLAALEKIGKQHMLADVVAIIGTLDVVFGEIDR

SEQ ID NO: 2908 - DNA, 7723 bp, DROSOPHILA
cttaatccccatgtcccggatggcggaactgggcggacccatgaagatgatgccctcacgctggcacaactcggcaaactcgacggactcggagaggaagccgtagcctgggtggatggcctgggcgcccgaacgcttggctatgtccaggatgcgttcaccgcgaagataggaagccgaggaggcagcttcccccacgcggtacgactcgtctgccaactgcgtgtgcatgctcttctcgtccggatccgagaacacggccacggtacgaactcccagcttgcgtgcggttcgaatcaccctgcatgcgatctcaccacgatttgaaataaggatcttgctgataggccgaacttttgggctggcttctgttgcaaagcacctgcgtcaagccaaaacaaattagcaaggtttatgtaatcgtcaagaacgaaattaagtcttttgatttagcggccttaacaaagaactgccgatcatttccctcacctggcgtttgcgccgaagtttcgcagcagtctggcgtacattattagtagaattaattgtaagaataaataacaaatatactttattcagagcaagtgtgcgatcgtcgcttatcacagctggaaaaacgcacacgcacaagatcgcaattgagatgggcgactcacgagatgcatggttgaaaatattaatgtttcatatatcttttggggattatcatatatcatcaatatcttttagggaaattgatattacgtatattgtgttttttttaagttgcaacccataaaaaatattaccgttatattattctggactatttatcgaactgttgacatccatccgaccgcgtccttacggttttctgcgctcgtgaagttcggtaacattgttcgcagaaactcgataaccgatagtttaacgtcgaagagcgataggccccaaaatatgcgcgtgaaaatagattgtgcgctataaaataaacggatttaggtagttggtgttgaggaagccagccacaaacatagtagaaattgtcggaaaagtgtcgcccgccgacagcttgtataattgcgtcggaagtcaacgcgcgtatcgctggaaaaccgtttgcatcgaaagcccctccggaaaggcgtgaaaagttgggcgccttttgcgcttgtcgcttggcgttgtaaaatttatcagttgctccgcggttgtttttattgtgaactgttaaacgtgcacttcgaaggactgccatttaaacttaaggacattcaagagcaaaaggaaaacaccaaacatgcccatttgcaagcgggaaggattcgacctgaatcagaaggagggcaagaacgaaacattccacgacaacgaccaggtcttctgctgctacatcactaagcgcatttttcgcgactatgagtaagtgcatcctgctaccattcctgcaactgccccttcccttctcctgccattaggtggacgctgcgctaaagtatacaacaaaagcgacgctgcaaaagcatttgcacacgatgtaccgtacatcaccattcagtgtgtgtgtgtgtgtgttcgcaggggtgcataagtgtgcgagtctcgtgggccaaaggcgaaaaaaacgctgttcggtggcgggaagaaattacagctgccgccgcacagctgctcgccgcggagttgccacctggtgccaaagcgcgcgctcttgaatttggaatttgttgacccaattcgacttatatgatccttctagatatttttaagatcagcaattatttaagaggctgggtagcgcgaaactattttaataaatagcaaacatactaaatatgttttactctgacaagcttcaattatatcaaaataaattgaccttaaaacgctgatcgattaaatttatttatccagacactacttccggcacgtgatggtgatcaactcaacggtgtggcagtgcgaggccaccggcaaggagaacctcacctacgaggaggcggtcaaaagtgagcgggcggctcgcaagaagatggagcagttcaaacagagccttcgggcacccgtccttctggttgtggagcacgcccaacagtcggcggtcaacaccttgaacatgatagtggccaagtttctgcgcaagcgctactttatcggcgaggaggtgtcggtgcaagctaagaagaacgccacgtacacggtgttgggtgtcaagttggacaaaaatatgccggaaccactcaatggtatctatgaggacacggacaacctggtctacagactacgaccaaacaagggcgatcccagtgcagagcttgatctgccctttaggcaattacgtcgctcgcgcatggagtttaacctggaaaacctgagtatgtttataaagagcaatgtatcgcgggtggatggacttcttcgacccaagccagaggcatacaagcagtacgtgacggaccctggcgtaaacttctccacaattttcattggcaaaatgccacgttattctcccgctaagattaaaaaacctgacggcaagaagcaatccactctcaacaaatatattgtcgccggtgaagcaacggctgcaaagtcaaaggcgaaggccaagtctgatgctaaatctctggcagaggaattggagcgggttaagcgagaaaaagaggccaagcttattgagttggaaaaacaaaaggcggaaaagaaggcacagttgattgaacgcgttgaaaacgaatgtaatttactgcttcaaaagacggacgacctggagagaaccgaccaaaaagtcctgccccgctacagacagatcgtcacattgctgcctgagcacctcctgggtgatgccttcatgatgcgcgagtttatgcacacttacacaggattgctgtccggcatcgaggtgttccgtcagaacctcagtttctacgagatgacacgtgcactgactgctcgtgagattgcgggcccactatcggacatcctcctcgttctgcttggcactgttttcgatctgcaaaaagaagaggaggaggaatgcgcagtgacctacctcgatcgggctgcacaaactcaggagccctattggagtatggcgcaggccgccaaaagtcacctttacgccaagaggcacttttcctttaaggtcaatactttgtttgtgccgacgtgtgttatctaaactaattttattttcccaataggtaaatgaactaccattagatgcactgactctcagtgaagtgctacgactgcatctacttggatccggagcttttgtaaatgaaaaggcggagcgctggagagtcatgtaccggaatggctactcgtcaaaagaagaccctggtctggaactacgtctggaacactcgcacatcctgcgcattctcaaaaatcattccgtatatcagctaaagtttaaggatataatgctcctgattcgctgcctgatgtcccaaattatgacatactcgggcacgattaacttgattgaggagcgtatggagcaaacagcaaaggccaggcaagatctacgagctctagttgtcggggaaaataagagattagccgccgtagagataaacaggaaaaaactcacgcaaatgcaccacctggaggtaaatggcgttgagcctgaaaagagggaagcgttggtcgagaaattaaagaagagtattgccgagctacacgcccaatcggatcagcaacatcgcaagcacgagttgcagatgcttaagttgcattcgcagcttttcaattttttggtttacttgggcatggataggtgctacaggaaatattacgttttggagtctatgcctgggatctttgtcgagcattcgccggacagccttgacacttgtttggagcaaccaataacaaataagtcccaaatagaaattcgtcagcagtctgcattgccaaagaatcgcaaggacctaagggtatatctactcaaactctacggagacgacgaaaagaaaactaagaaaaaggccaagcactctctagagaacaaggagaaccaagagcatcgccttaacggcagtgcagaacccatggatgtcgaatctgattctccagaggctcccactcattttgagctcttgatgtgcagtggtgacaaacgatcttgtattgtgcatgattcaagaaatgggcaacggcagcgttgggcatatatttacaaagccgaggagatcgatgaattaattaaggctctcaatcccaatggtctccgtgaatatgaactccttcaagagctatccgttctgcgttccttaatcgaacagcatgctaagacctgcccagtagacttgctaagtctagaaaacgaaacaatgcgcaagaagtttatggcggcgatggaatctgaaactaaccgtaaatacggagaagcaaactttgggttaccgaatgggaccgatctaaacgaagtgatgcgcttgcatttagtggatcgaattattcaatttgaaaatgatatttacactggtgatctcggccgcctgaaagttaaggatatggaaaagtggcgaagtgacttgcttggaggcaattacgacgctcagtgcaagttgcagtggggcccgggtggcaagttggaagatgaagctggttctgacaacgaatcccacgaaactcacgaggaggacgatggcgcactattaggtaaatatgccaggaaaccatatcgcgatcctggcatgtatttggcagcttctgcagacacaaaacccctaccagacagcgacgatgaggaggatcagcatacgaatgccgtctcgattcctatcgccgtgcataacatggcctcggcccttctgcaagtggagcaggctattggaaaacggtttctgaaggaaccctacggcatgaagaagtgggaccccaagcaggaggctttaaaacttgcctgcgactcgcgtttgcaccagtgggaagtttcgctaatggaaagtacaagctttgctcaagtctttctgcacctaaacatcttgcacgactgtattcagtggaggcgttccaccaataagtcattatgcaaggtctgcaggcgtggcagcgatccggagaagatgctgctgtgcgatgaatgcaacgctggcactcacatgttctgcctgaagcctaagctgaggtctgtacccccgggcaactggtattgcaatgattgcgtaaagagtctgggtctcagcaatggtcaaaacgaaaaggataaaaagcaggcgacaaagaagaaacgcaagtttatcgtagaagaggaggatgatgaagctacagacgaagaagaggaagagaaaaaggatgacgatatgaccgatgaggatgcggagcacgagaacgaaaaacacgatgaggacgttgaggacgacgaaagtgtgacctctaccccctcatcttccagagtcaatgggcgaattttaaggcgaccccgcacacggccaacaagcagaagacttacttcgaaagagatcgaagaacatgctcaggaagacgttgacagcggagacgtcagcgatgacgcatccttaaccgccggtgaagatacgatcgaagacgagtcgtaagttaaaaactggattgaaaattaaatttagataatgaacccattgcaatccacagagatgaggaaaaggtgtgtcagaagtgtttctacgatggcggtgaaatcaaatgtgtgcaatgcaggctattctttcacctggaatgtgttcacctcaagcgaccgcctcgcacagatttcgtttgtaaaacctgcaagccgatgccacaacgacctaggcgccggcacagtaacagtaagtccacaaatttctccttaatgaatagctcactaatagcccgtgtgatttctgtccaacaagtgaatggtgatcatgaccgcgatgaggaggagccaaaagcaaagcgaccacgtaactctttgcgcctatctatcgacaagaccgcccgcccaagcaacggcaacaacaacaacaataataacaacagcagcgtcaataacaacaaccatcgcagaagcgggcgtcggacgaacgagcacatgccgttgaacagtgccgccttgtacgatctgcttgagcagatcatgaagcacaaggccgcttggccgtttctgcgaccagtgctgacatcggaggttcccgactaccatcagatcatcaaaacgcccatggatctagctaaaatcaaatccaagctaaacatgggcgcctaccagctaaacgaggagctgctcagcgacattcagttggtgtttagaaactgcgatttgtacaacgtagaaggcaacgaaatatacgagtgagtagattgggataatccgtaagtggtcttgttgtttatcctttatcttgaatccgttgcagcgctggttgtcaactagaacgattcgtgatcgatcgatgtagggacatgcagctaccgtttaggcctagcgatatgaacggggaagtcaaagcttgctgagccggacgctgatctccaccagctatcgtgtaaattagttagtctactctaagccgtagttgaaaaccatatatatttaagcacaaatattaagtgtatttaaagatctttattttcgtgcatgtcagttctaagttcagcacacgcatatgcaaaaaatccttatctgttggtttatgagactttatgtatttataaattattgtagacactacgaaaattccacaatcaataaatgaagtgaccggaaacaaacgattcaaaataaataagtaaaaaaaattgttttgttggaggtgtaaaaagctaaaattaaatgaatacaaattttaaaagagcttagctctgtataaacgcaggaaaaatgggtagatggagtttgccagtttttaaaacagacgatttgatcgcaaaaaaaaaaatattgcttaaagaacctaatttgccaaattctttcttaatcgagaaaaaagtgttggatgctgcattgttattattactttttatgaaatctaagctatgtgtgtttcactggacattaaaagtaagagtgaatagtgttttctcctataaacacatttacgcttagcaagatatttaaaaccggaatcattgctttcatatgggtacaacctacatggatgacgatgtggatgctgttgactcagtattacaattatccggaattagtccattcaaggctttgtgattttggttggacgtatgctggctgttgttgttgctctccagttggtgaaaaagaaaagaactggaggtgctgggagcctgagaaaactgggcctccatagaggtcaacgaagttgtggaggaattgtctccatcatcgtctgttcggacgctttccctttcattggaattgttgttgttattgtcgcctgacgaggtctcctcttcatcggagtcgtagctagccccggtgtcgcttgaggcgctgccctcgtccatctcggtggtgcgtggtcgaccagtcgctcttctgtgttttgtggtttgaatgagctgtcttaattttcgctttcgtgttctttgagtgattctggattttggcgtttcaactaaaatagggaaatataatcttatagtatttcaaatgtttgattggcaaatgtcgcttaaatattaagaaaatagtttcacccgaataatttacatatcaataaaacccgaaaagaatttcatttggcacgcataaatgaacaagtcatggagctaagtcaggttgtgtcaacaagccccggatacttgccaataa

SEQ ID NO: 2909 - DNA, 4983 bp, DROSOPHILA
ccagccacaaacatagtagaaattgtcggaaaagtgtcgcccgccgacagcttgtataattgcgtcggaagtcaacgcgcgtatcgctggaaaaccgtttgcatcgaaagcccctccggaaaggcgtgaaaagttgggcgccttttgcgcttgtcgcttggcgttgtaaaatttatcagttgctccgcggttgtttttattgtgaactgttaaacgtgcacttcgaaggactgccatttaaacttaaggacattcaagagcaaaaggaaaacaccaaacatgcccatttgcaagcgggaaggattcgacctgaatcagaaggagggcaagaacgaaacattccacgacaacgaccaggtcttctgctgctacatcactaagcgcatttttcgcgactatgaacactacttccggcacgtgatggtgatcaactcaacggtgtggcagtgcgaggccaccggcaaggagaacctcacctacgaggaggcggtcaaaagtgagcgggcggctcgcaagaagatggagcagttcaaacagagccttcgggcacccgtccttctggttgtggagcacgcccaacagtcggcggtcaacaccttgaacatgatagtggccaagtttctgcgcaagcgctactttatcggcgaggaggtgtcggtgcaagctaagaagaacgccacgtacacggtgttgggtgtcaagttggacaaaaatatgccggaaccactcaatggtatctatgaggacacggacaacctggtctacagactacgaccaaacaagggcgatcccagtgcagagcttgatctgccctttaggcaattacgtcgctcgcgcatggagtttaacctggaaaacctgagtatgtttataaagagcaatgtatcgcgggtggatggacttcttcgacccaagccagaggcatacaagcagtacgtgacggaccctggcgtaaacttctccacaattttcattggcaaaatgccacgttattctcccgctaagattaaaaaacctgacggcaagaagcaatccactctcaacaaatatattgtcgccggtgaagcaacggctgcaaagtcaaaggcgaaggccaagtctgatgctaaatctctggcagaggaattggagcgggttaagcgagaaaaagaggccaagcttattgagttggaaaaacaaaaggcggaaaagaaggcacagttgattgaacgcgttgaaaacgaatgtaatttactgcttcaaaagacggacgacctggagagaaccgaccaaaaagtcctgccccgctacagacagatcgtcacattgctgcctgagcacctcctgggtgatgccttcatgatgcgcgagtttatgcacacttacacaggattgctgtccggcatcgaggtgttccgtcagaacctcagtttctacgagatgacacgtgcactgactgctcgtgagattgcgggcccactatcggacatcctcctcgttctgcttggcactgttttcgatctgcaaaaagaagaggaggaggaatgcgcagtgacctacctcgatcgggctgcacaaactcaggagccctattggagtatggcgcaggccgccaaaagtcacctttacgccaagaggcacttttcctttaaggtaaatgaactaccattagatgcactgactctcagtgaagtgctacgactgcatctacttggatccggagcttttgtaaatgaaaaggcggagcgctggagagtcatgtaccggaatggctactcgtcaaaagaagaccctggtctggaactacgtctggaacactcgcacatcctgcgcattctcaaaaatcattccgtatatcagctaaagtttaaggatataatgctcctgattcgctgcctgatgtcccaaattatgacatactcgggcacgattaacttgattgaggagcgtatggagcaaacagcaaaggccaggcaagatctacgagctctagttgtcggggaaaataagagattagccgccgtagagataaacaggaaaaaactcacgcaaatgcaccacctggaggtaaatggcgttgagcctgaaaagagggaagcgttggtcgagaaattaaagaagagtattgccgagctacacgcccaatcggatcagcaacatcgcaagcacgagttgcagatgcttaagttgcattcgcagcttttcaattttttggtttacttgggcatggataggtgctacaggaaatattacgttttggagtctatgcctgggatctttgtcgagcattcgccggacagccttgacacttgtttggagcaaccaataacaaataagtcccaaatagaaattcgtcagcagtctgcattgccaaagaatcgcaaggacctaagggtatatctactcaaactctacggagacgacgaaaagaaaactaagaaaaaggccaagcactctctagagaacaaggagaaccaagagcatcgccttaacggcagtgcagaacccatggatgtcgaatctgattctccagaggctcccactcattttgagctcttgatgtgcagtggtgacaaacgatcttgtattgtgcatgattcaagaaatgggcaacggcagcgttgggcatatatttacaaagccgaggagatcgatgaattaattaaggctctcaatcccaatggtctccgtgaatatgaactccttcaagagctatccgttctgcgttccttaatcgaacagcatgctaagacctgcccagtagacttgctaagtctagaaaacgaaacaatgcgcaagaagtttatggcggcgatggaatctgaaactaaccgtaaatacggagaagcaaactttgggttaccgaatgggaccgatctaaacgaagtgatgcgcttgcatttagtggatcgaattattcaatttgaaaatgatatttacactggtgatctcggccgcctgaaagttaaggatatggaaaagtggcgaagtgacttgcttggaggcaattacgacgctcagtgcaagttgcagtggggcccgggtggcaagttggaagatgaagctggttctgacaacgaatcccacgaaactcacgaggaggacgatggcgcactattaggtaaatatgccaggaaaccatatcgcgatcctggcatgtatttggcagcttctgcagacacaaaacccctaccagacagcgacgatgaggaggatcagcatacgaatgccgtctcgattcctatcgccgtgcataacatggcctcggcccttctgcaagtggagcaggctattggaaaacggtttctgaaggaaccctacggcatgaagaagtgggaccccaagcaggaggctttaaaacttgcctgcgactcgcgtttgcaccagtgggaagtttcgctaatggaaagtacaagctttgctcaagtctttctgcacctaaacatcttgcacgactgtattcagtggaggcgttccaccaataagtcattatgcaaggtctgcaggcgtggcagcgatccggagaagatgctgctgtgcgatgaatgcaacgctggcactcacatgttctgcctgaagcctaagctgaggtctgtacccccgggcaactggtattgcaatgattgcgtaaagagtctgggtctcagcaatggtcaaaacgaaaaggataaaaagcaggcgacaaagaagaaacgcaagtttatcgtagaagaggaggatgatgaagctacagacgaagaagaggaagagaaaaaggatgacgatatgaccgatgaggatgcggagcacgagaacgaaaaacacgatgaggacgttgaggacgacgaaagtgtgacctctaccccctcatcttccagagtcaatgggcgaattttaaggcgaccccgcacacggccaacaagcagaagacttacttcgaaagagatcgaagaacatgctcaggaagacgttgacagcggagacgtcagcgatgacgcatccttaaccgccggtgaagatacgatcgaagacgagtcagatgaggaaaaggtgtgtcagaagtgtttctacgatggcggtgaaatcaaatgtgtgcaatgcaggctattctttcacctggaatgtgttcacctcaagcgaccgcctcgcacagatttcgtttgtaaaacctgcaagccgatgccacaacgacctaggcgccggcacagtaacatgaatggtgatcatgaccgcgatgaggaggagccaaaagcaaagcgaccacgtaactctttgcgcctatctatcgacaagaccgcccgcccaagcaacggcaacaacaacaacaataataacaacagcagcgtcaataacaacaaccatcgcagaagcgggcgtcggacgaacgagcacatgccgttgaacagtgccgccttgtacgatctgcttgagcagatcatgaagcacaaggccgcttggccgtttctgcgaccagtgctgacatcggaggttcccgactaccatcagatcatcaaaacgcccatggatctagctaaaatcaaatccaagctaaacatgggcgcctaccagctaaacgaggagctgctcagcgacattcagttggtgtttagaaactgcgatttgtacaacgtagaaggcaacgaaatatacgacgctggttgtcaactagaacgattcgtgatcgatcgatgtagggacatgcagctaccgtttaggcctagcgatatgaacggggaagtcaaagcttgctgagccggacgctgatctccaccagctatcgtgtaaattagttagtctactctaagccgtagttgaaaaccatatatatttaagcacaaatattaagtgtatttaaagatctttattttcgtgcatgtcagttctaagttcagcacacgcatatgcaaaaaatccttatctgttggtttatgagactttatgtatttataaattattgtagacactacgaaaattccacaatcaataaatgaagtgaccggaaacaaacgattcaaaataaataag

SEQ ID NO: 2910 - protein, 1476 aa, DROSOPHILA
MPICKREGFDLNQKEGKNETFHDNDQVFCCYITKRIFRDYEHYFRHVMVINSTVWQCEATGKENLTYEEAVKSERAARKKMEQFKQSLRAPVLLVVEHAQQSAVNTLNMIVAKFLRKRYFIGEEVSVQAKKNATYTVLGVKLDKNMPEPLNGIYEDTDNLVYRLRPNKGDPSAELDLPFRQLRRSRMEFNLENLSMFIKSNVSRVDGLLRPKPEAYKQYVTDPGVNFSTIFIGKMPRYSPAKIKKPDGKKQSTLNKYIVAGEATAAKSKAKAKSDAKSLAEELERVKREKEAKLIELEKQKAEKKAQLIERVENECNLLLQKTDDLERTDQKVLPRYRQIVTLLPEHLLGDAFMMREFMHTYTGLLSGIEVFRQNLSFYEMTRALTAREIAGPLSDILLVLLGTVFDLQKEEEEECAVTYLDRAAQTQEPYWSMAQAAKSHLYAKRHFSFKVNELPLDALTLSEVLRLHLLGSGAFVNEKAERWRVMYRNGYSSKEDPGLELRLEHSHILRILKNHSVYQLKFKDIMLLIRCLMSQIMTYSGTINLIEERMEQTAKARQDLRALVVGENKRLAAVEINRKKLTQMHHLEVNGVEPEKREALVEKLKKSIAELHAQSDQQHRKHELQMLKLHSQLFNFLVYLGMDRCYRKYYVLESMPGIFVEHSPDSLDTCLEQPITNKSQIEIRQQSALPKNRKDLRVYLLKLYGDDEKKTKKKAKHSLENKENQEHRLNGSAEPMDVESDSPEAPTHFELLMCSGDKRSCIVHDSRNGQRQRWAYIYKAEEIDELIKALNPNGLREYELLQELSVLRSLIEQHAKTCPVDLLSLENETMRKKFMAAMESETNRKYGEANFGLPNGTDLNEVMRLHLVDRIIQFENDIYTGDLGRLKVKDMEKWRSDLLGGNYDAQCKLQWGPGGKLEDEAGSDNESHETHEEDDGALLGKYARKPYRDPGMYLAASADTKPLPDSDDEEDQHTNAVSIPIAVHNMASALLQVEQAIGKRFLKEPYGMKKWDPKQEALKLACDSRLHQWEVSLMESTSFAQVFLHLNILHDCIQWRRSTNKSLCKVCRRGSDPEKMLLCDECNAGTHMFCLKPKLRSVPPGNWYCNDCVKSLGLSNGQNEKDKKQATKKKRKFIVEEEDDEATDEEEEEKKDDDMTDEDAEHENEKHDEDVEDDESVTSTPSSSRVNGRILRRPRTRPTSRRLTSKEIEEHAQEDVDSGDVSDDASLTAGEDTIEDESDEEKVCQKCFYDGGEIKCVQCRLFFHLECVHLKRPPRTDFVCKTCKPMPQRPRRRHSNMNGDHDRDEEEPKAKRPRNSLRLSIDKTARPSNGNNNNNNNNSSVNNNNHRRSGRRTNEHMPLNSAALYDLLEQIMKHKAAWPFLRPVLTSEVPDYHQIIKTPMDLAKIKSKLNMGAYQLNEELLSDIQLVFRNCDLYNVEGNEIYDAGCQLERFVIDRCRDMQLPFRPSDMNGEVKAC

SEQ ID NO: 2911 - DNA, 4914 bp, DROSOPHILA
ttatgcagatgtggtgcacagcatggccagagtggtaagtggctaggtctccctgtggataactccttggtataatcgcattggtattcttttagactaaaggagatcaggagataaagaccctgctgactgccttggaaaatgtcaaaagcgactttgatggagccgcggatgtgatctcgcagatgcacaaacattttgtgatagatgacgaacttaagtaggttttgttggaaatatgcttggattaagttataattccaatcgatttcttatccagcgatcaatggacctcctccatgcacggaaagaagtgtccttgcaagaccagagccagtgcccaggccaagtatctggtagaaaggctgcgggactcctggcagcacttgctccgggatcgtgcaacgcgcacactgacctacaacgacgaacagtttcatgccctggagaagattaaagtggatcacaatggcaaacggataaaggccttgcttttggataacgtaaatccgacagtggcacaaatcgcagagtgcctggcggactggtataagttggctcagaccgtctaccttaaaactcaaattttggagaaggacgtgcgcgattgcgaaagaaagttgaacggaatacgcgatgagttgtatcacgttaagtcggagctgaagctggatgtggacacaaagaccataaacaacaataatcagctggccaagatagaggagcggaatcggctaagggtcatgcagcagcagcaacaggaagttatggctgtcatgagaacgaacagcgatataataagtttgcttagcaaactgggcattaccaacggaagtctggaaagtagttagacgggcatatcatgaaagtgcaagaatattttatttgcctttactttgtaagttaacaataaatgtttacttttttatatctgaatttgtaaagcaactacatatattcctattgaaacttggctgaatatcgtgaaagagtaagatttctgtaggtcattaaattatttattttatcatgctgaaataaaattaaatttccgattatagttatttagttattgttatttaactgtctatacatgaaaaagcggactagactgcatggcacacacaatttaaaaatggtagaatgccctatggctagaatgcactgtttaattgcttatttacattctctaaacaagtttacttttgacgaaactgatgatgatgactcttgcgaatgttggctccgttgtgttgctgtcgctgggaatgtgatcttgtgggtccatgttcgccggcatcggcccggcgcaaaacttcggcgtaggataagtctaactttttaagtttatgtaagtcttgcgataccgtgttatgataaaactcgacgccattgagctctattactcggccccgagaagtttggggagtattcatattcttgttatagatcaccatgggagagccattccagttgcttgaggatggagttgtccgtctgcggttactgcgtccgaattcagcattcaatgtatccgtacacatctttgagctcccttgtccaccaccacggttgttcatggccagaggactgttcctgggagtaaattcccgggagttaaacaattcgatgcgatctccagatgagctttggtttcggtgctttcgtcggttcttcttcttgattccgacacctacggttagatattcgagtggttcgcgcttgagtggagtaagtatctggccattctcccttatgggtttataattcggttcgccgacagttgtttccttcgaggagctgtttaacaaagtggattgcgttagggacgattggttttgttggtttcggacatcaaagatgtgttttttggctgtcttccgctccagtttggtaacgcactcggacattgcaatggactggttggatataactgaggatacgacgctctgtgtgtcgtcaatgaagtcatctggagattcctccctctcgggtgttaccgggggtactttggccgccaccaagggtaatttttctgtaatctgtgcgtcgtcatgcagggacggaagcttgtcttcttcgttattatcagctgccttcttgagcactccaaatatctccttgaagagttccctgtactccgggcgattacggaaatgagattcaatggggctgacgtcgtcataaatactgaatttacaatcgtttccattacttattgagcaaaggaagtaactcggtcgctcgtcagtttgcgtagacttgttgctagtttcatccgagaatcccgacgatgtagtttctgattccgaaaactcggttggagtgcgcttacgtgttgaatccaacataaggtcagattcctttgagctgttaacaattgtttctgattttttgccttgactggactcggtcatggtcttcccatctggattgctggtgaagttgctcttgaccgcattcgaggttctcttcacctccaccagagcttcatatttctcgactaggtcccgataaggatttggtttgtcgctagagttgggattgaggtcctcgggaatccggaagcgttccttataatccgcaccactattatcgcatttcgaggtgctttcgcttagtatgctgcgatcgtcatcttcgtagatttcttcggttggggcaatggaggattgatcatccatattggtgttgctttcgttaatatccctcaggcagcgactacacatttggccttgtctcacgtcgtccaggaggctgaactcctcgtgcatcgacattgttccctcattggcactgttctccagcagacgtgtctgcagaccttggttgtcttggattatggtcaccaactgctcctccagctcggtgcaccgctgctgttcggccaagaagtcacgttttaacacctccatttcgctgagcagctttaccaattcctcgttgtcttcacccttaacggcggtcctctcgcacatggtggcattactgaaggagatatcctccaatcctgtcgagttcgctatggccataacatctagtttggagaactcaacactctgctccttgcacagcgattgaatgctgtgactggacacagaaccctcggtcgaatgctgcatcctatagcgttcctgctggtactgatccaccttccgccgctcggtgctcagggattgccgagcatcgctcagaagttgactcagttcctcgcagcgggcttccaggacttccgtgttggtggtcagcgtcttaatctgcttcttgtcccgattcttctccagatttagccgctgattggcacgctccagatcctgaatgcccacttccagctgctcgtagaccttaagccgtgaatcattcacctcggtcatcgcattaatgtgcttgcgcagatgcaagatctccagttcctgctcatcccccttaatcttgtactccttgatgaaggtttccagctccttattgcgttccaggagcgtttttcccagctctgctgccaattgtaggtcatcgagcatgaactgcgatacgttttcacagccagccgaaccgtgattggattcctccatcttggacttggacctttctaagcttgggcttgatgcgaactctggcgaaaatttaaagatttaatcgattttagttcatttagcagcagagctttgtgagcaaagcaaaactcaaacagtaattacttggcaaatgtcctctcaatggtggaaaactgctacaacagtaacttttttactgtttcatccccaaaaacaaaaagtatggtattgcagcgagtgcagaaaaagccctacgtactagggcgcaactgcatgtacgaatagttaattaatgctttttattatacacaatcgacctgcagacaaagaaccgaaatgaacttcctagcagaaccggaaataaatttataataggattattcgcattagggggattcctgctcagatagggctatgatttaagctcgcctttcttatataacccctcgcgagttgtttggggaaaccttgttggattctgaaataccagcaaaatgcacggatgtataattatatttttgagctttcattgtctttgaaagaagcatgcaatatcataatagatcagtacatgaatacccatattaattattacgcatatttatagttgtcaaaattaataaatccaaattgttatgtctccttagtaattcctttgctcacagaagcaaaatatttgtttgaacattattaatttaagttaccctagaatttggcgtatttaaagttcagataccatctaagtttaaatatatctaggaagtgcaaccgataatgtgtggggtgttaaaaataaatatatatattaattatacaaatatttaagataagtaattatttgacgctaccttatcgcaacgatagcttggctttaattaccaaccaccgcctggtcacactaagcggccggcgttcttgttttgattttgtgtttcttccttttcttaattcgaggacagtatgagccccccgccatgctggacgctctaattcgggcagcggagcttgtggatctggtcctgctgcgtccgctggccagcgtgattgatgcagtgattactggcgtgtactacttcctgtggggcagctacctcgtcggcttctgtttggtggagggcagcaggaaaggatggaatctgttgagatgcgcggtcaggaatatcaacgagggcatccgcgacttgggcctcatcacgctagatgtggcggactacttctacggcggcaccaaaggcgggctcaagaatgtactcgattttggtcactgcatatcccgattcatctgcaacttactcatcgatctgggtgatggcatcttgtggctgctgatgctgctgccgagggccatactattcctctg

SEQ ID NO: 2912 - DNA, 2677 bp, DROSOPHILA
ttccggttctgctaggaagttcatttcggttctttgtctgcaggtcgattgtgtataataaaaagcattaattaactattcgtacatgcagttgcgccctagtacgtagggctttttctgcactcgctgcaataccatactttttgtttttggggatgaaacagtaaaaaagttactgttgtagcagttttccaccattgagaggacatttgccaaagttcgcatcaagcccaagcttagaaaggtccaagtccaagatggaggaatccaatcacggttcggctggctgtgaaaacgtatcgcagttcatgctcgatgacctacaattggcagcagagctgggaaaaacgctcctggaacgcaataaggagctggaaaccttcatcaaggagtacaagattaagggggatgagcaggaactggagatcttgcatctgcgcaagcacattaatgcgatgaccgaggtgaatgattcacggcttaaggtctacgagcagctggaagtgggcattcaggatctggagcgtgccaatcagcggctaaatctggagaagaatcgggacaagaagcagattaagacgctgaccaccaacacggaagtcctggaagcccgctgcgaggaactgagtcaacttctgagcgatgctcggcaatccctgagcaccgagcggcggaaggtggatcagtaccagcaggaacgctataggatgcagcattcgaccgagggttctgtgtccagtcacagcattcaatcgctgtgcaaggagcagagtgttgagttctccaaactagatgttatggccatagcgaactcgacaggattggaggatatctccttcagtaatgccaccatgtgcgagaggaccgccgttaagggtgaagacaacgaggaattggtaaagctgctcagcgaaatggaggtgttaaaacgtgacttcttggccgaacagcagcggtgcaccgagctggaggagcagttggtgaccataatccaagacaaccaaggtctgcagacacgtctgctggagaacagtgccaatgagggaacaatgtcgatgcacgaggagttcagcctcctggacgacgtgagacaaggccaaatgtgtagtcgctgcctgagggatattaacgaaagcaacaccaatatggatgatcaatcctccattgccccaaccgaagaaatctacgaagatgacgatcgcagcatactaagcgaaagcacctcgaaatgcgataatagtggtgcggattataaggaacgcttccggattcccgaggacctcaatcccaactctagcgacaaaccaaatccttatcgggacctagtcgagaaatatgaagctctggtggaggtgaagagaacctcgaatgcggtcaagagcaacttcaccagcaatccagatgggaagaccatgaccgagtccagtcaaggcaaaaaatcagaaacaattgttaacagctcaaaggaatctgaccttatgttggattcaacacgtaagcgcactccaaccgagttttcggaatcagaaactacatcgtcgggattctcggatgaaactagcaacaagtctacgcaaactgacgagcgaccgagttacttcctttgctcaataagtaatggaaacgattgtaaattcagtatttatgacgacgtcagccccattgaatctcatttccgtaatcgcccggagtacagggaactcttcaaggagatatttggagtgctcaagaaggcagctgataataacgaagaagacaagcttccgtccctgcatgacgacgcacagattacagaaaaattacccttggtggcggccaaagtacccccggtaacacccgagagggaggaatctccagatgacttcattgacgacacacagagcgtcgtatcctcagttatatccaaccagtccattgcaatgtccgagtgcgttaccaaactggagcggaagacagccaaaaaacacatctttgatgtccgaaaccaacaaaaccaatcgtccctaacgcaatccactttgttaaacagctcctcgaaggaaacaactgtcggcgaaccgaattataaacccataagggagaatggccagatacttactccactcaagcgcgaaccactcgaatatctaaccgtaggtgtcggaatcaagaagaagaaccgacgaaagcaccgaaaccaaagctcatctggagatcgcatcgaattgtttaactcccgggaatttactcccaggaacagtcctctggccatgaacaaccgtggtggtggacaagggagctcaaagatgtgtacggatacattgaatgctgaattcggacgcagtaaccgcagacggacaactccatcctcaagcaactggaatggctctcccatggtgatctataacaagaatatgaatactccccaaacttctcggggccgagtaatagagctcaatggcgtcgagttttatcataacacggtatcgcaagacttacataaacttaaaaagttagacttatcctacgccgaagttttgcgccgggccgatgccggcgaacatggacccacaagatcacattcccagcgacagcaacacaacggagccaacattcgcaagagtcatcatcatcagtttcgtcaaaagtaaacttgtttagagaatcatgataaaataaataatttaatgacctacag

SEQ ID NO: 2913 - protein, 790 aa, DROSOPHILA
MEESNHGSAGCENVSQFMLDDLQLAAELGKTLLERNKELETFIKEYKIKGDEQELEILHLRKHINAMTEVNDSRLKVYEQLEVGIQDLERANQRLNLEKNRDKKQIKTLTTNTEVLEARCEELSQLLSDARQSLSTERRKVDQYQQERYRMQHSTEGSVSSHSIQSLCKEQSVEFSKLDVMAIANSTGLEDISFSNATMCERTAVKGEDNEELVKLLSEMEVLKRDFLAEQQRCTELEEQLVTIIQDNQGLQTRLLENSANEGTMSMHEEFSLLDDVRQGQMCSRCLRDINESNTNMDDQSSIAPTEEIYEDDDRSILSESTSKCDNSGADYKERFRIPEDLNPNSSDKPNPYRDLVEKYEALVEVKRTSNAVKSNFTSNPDGKTMTESSQGKKSETIVNSSKESDLMLDSTRKRTPTEFSESETTSSGFSDETSNKSTQTDERPSYFLCSISNGNDCKFSIYDDVSPIESHFRNRPEYRELFKEIFGVLKKAADNNEEDKLPSLHDDAQITEKLPLVAAKVPPVTPEREESPDDFIDDTQSVVSSVISNQSIAMSECVTKLERKTAKKHIFDVRNQQNQSSLTQSTLLNSSSKETTVGEPNYKPIRENGQILTPLKREPLEYLTVGVGIKKKNRRKHRNQSSSGDRIELFNSREFTPRNSPLAMNNRGGGQGSSKMCTDTLNAEFGRSNRRRTTPSSSNWNGSPMVIYNKNMNTPQTSRGRVIELNGVEFYHNTVSQDLHKLKKLDLSYAEVLRRADAGEHGPTRSHSQRQQHNGANIRKSHHHQFRQK

SEQ ID NO: 2914 - DNA, 3824 bp, DROSOPHILA
gtcctttcagctgatgaccgatgtagctggcaatccggaggaggagcgtcgggcggagttctattaccagccatggacgcacgaggccgtttcgcgctacttcttcaccaaggtcaaccagaagcgggccgaattggagcaggcgctgggcatacgcaacggctaggtgaatgatgagctgatcatctccaccagccaattcgtggagtccaccgtcaagagacctccataaaccgtgcgcacggcaaactctttttccttcgccagtttagtttaagcttaaaatatttcctttttttccgacaagccgaactccatcccgttccaaaacgaaaatcccctttgcagttgtcccaaatacccacatccagcacaaatattggacttaactgtaagctaataaaatggcatacaaatataaaactgtctataaaatttgattcggttcacttttagaaacactaaagtttaatttttattacgagtgatttcagttgactttatatatatttagccttttgatacttttgggttccctttaaattttagaaaatgcatttgttggttaattgagattttagaatcacttgtagccttacgatcctatacgatttcatgttaactgattgtttctaaaatacgttttgatctacatttggatatattattgtagggttttagctgaccaatctaacaatgtgaaaggccagcgtttgagtcatctcacaatatttcataatttatactttaaaattatgtgttttagtaagttccatagttctgcaatcctttgatgctgttgatttaaaattgtataaaacgcattttcagttgatgcttcttaacttaacgatttacgcacaagctttaaacggtttagactacaacacaggattaatatcactagtaaactaaagacggactcggattactacgtctcgggctagacctcaagctataggcggaatgtgcaacctttactccttttgctgatataggatcaatttcgcttcttgcgattggcagcaatggaagcggatgagctgttgcccgtatccggggtctcgctaatggacagacccgtgtccagccgactcttgtcaaccggatacagccagcgctgatacagatagataataaacacaatatcatcgcgcaggcaggccacccgatgggccgtgggcatggtgatgatgaaggcgaagaagtcgtcgatgaaggtattaaatgctttatacataaatgcgcgccacggcaatgcggccacagacttcagcttgtagtttacaaacagttgcggcaacatgaacaggaaaccgaaggcgtaaactccgttcaccagtgagttaagtgtccatgagtaccaggagcggtgtggttggtagaggagcgaatagaccgctccgcatatacaaagcggatacagcagatagctcagatatcgcatgccctgtctgtcaaactgatcagtcttctgctcctccgccagctgacctgacttcacgccagcttggtcaccattccgccggtcaacttgctccagcttgcgacgaaccaggccactgaagctaagctccagacggaagattttcttgcacttccacagctcaatgagcgtgcccaggccaactggcacaagtaccagatacgacgtattctcatctagcagataaaaaaagatcacgatctgcgaaaacgctcgccacattgtggtgcggcttgatagcccctcgtacgactgctttttgcgccaaaaggccacgtcgttcttaaagcttaaaaagtcgaagagcatctgcgggaaaagggaaacataaattagttataggactggagcatatgacgtatgttgcaatttttcaatctctactcacatggatgctggacacaaagatggtgccacacaaaaggtatacattggtgtccgaaaagatgcctttcacctcgtcaatatccttggtagcaaatccaatggtgagcagcgcctgggtggcgtgttccatgagcagcattagacggagcttgcccacgcccacgggcttgtagtggaagctgaatgtgaattcggtggtattgcgggtgacgggcactagatcctttagccgcgtattaaatgtatcagtctgcaggatgggcaagatctgttgattgcgattgacacgtatcaagggggccatttcaggtgggacatccgcttgcgaaacggaatagagatcgttgagcagggtgacgtaaacattcgatcggatgtgggtgctgggacgtccagtggtggaggctttcttcttttctttctcctggacagcggctgctgcacctttctcggaatctccaagcagtttaaaggcctccgcccgcggcactatgtaatccgtgagactcatcgtatggacaacggtgggcccatctctgcgcaggctacgccattccagtggctcaccctccaaggccaagaccacatgaagatacagggagccattccggcgcgtcctcagcggcacatccacttcgaagtcgtgctcaaagttttgatcatagtcgaacctcttggccttgtacagatcccgcacctcggtggcaatgggacttctgctgagggaggaaaacaatgccagttgcaggcgtggcctgtccgccaggaatgatgtgtagcacggcacaccgctgcattgcagcgtagtgaagagctgcgacatctggtagatggagtggccgatgtacgccagaaatgcaacgcctagaagcgtggagatcgagggcagggccatgtcctcctcttacggttttctcgttggtgcgttggccggcgttttattggtattggcactagagccggcaaaacattaaaagaagctatcgatagttccggcagtatcgatgatctaaagcttcaaaaactatcggtttttattgtccctaacggtcgttcctagcacgtgtttccaaactatcattcccatcccaacgtgatacatgtcaaaaaattaaatttaactaaaagcaatggattccaggatgtgccgtgtctgtttgagggagatggagaacatgctatgcatcttcgaaacgatgccgctacccggcgtttccctagcgaccatgatttccgattggtgcggcttcccggttctaccgaaggatccttttcccaagaccatttgccagtcttgtgcgctggatgcgcagactgcttacgggatggacagcgtgcaggtgattgagcaggatgagatggtggtcagtgagatgaattatgaggaagaaggatcgaatgactccgatgttgaactgattgagccagtcgatggcagccaggagatggagacaattgacttgacaatcgattcaccgggggacaacgtggagaatatgtgccccaactcaaactccaacgggaatggcaatgtgagccagagcagcgcccagaaggataccaagaagaaaatgctgaagaagacacataaatgtaacatttgcgggaagtatttcatgttacctgcgcaccttaagtgtcacatgtgggtccatgcgcgtgaaaaaccttacaaatgcttacaatgctcccagtcctacgcacaaatccgcggtcttaggcgccatgagcgcgtacatagttcgagacctgaattacgatcctacaagtgttcccgatgccccaagatcttcaacagaaactctgcccttaagaaccacgagaccatgcaccataattaatgcgatcctacaagtgtccccgatgccccaagatcttcaacagaaactctgcccttaagaaccacaagaccatgcaccataattaatgcgatcctacaagtgtccccgat

SEQ ID NO: 2915 - DNA, 1745 bp, DROSOPHILA
ccaataccaataaaacgccggccaacgcaccaacgagaaaaccgtaagaggaggacatggccctgccctcgatctccacgcttctaggcgttgcatttctggcgtacatcggccactccatctaccagatgtcgcagctcttcactacgctgcaatgcagcggtgtgccgtgctacacatcattcctggcggacaggccacgcctgcaactggcattgttttcctccctcagcagaagtcccattgccaccgaggtgcgggatctgtacaaggccaagaggttcgactatgatcaaaactttgagcacgacttcgaagtggatgtgccgctgaggacgcgccggaatggctccctgtatcttcatgtggtcttggccttggagggtgagccactggaatggcgtagcctgcgcagagatgggcccaccgttgtccatacgatgagtctcacggattacatagtgccgcgggcggaggcctttaaactgcttggagattccgagaaaggtgcagcagccgctgtccaggagaaagaaaagaagaaagcctccaccactggacgtcccagcacccacatccgatcgaatgtttacgtcaccctgctcaacgatctctattccgtttcgcaagcggatgtcccacctgaaatggcccccttgatacgtgtcaatcgcaatcaacagatcttgcccatcctgcagactgatacatttaatacgcggctaaaggatctagtgcccgtcacccgcaataccaccgaattcacattcagcttccactacaagcccgtgggcgtgggcaagctccgtctaatgctgctcatggaacacgccacccaggcgctgctcaccattggatttgctaccaaggatattgacgaggtgaaaggcatcttttcggacaccaatgtataccttttgtgtggcaccatctttgtgtccagcatccatatgctcttcgactttttaagctttaagaacgacgtggccttttggcgcaaaaagcagtcgtacgaggggctatcaagccgcaccacaatgtggcgagcgttttcgcagatcgtgatctttttttatctgctagatgagaatacgtcgtatctggtacttgtgccagttggcctgggcacgctcattgagctgtggaagtgcaagaaaatcttccgtctggagcttagcttcagtggcctggttcgtcgcaagctggagcaagttgaccggcggaatggtgaccaagctggcgtgaagtcaggtcagctggcggaggagcagaagactgatcagtttgacagacagggcatgcgatatctgagctatctgctgtatccgctttgtatatgcggagcggtctattcgctcctctaccaaccacaccgctcctggtactcatggacacttaactcactggtgaacggagtttacgccttcggtttcctgttcatgttgccgcaactgtttgtaaactacaagctgaagtctgtggccgcattgccgtggcgcgcatttatgtataaagcatttaataccttcatcgacgacttcttcgccttcatcatcaccatgcccacggcccatcgggtggcctgcctgcgcgatgatattgtgtttattatctatctgtatcagcgctggctgtatccggttgacaagagtcggctggacacgggtctgtccattagcgagaccccggatacgggcaacagctcatccgcttccattgctgccaatcgcaagaagcgaaattga

SEQ ID NO: 2916 - protein, 562 aa, DROSOPHILA
MALPSISTLLGVAFLAYIGHSIYQMSQLFTTLQCSGVPCYTSFLADRPRLQLALFSSLSRSPIATEVRDLYKAKRFDYDQNFEHDFEVDVPLRTRRNGSLYLHVVLALEGEPLEWRSLRRDGPTVVHTMSLTDYIVPRAEAFKLLGDSEKGAAAAVQEKEKKKASTTGRPSTHIRSNVYVTLLNDLYSVSQADVPPEMAPLIRVNRNQQILPILQTDTFNTRLKDLVPVTRNTTEFTFSFHYKPVGVGKLRLMLLMEHATQALLTIGFATKDIDEVKGIFSDTNVYLLCGTIFVSSIHMLFDFLSFKNDVAFWRKKQSYEGLSSRTTMWRAFSQIVIFFYLLDENTSYLVLVPVGLGTLIELWKCKKIFRLELSFSGLVRRKLEQVDRRNGDQAGVKSGQLAEEQKTDQFDRQGMRYLSYLLYPLCICGAVYSLLYQPHRSWYSWTLNSLVNGVYAFGFLFMLPQLFVNYKLKSVAALPWRAFMYKAFNTFIDDFFAFIITMPTAHRVACLRDDIVFIIYLYQRWLYPVDKSRLDTGLSISETPDTGNSSSASIAANRKKRN
